United States Patent Application Publication US 2007/0214517 A1 - sequence listing, part 25

SEQ ID NO: 30094 - DNA, 866 bp, Arabidopsis thaliana
  misc_feature (1)..(866): Ceres Seq. ID no. 12396917
  misc_feature: MA Experiment ID: 108573 Result: Down-regulated in Transcription
  misc_feature: MA Experiment 108573 PARAMETER Experiment Name: At_Drought_cDNA_P Parameter: Timepoint (hr) Value: 6
  misc_feature: MA Experiment 108573 PARAMETER Experiment Name: At_Drought_cDNA_P Parameter: Tissue Value: Aerial
  misc_feature: MA Experiment 108573 PARAMETER Experiment Name: At_Drought_cDNA_P Parameter: Treatment Value: Drought vs. No Drought
  misc_feature: MA Experiment ID: 20000224 Result: Up-regulated in Transcription
  misc_feature: MA Experiment ID: 20000235 Result: Up-regulated in Transcription
  misc_feature: MA Experiment 20000235 PARAMETER Experiment Name: At_Siliques_P Parameter: Age (day) Value: 21
  misc_feature: MA Experiment 20000235 PARAMETER Experiment Name: At_Siliques_P Parameter: Organism Value: A. thaliana
  misc_feature: MA Experiment 20000235 PARAMETER Experiment Name: At_Siliques_P Parameter: Plant Line Value: WS
  misc_feature: MA Experiment 20000235 PARAMETER Experiment Name: At_Siliques_P Parameter: Tissue Value: 5-10mm Siliques vs. Whole Plant
  misc_feature: MA Experiment ID: 20001905 Result: Down-regulated in Transcription
  misc_feature: MA Experiment 20001905 PARAMETER Experiment Name: At_Drought_Reproduction_P Parameter: Age (day) Value: 40
  misc_feature: MA Experiment 20001905 PARAMETER Experiment Name: At_Drought_Reproduction_P Parameter: Organism Value: A. thaliana
  misc_feature: MA Experiment 20001905 PARAMETER Experiment Name: At_Drought_Reproduction_P Parameter: Plant Line Value: WS
  misc_feature: MA Experiment 20001905 PARAMETER Experiment Name: At_Drought_Reproduction_P Parameter: Timepoint (day) Value: 10
  misc_feature: MA Experiment 20001905 PARAMETER Experiment Name: At_Drought_Reproduction_P Parameter: Tissue Value: Rosettes
  misc_feature: MA Experiment 20001905 PARAMETER Experiment Name: At_Drought_Reproduction_P Parameter: Treatment Value: Drought vs. No Drought
  misc_feature: MA Experiment ID: 20001911 Result: Down-regulated in Transcription
  misc_feature: MA Experiment 20001911 PARAMETER Experiment Name: At_Drought_Reproduction_P Parameter: Age (day) Value: 40
  misc_feature: MA Experiment 20001911 PARAMETER Experiment Name: At_Drought_Reproduction_P Parameter: Organism Value: A. thaliana
  misc_feature: MA Experiment 20001911 PARAMETER Experiment Name: At_Drought_Reproduction_P Parameter: Plant Line Value: WS
  misc_feature: MA Experiment 20001911 PARAMETER Experiment Name: At_Drought_Reproduction_P Parameter: Timepoint (day) Value: 10
  misc_feature: MA Experiment 20001911 PARAMETER Experiment Name: At_Drought_Reproduction_P Parameter: Tissue Value: Flowers
  misc_feature: MA Experiment 20001911 PARAMETER Experiment Name: At_Drought_Reproduction_P Parameter: Treatment Value: Drought vs. No Drought
attcagttgaatctccaccgacaccataatctgagtgcaagagtccatactctccatcagagagactcaaatccaattctccttactgcaacagctcaaatttggaatcttttgtaaaaacccagatcagcggatctcgaatggcgaagcacacggcagcgttgaaggtgggactagctttactggccctcagcatgattggctacatacttggtccaccgctctactggcacctcacggaagccttagccgtttcagccacttcttgctctgcttgcgtctgtgattgctcttcgttgcctcttctcaccatcccaactggactcagcaatggttcattcactgattgtgcaaagcgtgatccagaggtgaacgaagacacagagaagaactacgctgaacttttaacagaggaactgaagcagcgtgaagcagcatcgatggagaaacacaaacgagtagacacgggtctgctagaggccaagaagataacatcatcttaccaaaaggaggcagataagtgtaactcgggtatggagacttgtgaagaagcaagagagaaggcggagaaagcacttgtggagcagaagaagctgacttctatgtgggaacagagagctcgtcagaaaggatacaaagatggagccaccaagtcaactgttaaatccaaaagcggcactgaggttgcttaaggacacaccaaaggttttgatttcttatcacacgaaagaaaagtttcagtgtatctgtgaatttgattcatactattgtatttaagttttctgatggagataaatcaatcagatggaatgaaaacatgtaaccaaaacaacaaaggattagtggattttgaacaaagttacaac

SEQ ID NO: 30095 - protein, 183 aa, Arabidopsis thaliana
  peptide (1)..(183): Ceres Seq. ID no. 12396918
  misc_feature (14)..(166): Homolog of NCBI NO: 18400504 NR Description: expressed protein
  misc_feature (12)..(166): Homolog of NCBI NO: 25407700 NR Description: hypothetical protein AT4g30990 [imported] -
  misc_feature (12)..(166): Homolog of NCBI NO: 18417716 NR Description: Expressed protein
  misc_feature (1)..(171): Homolog of NCBI NO: 34897026 NR Description: unknown protein [Oryza sativa (japonica
  misc_feature (8)..(177): Homolog of NCBI NO: 27922919 NR Description: unknown protein [Phytophthora sojae]
  misc_feature (1)..(183): Homolog of NCBI NO: 25364108 NR Description: hypothetical protein [imported] - Arabidopsis
  misc_feature (1)..(183): Homolog of NCBI NO: 18390477 NR Description: expressed protein
  misc_feature (1)..(183): Homolog of NCBI NO: 7487433 NR Description: hypothetical protein At2g32580 [imported] -
  misc_feature (1)..(183): Homolog of NCBI NO: 21553781 NR Description: unknown [Arabidopsis thaliana]
  misc_feature (1)..(183): Homolog of NCBI NO: 18403016 NR Description: expressed protein
MAKHTAALKVGLALLALSMIGYILGPPLYWHLTEALAVSATSCSACVCDCSSLPLLTIPTGLSNGSFTDCAKRDPEVNEDTEKNYAELLTEELKQREAASMEKHKRVDTGLLEAKKITSSYQKEADKCNSGMETCEEAREKAEKALVEQKKLTSMWEQRARQKGYKDGATKSTVKSKSGTEVA

SEQ ID NO: 30096 - protein, 165 aa, Arabidopsis thaliana
  peptide (1)..(165): Ceres Seq. ID no. 12396919
  misc_feature (1)..(148): Homolog of NCBI NO: 18400504 NR Description: expressed protein
  misc_feature (1)..(148): Homolog of NCBI NO: 25407700 NR Description: hypothetical protein AT4g30990 [imported] -
  misc_feature (1)..(148): Homolog of NCBI NO: 18417716 NR Description: Expressed protein
  misc_feature (1)..(153): Homolog of NCBI NO: 34897026 NR Description: unknown protein [Oryza sativa (japonica
  misc_feature (1)..(159): Homolog of NCBI NO: 27922919 NR Description: unknown protein [Phytophthora sojae]
  misc_feature (1)..(165): Homolog of NCBI NO: 25364108 NR Description: hypothetical protein [imported] - Arabidopsis
  misc_feature (1)..(165): Homolog of NCBI NO: 18390477 NR Description: expressed protein
  misc_feature (1)..(165): Homolog of NCBI NO: 7487433 NR Description: hypothetical protein At2g32580 [imported] -
  misc_feature (1)..(165): Homolog of NCBI NO: 21553781 NR Description: unknown [Arabidopsis thaliana]
  misc_feature (1)..(165): Homolog of NCBI NO: 18403016 NR Description: expressed protein
MIGYILGPPLYWHLTEALAVSATSCSACVCDCSSLPLLTIPTGLSNGSFTDCAKRDPEVNEDTEKNYAELLTEELKQREAASMEKHKRVDTGLLEAKKITSSYQKEADKCNSGMETCEEAREKAEKALVEQKKLTSMWEQRARQKGYKDGATKSTVKSKSGTEVA

SEQ ID NO: 30097 - DNA, 783 bp, Arabidopsis thaliana
  misc_feature (1)..(783): Ceres Seq. ID no. 12323067
  misc_feature: MA Experiment ID: 108474 Result: Down-regulated in Transcription
  misc_feature: MA Experiment 108474 PARAMETER Experiment Name: At_Drought_Flowers_cDNA_P Parameter: Timepoint (hr) Value: null
  misc_feature: MA Experiment 108474 PARAMETER Experiment Name: At_Drought_Flowers_cDNA_P Parameter: Treatment Value: Drought vs. No Drought
  misc_feature: MA Experiment ID: 108501 Result: Down-regulated in Transcription
  misc_feature: MA Experiment 108501 PARAMETER Experiment Name: At_ap2_floral_buds_cDNA_P Parameter: Plant Line Value: ap2 (Ler.)
  misc_feature: MA Experiment 108501 PARAMETER Experiment Name: At_ap2_floral_buds_cDNA_P Parameter: Tissue Value: Closed Flower
  misc_feature: MA Experiment ID: 20000087 Result: Up-regulated in Transcription
  misc_feature: MA Experiment 20000087 PARAMETER Experiment Name: At_100uM_ABA_Mutants_cDNA_P Parameter: Plant Line Value: WS
  misc_feature: MA Experiment 20000087 PARAMETER Experiment Name: At_100uM_ABA_Mutants_cDNA_P Parameter: Timepoint (hr) Value: 6
  misc_feature: MA Experiment 20000087 PARAMETER Experiment Name: At_100uM_ABA_Mutants_cDNA_P Parameter: Tissue Value: Aerial
  misc_feature: MA Experiment 20000087 PARAMETER Experiment Name: At_100uM_ABA_Mutants_cDNA_P Parameter: Treatment Value: 100uM ABA vs. No Treatment
  misc_feature: MA Experiment ID: 20000314 Result: Down-regulated in Transcription
  misc_feature: MA Experiment 20000314 PARAMETER Experiment Name: At_14day_Shoots-Roots_Sub_P Parameter: Age (day) Value: 14
  misc_feature: MA Experiment 20000314 PARAMETER Experiment Name: At_14day_Shoots-Roots_Sub_P Parameter: Organism Value: A. thaliana
  misc_feature: MA Experiment 20000314 PARAMETER Experiment Name: At_14day_Shoots-Roots_Sub_P Parameter: Plant Line Value: WS
  misc_feature: MA Experiment 20000314 PARAMETER Experiment Name: At_14day_Shoots-Roots_Sub_P Parameter: Tissue Value: Roots vs. Whole Plant
  misc_feature: MA Experiment ID: 20000315 Result: Down-regulated in Transcription
  misc_feature: MA Experiment 20000315 PARAMETER Experiment Name: At_14day_Shoots-Roots_Sub_P Parameter: Age (day) Value: 14
  misc_feature: MA Experiment 20000315 PARAMETER Experiment Name: At_14day_Shoots-Roots_Sub_P Parameter: Organism Value: A. thaliana
  misc_feature: MA Experiment 20000315 PARAMETER Experiment Name: At_14day_Shoots-Roots_Sub_P Parameter: Plant Line Value: WS
  misc_feature: MA Experiment 20000315 PARAMETER Experiment Name: At_14day_Shoots-Roots_Sub_P Parameter: Tissue Value: Shoots vs. Whole Plant
  misc_feature: MA Experiment ID: 20000355 Result: Down-regulated in Transcription
  misc_feature: MA Experiment 20000355 PARAMETER Experiment Name: At_Siliques_Sub_P Parameter: Age (day) Value: 21
  misc_feature: MA Experiment 20000355 PARAMETER Experiment Name: At_Siliques_Sub_P Parameter: Organism Value: A. thaliana
  misc_feature: MA Experiment 20000355 PARAMETER Experiment Name: At_Siliques_Sub_P Parameter: Plant Line Value: WS
  misc_feature: MA Experiment 20000355 PARAMETER Experiment Name: At_Siliques_Sub_P Parameter: Tissue Value: Less Than 5mm Siliques vs. Whole Plant
  misc_feature: MA Experiment ID: 20000440 Result: Up-regulated in Transcription
  misc_feature: MA Experiment 20000440 PARAMETER Experiment Name: At_Closed-Flower__Sub_P Parameter: Tissue Value: Closed Flower vs. Whole Plant
ataagatttacatatagtttgaaaaggaggaaagttagataaggataaaatgactgcattggagaaacatgtttccttcttcgacaggaacaaagacggcaccgtttatccatgggaaacctaccaaggatttagagcgctcgggacagggcgtcttttggcggcttttgttgctatattcatcaacatgggactcagcaagaaaactcgtccgggaaagggattctcgccgttgtttccaatagacgtgaagaatagtcacctttgcatgcacggtagtgacaccgacgtctatgacgatgacggaagatttgtggaatcaaaattcgaggagatattcaacaagcatgctcgcacacataaagatgctctcactgcagaggaaattcaaaaaatgcttaagactaacagggatcctttcgatatcacaggatggctttcagattatggagaatggaaaatattacatacgttagctcaagacaaaaatggtttgttatcggaaaagagcgtcagggccatctacgatggtagccttttccaccaactggagaaaaaaagatcatcttcttcttctcgtggcaagaaacaaaaactaccttaaatgtttacgtgaatcttcttatattgttatgtggagatcacataactttcgtggtttataattatataattttgtcaaataacttttgtaatgaataattacatagatcaaacactctttaaataattattgtgtatattgaaaaaaaaaaacttatcaaagtatacttcatttaagtt

SEQ ID NO: 30098 - protein, 184 aa, Arabidopsis thaliana
  peptide (1)..(184): Ceres Seq. ID no. 12323068
  misc_feature (1)..(169): Pfam Name: Caleosin related protein Pfam Description: Caleosin related protein
  misc_feature (1)..(171): Homolog of NCBI NO: 34538473 NR Description: caleosin 1 [Hordeum vulgare]
  misc_feature (1)..(174): Homolog of NCBI NO: 34902470 NR Description: Putative abscisic acid-induced protein - rice
  misc_feature (1)..(177): Homolog of NCBI NO: 37652831 NR Description: calcium binding protein [Fagus sylvatica]
  misc_feature (26)..(184): Homolog of NCBI NO: 15220688 NR Description: Ca2+-binding EF-hand common family protein,
  misc_feature (1)..(175): Homolog of NCBI NO: 21617961 NR Description: unknown [Arabidopsis thaliana]
  misc_feature (1)..(175): Homolog of NCBI NO: 18409651 NR Description: Ca2+-binding EF-hand common family protein,
  misc_feature (1)..(177): Homolog of NCBI NO: 21593851 NR Description: unknown [Arabidopsis thaliana]
  misc_feature (1)..(177): Homolog of NCBI NO: 18409649 NR Description: Ca2+-binding EF-hand common family protein,
  misc_feature (1)..(184): Homolog of NCBI NO: 9295714 NR Description: F26F24.9 [Arabidopsis thaliana]
  misc_feature (1)..(184): Homolog of NCBI NO: 15220687 NR Description: pollen coat EF-hand protein
MTALEKHVSFFDRNKDGTVYPWETYQGFRALGTGRLLAAFVAIFINMGLSKKTRPGKGFSPLFPIDVKNSHLCMHGSDTDVYDDDGRFVESKFEEIFNKHARTHKDALTAEEIQKMLKTNRDPFDITGWLSDYGEWKILHTLAQDKNGLLSEKSVRAIYDGSLFHQLEKKRSSSSSRGKKQKLP

SEQ ID NO: 30099 - protein, 138 aa, Arabidopsis thaliana
  peptide (1)..(138): Ceres Seq. ID no. 12323069
  misc_feature (1)..(123): Pfam Name: Caleosin related protein Pfam Description: Caleosin related protein
  misc_feature (1)..(125): Homolog of NCBI NO: 34538473 NR Description: caleosin 1 [Hordeum vulgare]
  misc_feature (1)..(128): Homolog of NCBI NO: 34902470 NR Description: Putative abscisic acid-induced protein - rice
  misc_feature (1)..(131): Homolog of NCBI NO: 37652831 NR Description: calcium binding protein [Fagus sylvatica]
  misc_feature (1)..(138): Homolog of NCBI NO: 15220688 NR Description: Ca2+-binding EF-hand common family protein,
  misc_feature (1)..(129): Homolog of NCBI NO: 21617961 NR Description: unknown [Arabidopsis thaliana]
  misc_feature (1)..(129): Homolog of NCBI NO: 18409651 NR Description: Ca2+-binding EF-hand common family protein,
  misc_feature (1)..(131): Homolog of NCBI NO: 21593851 NR Description: unknown [Arabidopsis thaliana]
  misc_feature (1)..(131): Homolog of NCBI NO: 18409649 NR Description: Ca2+-binding EF-hand common family protein,
  misc_feature (1)..(138): Homolog of NCBI NO: 9295714 NR Description: F26F24.9 [Arabidopsis thaliana]
  misc_feature (1)..(138): Homolog of NCBI NO: 15220687 NR Description: pollen coat EF-hand protein
MGLSKKTRPGKGFSPLFPIDVKNSHLCMHGSDTDVYDDDGRFVESKFEEIFNKHARTHKDALTAEEIQKMLKTNRDPFDITGWLSDYGEWKILHTLAQDKNGLLSEKSVRAIYDGSLFHQLEKKRSSSSSRGKKQKLP

SEQ ID NO: 30100 - protein, 111 aa, Arabidopsis thaliana
  peptide (1)..(111): Ceres Seq. ID no. 12323070
  misc_feature (1)..(96): Pfam Name: Caleosin related protein Pfam Description: Caleosin related protein
  misc_feature (1)..(98): Homolog of NCBI NO: 34538473 NR Description: caleosin 1 [Hordeum vulgare]
  misc_feature (1)..(101): Homolog of NCBI NO: 34902470 NR Description: Putative abscisic acid-induced protein - rice
  misc_feature (1)..(104): Homolog of NCBI NO: 37652831 NR Description: calcium binding protein [Fagus sylvatica]
  misc_feature (1)..(111): Homolog of NCBI NO: 15220688 NR Description: Ca2+-binding EF-hand common family protein,
  misc_feature (1)..(102): Homolog of NCBI NO: 21617961 NR Description: unknown [Arabidopsis thaliana]
  misc_feature (1)..(102): Homolog of NCBI NO: 18409651 NR Description: Ca2+-binding EF-hand common family protein,
  misc_feature (1)..(104): Homolog of NCBI NO: 21593851 NR Description: unknown [Arabidopsis thaliana]
  misc_feature (1)..(104): Homolog of NCBI NO: 18409649 NR Description: Ca2+-binding EF-hand common family protein,
  misc_feature (1)..(111): Homolog of NCBI NO: 9295714 NR Description: F26F24.9 [Arabidopsis thaliana]
  misc_feature (1)..(111): Homolog of NCBI NO: 15220687 NR Description: pollen coat EF-hand protein
MHGSDTDVYDDDGRFVESKFEEIFNKHARTHKDALTAEEIQKMLKTNRDPFDITGWLSDYGEWKILHTLAQDKNGLLSEKSVRAIYDGSLFHQLEKKRSSSSSRGKKQKLP

SEQ ID NO: 30101 - DNA, 1493 bp, Arabidopsis thaliana
  misc_feature (1)..(1493): Ceres Seq. ID no. 13648561
  misc_feature: MA Experiment ID: 20000179 Result: Up-regulated in Transcription
  misc_feature: MA Experiment 20000179 PARAMETER Experiment Name: At_Germinating_Seeds_P Parameter: Age (hr) Value: 6 vs. 0
  misc_feature: MA Experiment 20000179 PARAMETER Experiment Name: At_Germinating_Seeds_P Parameter: Tissue Value: Germinating Seeds
  misc_feature: MA Experiment ID: 20000180 Result: Up-regulated in Transcription
  misc_feature: MA Experiment 20000180 PARAMETER Experiment Name: At_Germinating_Seeds_P Parameter: Age (hr) Value: 24 vs. 0
  misc_feature: MA Experiment 20000180 PARAMETER Experiment Name: At_Germinating_Seeds_P Parameter: Tissue Value: Germinating Seeds
  misc_feature: MA Experiment ID: 20000227 Result: Up-regulated in Transcription
  misc_feature: MA Experiment 20000227 PARAMETER Experiment Name: At_Root-Tips-vs-Tops_P Parameter: Tissue Value: Root Tips vs. Root Tops
  misc_feature: MA Experiment ID: 20000794 Result: Down-regulated in Transcription
  misc_feature: MA Experiment 20000794 PARAMETER Experiment Name: At_Petals_P Parameter: Age (day) Value: 23-25 days
  misc_feature: MA Experiment 20000794 PARAMETER Experiment Name: At_Petals_P Parameter: Plant Line Value: WS
  misc_feature: MA Experiment 20000794 PARAMETER Experiment Name: At_Petals_P Parameter: Tissue Value: Petals vs. Whole plant
  misc_feature: MA Experiment ID: 20001559 Result: Down-regulated in Transcription
  misc_feature: MA Experiment 20001559 PARAMETER Experiment Name: At_Drought_Soil_Dry_P Parameter: Age (day) Value: 28
  misc_feature: MA Experiment 20001559 PARAMETER Experiment Name: At_Drought_Soil_Dry_P Parameter: Organism Value: A. thaliana
  misc_feature: MA Experiment 20001559 PARAMETER Experiment Name: At_Drought_Soil_Dry_P Parameter: Plant Line Value: WS
  misc_feature: MA Experiment 20001559 PARAMETER Experiment Name: At_Drought_Soil_Dry_P Parameter: Post Timepoint (hr) Value: 29
  misc_feature: MA Experiment 20001559 PARAMETER Experiment Name: At_Drought_Soil_Dry_P Parameter: Post-Treatment Value: Re-Water vs. No Drought
  misc_feature: MA Experiment 20001559 PARAMETER Experiment Name: At_Drought_Soil_Dry_P Parameter: Timepoint (day) Value: 14
  misc_feature: MA Experiment 20001559 PARAMETER Experiment Name: At_Drought_Soil_Dry_P Parameter: Treatment Value: Drought vs. No Drought
  misc_feature: MA Experiment ID: 20001906 Result: Down-regulated in Transcription
  misc_feature: MA Experiment 20001906 PARAMETER Experiment Name: At_Drought_Reproduction_P Parameter: Age (day) Value: 35
  misc_feature: MA Experiment 20001906 PARAMETER Experiment Name: At_Drought_Reproduction_P Parameter: Organism Value: A. thaliana
  misc_feature: MA Experiment 20001906 PARAMETER Experiment Name: At_Drought_Reproduction_P Parameter: Plant Line Value: WS
  misc_feature: MA Experiment 20001906 PARAMETER Experiment Name: At_Drought_Reproduction_P Parameter: Timepoint (day) Value: 5
  misc_feature: MA Experiment 20001906 PARAMETER Experiment Name: At_Drought_Reproduction_P Parameter: Tissue Value: Siliques
  misc_feature: MA Experiment 20001906 PARAMETER Experiment Name: At_Drought_Reproduction_P Parameter: Treatment Value: Drought vs. No Drought
  misc_feature: MA Experiment ID: 20001908 Result: Down-regulated in Transcription
  misc_feature: MA Experiment 20001908 PARAMETER Experiment Name: At_Drought_Reproduction_P Parameter: Age (day) Value: 40
  misc_feature: MA Experiment 20001908 PARAMETER Experiment Name: At_Drought_Reproduction_P Parameter: Organism Value: A. thaliana
  misc_feature: MA Experiment 20001908 PARAMETER Experiment Name: At_Drought_Reproduction_P Parameter: Plant Line Value: WS
  misc_feature: MA Experiment 20001908 PARAMETER Experiment Name: At_Drought_Reproduction_P Parameter: Timepoint (day) Value: 10
  misc_feature: MA Experiment 20001908 PARAMETER Experiment Name: At_Drought_Reproduction_P Parameter: Tissue Value: Siliques
  misc_feature: MA Experiment 20001908 PARAMETER Experiment Name: At_Drought_Reproduction_P Parameter: Treatment Value: Drought vs. No Drought
  misc_feature: MA Experiment ID: 20001911 Result: Down-regulated in Transcription
  misc_feature: MA Experiment 20001911 PARAMETER Experiment Name: At_Drought_Reproduction_P Parameter: Age (day) Value: 40
  misc_feature: MA Experiment 20001911 PARAMETER Experiment Name: At_Drought_Reproduction_P Parameter: Organism Value: A. thaliana
  misc_feature: MA Experiment 20001911 PARAMETER Experiment Name: At_Drought_Reproduction_P Parameter: Plant Line Value: WS
  misc_feature: MA Experiment 20001911 PARAMETER Experiment Name: At_Drought_Reproduction_P Parameter: Timepoint (day) Value: 10
  misc_feature: MA Experiment 20001911 PARAMETER Experiment Name: At_Drought_Reproduction_P Parameter: Tissue Value: Flowers
  misc_feature: MA Experiment 20001911 PARAMETER Experiment Name: At_Drought_Reproduction_P Parameter: Treatment Value: Drought vs. No Drought
ggcttgacatgacaaatgtacaactgggagagaaagtcagtccgattgtgttggggatgacgatggcaaaagtagtaaataaggaagaaacaggaggggcgttttcgggagaagaaggaggaatatgagtgtgagttgttgttgtaggaatctgggcaagacaataaaaaaggcaataccttcacatcatttgcatctgagaagtcttggtgggagtctctatcgtcgtcgtatccaaagctcttcaatggagaccgatctcaagtcaacctttctcaacgtttattctgttctcaagtctgaccttcttcatgacccttccttcgaattcaccaatgaatctcgtctctgggttgatcggatgctggactacaatgtacgtggagggaaactcaatcggggtctctctgttgttgacagtttcaaacttttgaagcaaggcaatgatttgactgagcaagaggttttcctctcttgtgctctcggttggtgcattgaatggctccaagcttatttccttgtgcttgatgatattatggataactctgtcactcgccgtggtcaaccttgctggttcagagttcctcaggttggtatggttgccatcaatgatgggattctacttcgcaatcacatccacaggattctcaaaaagcatttccgtgataagccttactatgttgaccttgttgatttgtttaatgaggttgagttgcaaacagcttgtggccagatgatagatttgatcaccacctttgaaggagaaaaggatttggccaagtactcattgtcaatccaccgtcgtattgtccagtacaaaacggcttattactcattttatctccctgttgcttgtgcgttgcttatggccggcgaaaatttggaaaaccatattgatgtgaagaatgttcttgttgacatgggaatctacttccaagtgcaggatgattatctggattgttttgctgatcccgagacgcttggcaagataggaacagatatagaagatttcaaatgctcgtggttggtggttaaggcattagagcgctgcagcgaagaacaaactaagatattatatgagaactatggtaaacccgacccatcgaacgttgctaaagtgaaggatctctacaaagagctggatcttgagggagttttcatggagtatgagagcaaaagctacgagaagctgactggagcgattgagggacaccaaagtaaagcaatccaagcagtgctaaaatccttcttggctaagatctacaagaggcagaagtagtagagacagacaaacataagtctcagccctcaaaaatttcctgttatgtctttgattcttggttggtgatttgtgtaattctgttaagtgctctgattttcagggggaataataaacctgcctcacttttattcttgtgttacaattgtatttgtttcatgactatgatcttcttctttcatcagttatatgaatttgagattcttgttggttg

SEQ ID NO: 30102 - protein, 384 aa, Arabidopsis thaliana
  peptide (1)..(384): Ceres Seq. ID no. 13648562
  misc_feature (76)..(347): Pfam Name: Polyprenyl synthetase Pfam Description: Polyprenyl synthetase
  misc_feature (76)..(347): Pfam Name: Polyprenyl synthetase Pfam Description: Polyprenyl synthetase
  misc_feature (44)..(384): Homolog of NCBI NO: 14488053 NR Description: farnesyl diphosphate synthase [Mentha x piperita]
  misc_feature (45)..(384): Homolog of NCBI NO: 1922251 NR Description: farnesyl pyrophosphate synthase [Gossypium
  misc_feature (45)..(384): Homolog of NCBI NO: 7433992 NR Description: farnesyl-pyrophosphate synthetase - Para rubber
  misc_feature (45)..(384): Homolog of NCBI NO: 1346029 NR Description: Farnesyl pyrophosphate synthetase 2 (FPP
  misc_feature (45)..(384): Homolog of NCBI NO: 20135548 NR Description: farnesyl pyrophosphate synthase [Malus x
  misc_feature (44)..(384): Homolog of NCBI NO: 14488053 NR Description: farnesyl diphosphate synthase [Mentha x piperita]
  misc_feature (45)..(384): Homolog of NCBI NO: 7433992 NR Description: farnesyl-pyrophosphate synthetase - Para rubber
  misc_feature (45)..(384): Homolog of NCBI NO: 20135548 NR Description: farnesyl pyrophosphate synthase [Malus x
  misc_feature (1)..(384): Homolog of NCBI NO: 15238801 NR Description: farnesyl pyrophosphate synthetase 1 (FPS1)
  misc_feature (42)..(384): Homolog of NCBI NO: 1146159 NR Description: farnesyl diphosphate synthase short form
  misc_feature (42)..(384): Homolog of NCBI NO: 1076319 NR Description: farnesyl-pyrophosphate synthetase FPS1 -
  misc_feature (45)..(384): Homolog of NCBI NO: 15236002 NR Description: farnesyl pyrophosphate synthetase 2 (FPS2)
  misc_feature (45)..(384): Homolog of NCBI NO: 1346028 NR Description: Farnesyl pyrophosphate synthetase 1 (FPP
  misc_feature (45)..(384): Homolog of NCBI NO: 1346029 NR Description: Farnesyl pyrophosphate synthetase 2 (FPP
  misc_feature (45)..(384): Homolog of NCBI NO: 1922251 NR Description: farnesyl pyrophosphate synthase [Gossypium
  misc_feature (45)..(384): Homolog of NCBI NO: 1346028 NR Description: Farnesyl pyrophosphate synthetase 1 (FPP
  misc_feature (45)..(384): Homolog of NCBI NO: 15236002 NR Description: farnesyl pyrophosphate synthetase 2 (FPS2)
  misc_feature (42)..(384): Homolog of NCBI NO: 1076319 NR Description: farnesyl-pyrophosphate synthetase FPS1 -
  misc_feature (42)..(384): Homolog of NCBI NO: 1146159 NR Description: farnesyl diphosphate synthase short form
  misc_feature (1)..(384): Homolog of NCBI NO: 15238801 NR Description: farnesyl pyrophosphate synthetase 1 (FPS1)
MSVSCCCRNLGKTIKKAIPSHHLHLRSLGGSLYRRRIQSSSMETDLKSTFLNVYSVLKSDLLHDPSFEFTNESRLWVDRMLDYNVRGGKLNRGLSVVDSFKLLKQGNDLTEQEVFLSCALGWCIEWLQAYFLVLDDIMDNSVTRRGQPCWFRVPQVGMVAINDGILLRNHIHRILKKHFRDKPYYVDLVDLFNEVELQTACGQMIDLITTFEGEKDLAKYSLSIHRRIVQYKTAYYSFYLPVACALLMAGENLENHIDVKNVLVDMGIYFQVQDDYLDCFADPETLGKIGTDIEDFKCSWLVVKALERCSEEQTKILYENYGKPDPSNVAKVKDLYKELDLEGVFMEYESKSYEKLTGAIEGHQSKAIQAVLKSFLAKIYKRQK

SEQ ID NO: 30103 - protein, 343 aa, Arabidopsis thaliana
  peptide (1)..(343): Ceres Seq. ID no. 13648563
  misc_feature (35)..(306): Pfam Name: Polyprenyl synthetase Pfam Description: Polyprenyl synthetase
  misc_feature (35)..(306): Pfam Name: Polyprenyl synthetase Pfam Description: Polyprenyl synthetase
  misc_feature (3)..(343): Homolog of NCBI NO: 14488053 NR Description: farnesyl diphosphate synthase [Mentha x piperita]
  misc_feature (4)..(343): Homolog of NCBI NO: 1922251 NR Description: farnesyl pyrophosphate synthase [Gossypium
  misc_feature (4)..(343): Homolog of NCBI NO: 7433992 NR Description: farnesyl-pyrophosphate synthetase - Para rubber
  misc_feature (4)..(343): Homolog of NCBI NO: 1346029 NR Description: Farnesyl pyrophosphate synthetase 2 (FPP
  misc_feature (4)..(343): Homolog of NCBI NO: 20135548 NR Description: farnesyl pyrophosphate synthase [Malus x
  misc_feature (3)..(343): Homolog of NCBI NO: 14488053 NR Description: farnesyl diphosphate synthase [Mentha x piperita]
  misc_feature (4)..(343): Homolog of NCBI NO: 7433992 NR Description: farnesyl-pyrophosphate synthetase - Para rubber
  misc_feature (4)..(343): Homolog of NCBI NO: 20135548 NR Description: farnesyl pyrophosphate synthase [Malus x
  misc_feature (1)..(343): Homolog of NCBI NO: 15238801 NR Description: farnesyl pyrophosphate synthetase 1 (FPS1)
  misc_feature (1)..(343): Homolog of NCBI NO: 1146159 NR Description: farnesyl diphosphate synthase short form
  misc_feature (1)..(343): Homolog of NCBI NO: 1076319 NR Description: farnesyl-pyrophosphate synthetase FPS1 -
  misc_feature (4)..(343): Homolog of NCBI NO: 15236002 NR Description: farnesyl pyrophosphate synthetase 2 (FPS2)
  misc_feature (4)..(343): Homolog of NCBI NO: 1346028 NR Description: Farnesyl pyrophosphate synthetase 1 (FPP
  misc_feature (4)..(343): Homolog of NCBI NO: 1346029 NR Description: Farnesyl pyrophosphate synthetase 2 (FPP
  misc_feature (4)..(343): Homolog of NCBI NO: 1922251 NR Description: farnesyl pyrophosphate synthase [Gossypium
  misc_feature (4)..(343): Homolog of NCBI NO: 1346028 NR Description: Farnesyl pyrophosphate synthetase 1 (FPP
  misc_feature (4)..(343): Homolog of NCBI NO: 15236002 NR Description: farnesyl pyrophosphate synthetase 2 (FPS2)
  misc_feature (1)..(343): Homolog of NCBI NO: 1076319 NR Description: farnesyl-pyrophosphate synthetase FPS1 -
  misc_feature (1)..(343): Homolog of NCBI NO: 1146159 NR Description: farnesyl diphosphate synthase short form
  misc_feature (1)..(343): Homolog of NCBI NO: 15238801 NR Description: farnesyl pyrophosphate synthetase 1 (FPS1)
METDLKSTFLNVYSVLKSDLLHDPSFEFTNESRLWVDRMLDYNVRGGKLNRGLSVVDSFKLLKQGNDLTEQEVFLSCALGWCIEWLQAYFLVLDDIMDNSVTRRGQPCWFRVPQVGMVAINDGILLRNHIHRILKKHFRDKPYYVDLVDLFNEVELQTACGQMIDLITTFEGEKDLAKYSLSIHRRIVQYKTAYYSFYLPVACALLMAGENLENHIDVKNVLVDMGIYFQVQDDYLDCFADPETLGKIGTDIEDFKCSWLVVKALERCSEEQTKILYENYGKPDPSNVAKVKDLYKELDLEGVFMEYESKSYEKLTGAIEGHQSKAIQAVLKSFLAKIYKRQK

SEQ ID NO: 30104 - protein, 305 aa, Arabidopsis thaliana
  peptide (1)..(305): Ceres Seq. ID no. 13648564
  misc_feature (1)..(268): Pfam Name: Polyprenyl synthetase Pfam Description: Polyprenyl synthetase
  misc_feature (1)..(268): Pfam Name: Polyprenyl synthetase Pfam Description: Polyprenyl synthetase
  misc_feature (1)..(305): Homolog of NCBI NO: 14488053 NR Description: farnesyl diphosphate synthase [Mentha x piperita]
  misc_feature (1)..(305): Homolog of NCBI NO: 1922251 NR Description: farnesyl pyrophosphate synthase [Gossypium
  misc_feature (1)..(305): Homolog of NCBI NO: 7433992 NR Description: farnesyl-pyrophosphate synthetase - Para rubber
  misc_feature (1)..(305): Homolog of NCBI NO: 1346029 NR Description: Farnesyl pyrophosphate synthetase 2 (FPP
  misc_feature (1)..(305): Homolog of NCBI NO: 20135548 NR Description: farnesyl pyrophosphate synthase [Malus x
  misc_feature (1)..(305): Homolog of NCBI NO: 14488053 NR Description: farnesyl diphosphate synthase [Mentha x piperita]
  misc_feature (1)..(305): Homolog of NCBI NO: 7433992 NR Description: farnesyl-pyrophosphate synthetase - Para rubber
  misc_feature (1)..(305): Homolog of NCBI NO: 20135548 NR Description: farnesyl pyrophosphate synthase [Malus x
  misc_feature (1)..(305): Homolog of NCBI NO: 15238801 NR Description: farnesyl pyrophosphate synthetase 1 (FPS1)
  misc_feature (1)..(305): Homolog of NCBI NO: 1146159 NR Description: farnesyl diphosphate synthase short form
  misc_feature (1)..(305): Homolog of NCBI NO: 1076319 NR Description: farnesyl-pyrophosphate synthetase FPS1 -
  misc_feature (1)..(305): Homolog of NCBI NO: 15236002 NR Description: farnesyl pyrophosphate synthetase 2 (FPS2)
  misc_feature (1)..(305): Homolog of NCBI NO: 1346028 NR Description: Farnesyl pyrophosphate synthetase 1 (FPP
  misc_feature (1)..(305): Homolog of NCBI NO: 1346029 NR Description: Farnesyl pyrophosphate synthetase 2 (FPP
  misc_feature (1)..(305): Homolog of NCBI NO: 1922251 NR Description: farnesyl pyrophosphate synthase [Gossypium
  misc_feature (1)..(305): Homolog of NCBI NO: 1346028 NR Description: Farnesyl pyrophosphate synthetase 1 (FPP
  misc_feature (1)..(305): Homolog of NCBI NO: 15236002 NR Description: farnesyl pyrophosphate synthetase 2 (FPS2)
  misc_feature (1)..(305): Homolog of NCBI NO: 1076319 NR Description: farnesyl-pyrophosphate synthetase FPS1 -
  misc_feature (1)..(305): Homolog of NCBI NO: 1146159 NR Description: farnesyl diphosphate synthase short form
  misc_feature (1)..(305): Homolog of NCBI NO: 15238801 NR Description: farnesyl pyrophosphate synthetase 1 (FPS1)
MLDYNVRGGKLNRGLSVVDSFKLLKQGNDLTEQEVFLSCALGWCIEWLQAYFLVLDDIMDNSVTRRGQPCWFRVPQVGMVAINDGILLRNHIHRILKKHFRDKPYYVDLVDLFNEVELQTACGQMIDLITTFEGEKDLAKYSLSIHRRIVQYKTAYYSFYLPVACALLMAGENLENHIDVKNVLVDMGIYFQVQDDYLDCFADPETLGKIGTDIEDFKCSWLVVKALERCSEEQTKILYENYGKPDPSNVAKVKDLYKELDLEGVFMEYESKSYEKLTGAIEGHQSKAIQAVLKSFLAKIYKRQK

SEQ ID NO: 30105 - DNA, 716 bp, Arabidopsis thaliana
  misc_feature (1)..(716): Ceres Seq. ID no. 12396924
  misc_feature: MA Experiment ID: 108488 Result: Down-regulated in Transcription
  misc_feature: MA Experiment ID: 108595 Result: Up-regulated in Transcription
  misc_feature: MA Experiment 108595 PARAMETER Experiment Name: At_Ler-pi_Ovule_cDNA_P Parameter: Plant Line Value: null
  misc_feature: MA Experiment ID: 20000069 Result: Up-regulated in Transcription
  misc_feature: MA Experiment 20000069 PARAMETER Experiment Name: At_100uM_ABA_Mutants_cDNA_P Parameter: Plant Line Value: CS23
  misc_feature: MA Experiment 20000069 PARAMETER Experiment Name: At_100uM_ABA_Mutants_cDNA_P Parameter: Timepoint (hr) Value: 6
  misc_feature: MA Experiment 20000069 PARAMETER Experiment Name: At_100uM_ABA_Mutants_cDNA_P Parameter: Tissue Value: Aerial
  misc_feature: MA Experiment 20000069 PARAMETER Experiment Name: At_100uM_ABA_Mutants_cDNA_P Parameter: Treatment Value: 100uM ABA vs. No Treatment
  misc_feature: MA Experiment ID: 20000070 Result: Up-regulated in Transcription
  misc_feature: MA Experiment 20000070 PARAMETER Experiment Name: At_100uM_ABA_Mutants_cDNA_P Parameter: Plant Line Value: CS24
  misc_feature: MA Experiment 20000070 PARAMETER Experiment Name: At_100uM_ABA_Mutants_cDNA_P Parameter: Timepoint (hr) Value: 6
  misc_feature: MA Experiment 20000070 PARAMETER Experiment Name: At_100uM_ABA_Mutants_cDNA_P Parameter: Tissue Value: Aerial
  misc_feature: MA Experiment 20000070 PARAMETER Experiment Name: At_100uM_ABA_Mutants_cDNA_P Parameter: Treatment Value: 100uM ABA vs. No Treatment
  misc_feature: MA Experiment ID: 20000071 Result: Up-regulated in Transcription
  misc_feature: MA Experiment 20000071 PARAMETER Experiment Name: At_100uM_ABA_Mutants_cDNA_P Parameter: Plant Line Value: CS8104
  misc_feature: MA Experiment 20000071 PARAMETER Experiment Name: At_100uM_ABA_Mutants_cDNA_P Parameter: Timepoint (hr) Value: 6
  misc_feature: MA Experiment 20000071 PARAMETER Experiment Name: At_100uM_ABA_Mutants_cDNA_P Parameter: Tissue Value: Aerial
  misc_feature: MA Experiment 20000071 PARAMETER Experiment Name: At_100uM_ABA_Mutants_cDNA_P Parameter: Treatment Value: 100uM ABA vs. No Treatment
  misc_feature: MA Experiment ID: 20000072 Result: Up-regulated in Transcription
  misc_feature: MA Experiment 20000072 PARAMETER Experiment Name: At_100uM_ABA_Mutants_cDNA_P Parameter: Plant Line Value: CS8105
  misc_feature: MA Experiment 20000072 PARAMETER Experiment Name: At_100uM_ABA_Mutants_cDNA_P Parameter: Timepoint (hr) Value: 6
  misc_feature: MA Experiment 20000072 PARAMETER Experiment Name: At_100uM_ABA_Mutants_cDNA_P Parameter: Tissue Value: Aerial
  misc_feature: MA Experiment 20000072 PARAMETER Experiment Name: At_100uM_ABA_Mutants_cDNA_P Parameter: Treatment Value: 100uM ABA vs. No Treatment
  misc_feature: MA Experiment ID: 20000086 Result: Up-regulated in Transcription
  misc_feature: MA Experiment 20000086 PARAMETER Experiment Name: At_100uM_ABA_Mutants_cDNA_P Parameter: Plant Line Value: CS22
  misc_feature: MA Experiment 20000086 PARAMETER Experiment Name: At_100uM_ABA_Mutants_cDNA_P Parameter: Timepoint (hr) Value: 6
  misc_feature: MA Experiment 20000086 PARAMETER Experiment Name: At_100uM_ABA_Mutants_cDNA_P Parameter: Tissue Value: Aerial
  misc_feature: MA Experiment 20000086 PARAMETER Experiment Name: At_100uM_ABA_Mutants_cDNA_P Parameter: Treatment Value: 100uM ABA vs. No Treatment
  misc_feature: MA Experiment ID: 20000087 Result: Up-regulated in Transcription
  misc_feature: MA Experiment 20000087 PARAMETER Experiment Name: At_100uM_ABA_Mutants_cDNA_P Parameter: Plant Line Value: WS
  misc_feature: MA Experiment 20000087 PARAMETER Experiment Name: At_100uM_ABA_Mutants_cDNA_P Parameter: Timepoint (hr) Value: 6
  misc_feature: MA Experiment 20000087 PARAMETER Experiment Name: At_100uM_ABA_Mutants_cDNA_P Parameter: Tissue Value: Aerial
  misc_feature: MA Experiment 20000087 PARAMETER Experiment Name: At_100uM_ABA_Mutants_cDNA_P Parameter: Treatment Value: 100uM ABA vs. No Treatment
  misc_feature: MA Experiment ID: 20000088 Result: Up-regulated in Transcription
  misc_feature: MA Experiment 20000088 PARAMETER Experiment Name: At_100uM_ABA_Mutants_cDNA_P Parameter: Plant Line Value: Landsberg
  misc_feature: MA Experiment 20000088 PARAMETER Experiment Name: At_100uM_ABA_Mutants_cDNA_P Parameter: Timepoint (hr) Value: 6
  misc_feature: MA Experiment 20000088 PARAMETER Experiment Name: At_100uM_ABA_Mutants_cDNA_P Parameter: Tissue Value: Aerial
  misc_feature: MA Experiment 20000088 PARAMETER Experiment Name: At_100uM_ABA_Mutants_cDNA_P Parameter: Treatment Value: 100uM ABA vs. No Treatment
  misc_feature: MA Experiment ID: 20000089 Result: Up-regulated in Transcription
  misc_feature: MA Experiment ID: 20000090 Result: Up-regulated in Transcription
  misc_feature: MA Experiment ID: 20000184 Result: Down-regulated in Transcription
  misc_feature: MA Experiment 20000184 PARAMETER Experiment Name: At_Shoots__P Parameter: Age (day) Value: 7
  misc_feature: MA Experiment 20000184 PARAMETER Experiment Name: At_Shoots__P Parameter: Tissue Value: Shoots vs. Whole Plant
  misc_feature: MA Experiment ID: 20000438 Result: Down-regulated in Transcription
  misc_feature: MA Experiment 20000438 PARAMETER Experiment Name: At_Shoots__P Parameter: Age (day) Value: 14
  misc_feature: MA Experiment 20000438 PARAMETER Experiment Name: At_Shoots__P Parameter: Tissue Value: Shoots vs. Whole Plant
agtataattgtttttgtcggtcgctaagatattttcacagcttcggagacttcaggaaaaaaaaaaatcatttcttctctgaaacgaaaaaccaaagaaacgagaagaagaagctatggcggatcagctaactgatgaacagatctctgagtttaaggaagcttttagcctcttcgacaaagatggagatggttgcatcaccacaaaggagctgggaacagtgatgcggtcactagggcagaacccaacagaagctgagctacaagacatgatcaacgaggttgacgctgatggaaacggaaccattgacttccctgagttcttaaacctaatggctaaaaagatgaaggacacagactcggaggaagagctgaaagaagctttcagggtgttcgacaaagaccagaacggtttcatatccgctgcagagcttcgccatgtgatgacgaatctaggtgagaaactgactgatgaagaggtcgaggagatgattcgtgaagcagatgttgatggagatggtcagataaactacgaggagtttgtcaagattatgatggctaagtgatgatgataagaaaaaaatgaagaataaaagtggcgatgtgatgaccttttaggcttttactatctacaaaagaatgattcgacctttaatgtcttgggtttgatttgagcctagtagtttcttaaggttttaacagactgaatttgtgact

SEQ ID NO: 30106 - protein, 149 aa, Arabidopsis thaliana; identical to SEQ ID NO: 27678
  peptide (1)..(149): Ceres Seq. ID no. 12396925
  misc_feature (12)..(40): Pfam Name: EF hand Pfam Description: EF hand
  misc_feature (3)..(149): Homolog of NCBI NO: 29150153 NR Description: calcium-sensing GFP analog [synthetic construct]
  misc_feature (1)..(149): Homolog of NCBI NO: 3121848 NR Description: CALMODULIN
  misc_feature (1)..(149): Homolog of NCBI NO: 1076793 NR Description: calmodulin cam2 - maize
  misc_feature (1)..(149): Homolog of NCBI NO: 34304715 NR Description: calmodulin 4 [Daucus carota]
  misc_feature (1)..(149): Homolog of NCBI NO: 15229784 NR Description: calmodulin 7
  misc_feature (1)..(149): Homolog of NCBI NO: 20186 NR Description: calmodulin [Oryza sativa]
  misc_feature (1)..(149): Homolog of NCBI NO: 2809481 NR Description: calmodulin [Oryza sativa]
  misc_feature (1)..(149): Homolog of NCBI NO: 115515 NR Description: Calmodulin
  misc_feature (1)..(149): Homolog of NCBI NO: 479693 NR Description: calmodulin 4 - Arabidopsis thaliana
  misc_feature (1)..(149): Homolog of NCBI NO: 15219652 NR Description: calmodulin-4

SEQ ID NO: 30107 - protein, 113 aa, Arabidopsis thaliana; identical to SEQ ID NO: 27679
  peptide (1)..(113): Ceres Seq. ID no. 12396926
  misc_feature (1)..(113): Homolog of NCBI NO: 29150153 NR Description: calcium-sensing GFP analog [synthetic construct]
  misc_feature (1)..(113): Homolog of NCBI NO: 3121848 NR Description: CALMODULIN
  misc_feature (1)..(113): Homolog of NCBI NO: 1076793 NR Description: calmodulin cam2 - maize
  misc_feature (1)..(113): Homolog of NCBI NO: 34304715 NR Description: calmodulin 4 [Daucus carota]
  misc_feature (1)..(113): Homolog of NCBI NO: 15229784 NR Description: calmodulin 7
  misc_feature (1)..(113): Homolog of NCBI NO: 20186 NR Description: calmodulin [Oryza sativa]
  misc_feature (1)..(113): Homolog of NCBI NO: 2809481 NR Description: calmodulin [Oryza sativa]
  misc_feature (1)..(113): Homolog of NCBI NO: 115515 NR Description: Calmodulin
  misc_feature (1)..(113): Homolog of NCBI NO: 479693 NR Description: calmodulin 4 - Arabidopsis thaliana
  misc_feature (1)..(113): Homolog of NCBI NO: 15219652 NR Description: calmodulin-4

SEQ ID NO: 30108 - protein, 98 aa, Arabidopsis thaliana; identical to SEQ ID NO: 27680
  peptide (1)..(98): Ceres Seq. ID no. 12396927
  misc_feature (1)..(98): Homolog of NCBI NO: 29150153 NR Description: calcium-sensing GFP analog [synthetic construct]
  misc_feature (1)..(98): Homolog of NCBI NO: 3121848 NR Description: CALMODULIN
  misc_feature (1)..(98): Homolog of NCBI NO: 1076793 NR Description: calmodulin cam2 - maize
  misc_feature (1)..(98): Homolog of NCBI NO: 34304715 NR Description: calmodulin 4 [Daucus carota]
  misc_feature (1)..(98): Homolog of NCBI NO: 15229784 NR Description: calmodulin 7
  misc_feature (1)..(98): Homolog of NCBI NO: 20186 NR Description: calmodulin [Oryza sativa]
  misc_feature (1)..(98): Homolog of NCBI NO: 2809481 NR Description: calmodulin [Oryza sativa]
  misc_feature (1)..(98): Homolog of NCBI NO: 115515 NR Description: Calmodulin
  misc_feature (1)..(98): Homolog of NCBI NO: 479693 NR Description: calmodulin 4 - Arabidopsis thaliana
  misc_feature (1)..(98): Homolog of NCBI NO: 15219652 NR Description: calmodulin-4

SEQ ID NO: 30109 - DNA, 1578 bp, Arabidopsis thaliana
  misc_feature (1)..(1578): Ceres Seq. ID no. 13487069
  misc_feature: MA Experiment ID: 108473 Result: Down-regulated in Transcription
  misc_feature: MA Experiment 108473 PARAMETER Experiment Name: At_Drought_Flowers_cDNA_P Parameter: Timepoint (hr) Value: 7 d
  misc_feature: MA Experiment 108473 PARAMETER Experiment Name: At_Drought_Flowers_cDNA_P Parameter: Tissue Value: Flower
  misc_feature: MA Experiment 108473 PARAMETER Experiment Name: At_Drought_Flowers_cDNA_P Parameter: Treatment Value: Drought vs. No Drought
  misc_feature: MA Experiment ID: 108488 Result: Up-regulated in Transcription
  misc_feature: MA Experiment ID: 108561 Result: Down-regulated in Transcription
  misc_feature: MA Experiment 108561 PARAMETER Experiment Name: At_100uM_ABA_cDNA_P Parameter: Timepoint (hr) Value: 6
  misc_feature: MA Experiment 108561 PARAMETER Experiment Name: At_100uM_ABA_cDNA_P Parameter: Tissue Value: Aerial
  misc_feature: MA Experiment 108561 PARAMETER Experiment Name: At_100uM_ABA_cDNA_P Parameter: Treatment Value: 100uM ABA vs. No Treatment
  misc_feature: MA Experiment ID: 108576 Result: Down-regulated in Transcription
  misc_feature: MA Experiment 108576 PARAMETER Experiment Name: At_42deg_Heat_cDNA_P Parameter: Temperature (deg C) Value: 42 vs. 22
  misc_feature: MA Experiment 108576 PARAMETER Experiment Name: At_42deg_Heat_cDNA_P Parameter: Timepoint (hr) Value: 1
  misc_feature: MA Experiment 108576 PARAMETER Experiment Name: At_42deg_Heat_cDNA_P Parameter: Tissue Value: Aerial
  misc_feature: MA Experiment ID: 108577 Result: Down-regulated in Transcription
  misc_feature: MA Experiment 108577 PARAMETER Experiment Name: At_42deg_Heat_cDNA_P Parameter: Temperature (deg C) Value: 42 vs. 22
  misc_feature: MA Experiment 108577 PARAMETER Experiment Name: At_42deg_Heat_cDNA_P Parameter: Timepoint (hr) Value: 6
  misc_feature: MA Experiment 108577 PARAMETER Experiment Name: At_42deg_Heat_cDNA_P Parameter: Tissue Value: Aerial
  misc_feature: MA Experiment ID: 108595 Result: Down-regulated in Transcription
  misc_feature: MA Experiment 108595 PARAMETER Experiment Name: At_Ler-pi_Ovule_cDNA_P Parameter: Plant Line Value: null
  misc_feature: MA Experiment ID: 108605 Result: Down-regulated in Transcription
  misc_feature: MA Experiment 108605 PARAMETER Experiment Name: At_100uM_ABA_cDNA_P Parameter: Timepoint (hr) Value: 6
  misc_feature: MA Experiment 108605 PARAMETER Experiment Name: At_100uM_ABA_cDNA_P Parameter: Tissue Value: Aerial
  misc_feature: MA Experiment 108605 PARAMETER Experiment Name: At_100uM_ABA_cDNA_P Parameter: Treatment Value: 100uM ABA vs. No Treatment
  misc_feature: MA Experiment ID: 108607 Result: Down-regulated in Transcription
  misc_feature: MA Experiment 108607 PARAMETER Experiment Name: At_100uM_ABA_cDNA_P Parameter: Timepoint (hr) Value: 4
  misc_feature: MA Experiment 108607 PARAMETER Experiment Name: At_100uM_ABA_cDNA_P Parameter: Tissue Value: Aerial
  misc_feature: MA Experiment 108607 PARAMETER Experiment Name: At_100uM_ABA_cDNA_P Parameter: Treatment Value: 100uM ABA vs. No Treatment
  misc_feature: MA Experiment ID: 108668 Result: Down-regulated in Transcription
  misc_feature: MA Experiment 108668 PARAMETER Experiment Name: At_2mM_SA_cDNA_P Parameter: Plant Line Value: WS
  misc_feature: MA Experiment 108668 PARAMETER Experiment Name: At_2mM_SA_cDNA_P Parameter: Timepoint (hr) Value: 6
  misc_feature: MA Experiment 108668 PARAMETER Experiment Name: At_2mM_SA_cDNA_P Parameter: Treatment Value: 2mM SA vs. No Treatment
  misc_feature: MA Experiment ID: 20000069 Result: Down-regulated in Transcription
  misc_feature: MA Experiment 20000069 PARAMETER Experiment Name: At_100uM_ABA_Mutants_cDNA_P Parameter: Plant Line Value: CS23
  misc_feature: MA Experiment 20000069 PARAMETER Experiment Name: At_100uM_ABA_Mutants_cDNA_P Parameter: Timepoint (hr) Value: 6
  misc_feature: MA Experiment 20000069 PARAMETER Experiment Name: At_100uM_ABA_Mutants_cDNA_P Parameter: Tissue Value: Aerial
  misc_feature: MA Experiment 20000069 PARAMETER Experiment Name: At_100uM_ABA_Mutants_cDNA_P Parameter: Treatment Value: 100uM ABA vs. No Treatment
  misc_feature: MA Experiment ID: 20000070 Result: Down-regulated in Transcription
  misc_feature: MA Experiment 20000070 PARAMETER Experiment Name: At_100uM_ABA_Mutants_cDNA_P Parameter: Plant Line Value: CS24
  misc_feature: MA Experiment 20000070 PARAMETER Experiment Name: At_100uM_ABA_Mutants_cDNA_P Parameter: Timepoint (hr) Value: 6
  misc_feature: MA Experiment 20000070 PARAMETER Experiment Name: At_100uM_ABA_Mutants_cDNA_P Parameter: Tissue Value: Aerial
  misc_feature: MA Experiment 20000070 PARAMETER Experiment Name: At_100uM_ABA_Mutants_cDNA_P Parameter: Treatment Value: 100uM ABA vs. No Treatment
  misc_feature: MA Experiment ID: 20000071 Result: Down-regulated in Transcription
  misc_feature: MA Experiment 20000071 PARAMETER Experiment Name: At_100uM_ABA_Mutants_cDNA_P Parameter: Plant Line Value: CS8104
  misc_feature: MA Experiment 20000071 PARAMETER Experiment Name: At_100uM_ABA_Mutants_cDNA_P Parameter: Timepoint (hr) Value: 6
  misc_feature: MA Experiment 20000071 PARAMETER Experiment Name: At_100uM_ABA_Mutants_cDNA_P Parameter: Tissue Value: Aerial
  misc_feature: MA Experiment 20000071 PARAMETER Experiment Name: At_100uM_ABA_Mutants_cDNA_P Parameter: Treatment Value: 100uM ABA vs. No Treatment
  misc_feature: MA Experiment ID: 20000072 Result: Down-regulated in Transcription
  misc_feature: MA Experiment 20000072 PARAMETER Experiment Name: At_100uM_ABA_Mutants_cDNA_P Parameter: Plant Line Value: CS8105
  misc_feature: MA Experiment 20000072 PARAMETER Experiment Name: At_100uM_ABA_Mutants_cDNA_P Parameter: Timepoint (hr) Value: 6
  misc_feature: MA Experiment 20000072 PARAMETER Experiment Name: At_100uM_ABA_Mutants_cDNA_P Parameter: Tissue Value: Aerial
  misc_feature: MA Experiment 20000072 PARAMETER Experiment Name: At_100uM_ABA_Mutants_cDNA_P Parameter: Treatment Value: 100uM ABA vs. No Treatment
  misc_feature: MA Experiment ID: 20000086 Result: Down-regulated in Transcription
  misc_feature: MA Experiment 20000086 PARAMETER Experiment Name: At_100uM_ABA_Mutants_cDNA_P Parameter: Plant Line Value: CS22
  misc_feature: MA Experiment 20000086 PARAMETER Experiment Name: At_100uM_ABA_Mutants_cDNA_P Parameter: Timepoint (hr) Value: 6
  misc_feature: MA Experiment 20000086 PARAMETER Experiment Name: At_100uM_ABA_Mutants_cDNA_P Parameter: Tissue Value: Aerial
  misc_feature: MA Experiment 20000086 PARAMETER Experiment Name: At_100uM_ABA_Mutants_cDNA_P Parameter: Treatment Value: 100uM ABA vs. No Treatment
  misc_feature: MA Experiment ID: 20000087 Result: Down-regulated in Transcription
  misc_feature: MA Experiment 20000087 PARAMETER Experiment Name: At_100uM_ABA_Mutants_cDNA_P Parameter: Plant Line Value: WS
  misc_feature: MA Experiment 20000087 PARAMETER Experiment Name: At_100uM_ABA_Mutants_cDNA_P Parameter: Timepoint (hr) Value: 6
  misc_feature: MA Experiment 20000087 PARAMETER Experiment Name: At_100uM_ABA_Mutants_cDNA_P Parameter: Tissue Value: Aerial
  misc_feature: MA Experiment 20000087 PARAMETER Experiment Name: At_100uM_ABA_Mutants_cDNA_P Parameter: Treatment Value: 100uM ABA vs. No Treatment
  misc_feature: MA Experiment ID: 20000088 Result: Down-regulated in Transcription
  misc_feature: MA Experiment 20000088 PARAMETER Experiment Name: At_100uM_ABA_Mutants_cDNA_P Parameter: Plant Line Value: Landsberg
  misc_feature: MA Experiment 20000088 PARAMETER Experiment Name: At_100uM_ABA_Mutants_cDNA_P Parameter: Timepoint (hr) Value: 6
  misc_feature: MA Experiment 20000088 PARAMETER Experiment Name: At_100uM_ABA_Mutants_cDNA_P Parameter: Tissue Value: Aerial
  misc_feature: MA Experiment 20000088 PARAMETER Experiment Name: At_100uM_ABA_Mutants_cDNA_P Parameter: Treatment Value: 100uM ABA vs. No Treatment
  misc_feature: MA Experiment ID: 20000089 Result: Down-regulated in Transcription
  misc_feature: MA Experiment ID: 20000090 Result: Down-regulated in Transcription
  misc_feature: MA Experiment ID: 20000111 Result: Down-regulated in Transcription
  misc_feature: MA Experiment 20000111 PARAMETER Experiment Name: At_42deg_Heat_cDNA_P Parameter: Temperature (deg C) Value: 42 vs. 22
  misc_feature: MA Experiment 20000111 PARAMETER Experiment Name: At_42deg_Heat_cDNA_P Parameter: Timepoint (hr) Value: 6
  misc_feature: MA Experiment 20000111 PARAMETER Experiment Name: At_42deg_Heat_cDNA_P Parameter: Tissue Value: Aerial
  misc_feature: MA Experiment ID: 20000112 Result: Down-regulated in Transcription
  misc_feature: MA Experiment 20000112 PARAMETER Experiment Name: At_42deg_Heat_cDNA_P Parameter: Temperature (deg C) Value: 42 vs. 22
  misc_feature: MA Experiment 20000112 PARAMETER Experiment Name: At_42deg_Heat_cDNA_P Parameter: Timepoint (hr) Value: 2
  misc_feature: MA Experiment 20000112 PARAMETER Experiment Name: At_42deg_Heat_cDNA_P Parameter: Tissue Value: Aerial
  misc_feature: MA Experiment ID: 20000117 Result: Down-regulated in Transcription
  misc_feature: MA Experiment 20000117 PARAMETER Experiment Name: At_100uM_ABA_Mutants_cDNA_P Parameter: Plant Line Value: Columbia
  misc_feature: MA Experiment 20000117 PARAMETER Experiment Name: At_100uM_ABA_Mutants_cDNA_P Parameter: Timepoint (hr) Value: 6
  misc_feature: MA Experiment 20000117 PARAMETER Experiment Name: At_100uM_ABA_Mutants_cDNA_P Parameter: Tissue Value: Aerial
  misc_feature: MA Experiment 20000117 PARAMETER Experiment Name: At_100uM_ABA_Mutants_cDNA_P Parameter: Treatment Value: 100uM ABA vs. No Treatment
  misc_feature: MA Experiment ID: 20000144 Result: Down-regulated in Transcription
  misc_feature: MA Experiment 20000144 PARAMETER Experiment Name: At_42deg_Heat_cDNA_P Parameter: Temperature (deg C) Value: 42 vs. 22
  misc_feature: MA Experiment 20000144 PARAMETER Experiment Name: At_42deg_Heat_cDNA_P Parameter: Timepoint (hr) Value: 1
  misc_feature: MA Experiment 20000144 PARAMETER Experiment Name: At_42deg_Heat_cDNA_P Parameter: Tissue Value: Aerial
  misc_feature: MA Experiment ID: 20000171 Result: Down-regulated in Transcription
  misc_feature: MA Experiment 20000171 PARAMETER Experiment Name: At_42deg_Heat_P Parameter: Age (day) Value: 14
  misc_feature: MA Experiment 20000171 PARAMETER Experiment Name: At_42deg_Heat_P Parameter: Organism Value: A. thaliana
  misc_feature: MA Experiment 20000171 PARAMETER Experiment Name: At_42deg_Heat_P Parameter: Plant Line Value: WS
  misc_feature: MA Experiment 20000171 PARAMETER Experiment Name: At_42deg_Heat_P Parameter: Temperature (deg C) Value: 42 vs. 22
  misc_feature: MA Experiment 20000171 PARAMETER Experiment Name: At_42deg_Heat_P Parameter: Timepoint (hr) Value: 1
  misc_feature: MA Experiment 20000171 PARAMETER Experiment Name: At_42deg_Heat_P Parameter: Tissue Value: Aerial
  misc_feature: MA Experiment ID: 20000173 Result: Down-regulated in Transcription
  misc_feature: MA Experiment 20000173 PARAMETER Experiment Name: At_42deg_Heat_P Parameter: Age (day) Value: 14
  misc_feature: MA Experiment 20000173 PARAMETER Experiment Name: At_42deg_Heat_P Parameter: Organism Value: A. thaliana
  misc_feature: MA Experiment 20000173 PARAMETER Experiment Name: At_42deg_Heat_P Parameter: Plant Line Value: WS
  misc_feature: MA Experiment 20000173 PARAMETER Experiment Name: At_42deg_Heat_P Parameter: Temperature (deg C) Value: 42 vs. 22
  misc_feature: MA Experiment 20000173 PARAMETER Experiment Name: At_42deg_Heat_P Parameter: Timepoint (hr) Value: 6
  misc_feature: MA Experiment 20000173 PARAMETER Experiment Name: At_42deg_Heat_P Parameter: Tissue Value: Aerial
  misc_feature: MA Experiment ID: 20000182 Result: Down-regulated in Transcription
  misc_feature: MA Experiment 20000182 PARAMETER Experiment Name: At_2mM_SA_P Parameter: Age (day) Value: 14
  misc_feature: MA Experiment 20000182 PARAMETER Experiment Name: At_2mM_SA_P Parameter: Organism Value: A. thaliana
  misc_feature: MA Experiment 20000182 PARAMETER Experiment Name: At_2mM_SA_P Parameter: Plant Line Value: WS
  misc_feature: MA Experiment 20000182 PARAMETER Experiment Name: At_2mM_SA_P Parameter: Timepoint (hr) Value: 6
  misc_feature: MA Experiment 20000182 PARAMETER Experiment Name: At_2mM_SA_P Parameter: Tissue Value: Aerial
  misc_feature: MA Experiment 20000182 PARAMETER Experiment Name: At_2mM_SA_P Parameter: Treatment Value: 2mM SA vs. No Treatment
  misc_feature: MA Experiment ID: 20000234 Result: Up-regulated in Transcription
  misc_feature: MA Experiment 20000234 PARAMETER Experiment Name: At_Siliques_P Parameter: Age (day) Value: 21
  misc_feature: MA Experiment 20000234 PARAMETER Experiment Name: At_Siliques_P Parameter: Organism Value: A. thaliana
  misc_feature: MA Experiment 20000234 PARAMETER Experiment Name: At_Siliques_P Parameter: Plant Line Value: WS
  misc_feature: MA Experiment 20000234 PARAMETER Experiment Name: At_Siliques_P Parameter: Tissue Value: Less Than 5mm Siliques vs. Whole Plant
  misc_feature: MA Experiment ID: 20000235 Result: Up-regulated in Transcription
  misc_feature: MA Experiment 20000235 PARAMETER Experiment Name: At_Siliques_P Parameter: Age (day) Value: 21
  misc_feature: MA Experiment 20000235 PARAMETER Experiment Name: At_Siliques_P Parameter: Organism Value: A. thaliana
  misc_feature: MA Experiment 20000235 PARAMETER Experiment Name: At_Siliques_P Parameter: Plant Line Value: WS
  misc_feature: MA Experiment 20000235 PARAMETER Experiment Name: At_Siliques_P Parameter: Tissue Value: 5-10mm Siliques vs. Whole Plant
  misc_feature: MA Experiment ID: 20000436 Result: Down-regulated in Transcription
  misc_feature: MA Experiment 20000436 PARAMETER Experiment Name: At_Drought_P Parameter: Age (day) Value: 7
  misc_feature: MA Experiment 20000436 PARAMETER Experiment Name: At_Drought_P Parameter: Organism Value: A. thaliana
  misc_feature: MA Experiment 20000436 PARAMETER Experiment Name: At_Drought_P Parameter: Plant Line Value: WS
  misc_feature: MA Experiment 20000436 PARAMETER Experiment Name: At_Drought_P Parameter: Timepoint (hr) Value: 12
  misc_feature: MA Experiment 20000436 PARAMETER Experiment Name: At_Drought_P Parameter: Tissue Value: Whole Plant
  misc_feature: MA Experiment 20000436 PARAMETER Experiment Name: At_Drought_P Parameter: Treatment Value: Drought vs. No Drought
  misc_feature: MA Experiment ID: 20000437 Result: Down-regulated in Transcription
  misc_feature: MA Experiment 20000437 PARAMETER Experiment Name: At_Drought_P Parameter: Age (day) Value: 8
  misc_feature: MA Experiment 20000437 PARAMETER Experiment Name: At_Drought_P Parameter: Organism Value: A. thaliana
  misc_feature: MA Experiment 20000437 PARAMETER Experiment Name: At_Drought_P Parameter: Plant Line Value: WS
  misc_feature: MA Experiment 20000437 PARAMETER Experiment Name: At_Drought_P Parameter: Timepoint (hr) Value: 24
  misc_feature: MA Experiment 20000437 PARAMETER Experiment Name: At_Drought_P Parameter: Tissue Value: Whole Plant
  misc_feature: MA Experiment 20000437 PARAMETER Experiment Name: At_Drought_P Parameter: Treatment Value: Drought vs. No Drought
  misc_feature: MA Experiment ID: 20001247 Result: Up-regulated in Transcription
  misc_feature: MA Experiment 20001247 PARAMETER Experiment Name: At_Far-red-induction_P Parameter: Age (day) Value: 7
  misc_feature: MA Experiment 20001247 PARAMETER Experiment Name: At_Far-red-induction_P Parameter: Light Value: Far-red vs. White
  misc_feature: MA Experiment 20001247 PARAMETER Experiment Name: At_Far-red-induction_P Parameter: Organism Value: A. thaliana
  misc_feature: MA Experiment 20001247 PARAMETER Experiment Name: At_Far-red-induction_P Parameter: Plant Line Value: Columbia
  misc_feature: MA Experiment 20001247 PARAMETER Experiment Name: At_Far-red-induction_P Parameter: Timepoint (hr) Value: 1
  misc_feature: MA Experiment 20001247 PARAMETER Experiment Name: At_Far-red-induction_P Parameter: Tissue Value: Whole Plant
  misc_feature: MA Experiment ID: 20001248 Result: Down-regulated in Transcription
  misc_feature: MA Experiment 20001248 PARAMETER Experiment Name: At_Far-red-induction_P Parameter: Age (day) Value: 7
  misc_feature: MA Experiment 20001248 PARAMETER Experiment Name: At_Far-red-induction_P Parameter: Light Value: Far-red vs. White
  misc_feature: MA Experiment 20001248 PARAMETER Experiment Name: At_Far-red-induction_P Parameter: Organism Value: A. thaliana
  misc_feature: MA Experiment 20001248 PARAMETER Experiment Name: At_Far-red-induction_P Parameter: Plant Line Value: Columbia
  misc_feature: MA Experiment 20001248 PARAMETER Experiment Name: At_Far-red-induction_P Parameter: Timepoint (hr) Value: 4
  misc_feature: MA Experiment 20001248 PARAMETER Experiment Name: At_Far-red-induction_P Parameter: Tissue Value: Whole Plant
  misc_feature: MA Experiment ID: 20001757 Result: Up-regulated in Transcription
  misc_feature: MA Experiment 20001757 PARAMETER Experiment Name: At_50mM_NH4NO3_L-to-H_P Parameter: Timepoint (hr) Value: 6
  misc_feature: MA Experiment 20001757 PARAMETER Experiment Name: At_50mM_NH4NO3_L-to-H_P Parameter: Tissue Value: Leaf
  misc_feature: MA Experiment 20001757 PARAMETER Experiment Name: At_50mM_NH4NO3_L-to-H_P Parameter: Treatment Value: 50mM NH4NO3 vs 100mM Mannitol
  misc_feature: MA Experiment ID: 20001906 Result: Down-regulated in Transcription
  misc_feature: MA Experiment 20001906 PARAMETER Experiment Name: At_Drought_Reproduction_P Parameter: Age (day) Value: 35
  misc_feature: MA Experiment 20001906 PARAMETER Experiment Name: At_Drought_Reproduction_P Parameter: Organism Value: A. thaliana
  misc_feature: MA Experiment 20001906 PARAMETER Experiment Name: At_Drought_Reproduction_P Parameter: Plant Line Value: WS
  misc_feature: MA Experiment 20001906 PARAMETER Experiment Name: At_Drought_Reproduction_P Parameter: Timepoint (day) Value: 5
  misc_feature: MA Experiment 20001906 PARAMETER Experiment Name: At_Drought_Reproduction_P Parameter: Tissue Value: Siliques
  misc_feature: MA Experiment 20001906 PARAMETER Experiment Name: At_Drought_Reproduction_P Parameter: Treatment Value: Drought vs. No Drought
  misc_feature: MA Experiment ID: 20001911 Result: Down-regulated in Transcription
  misc_feature: MA Experiment 20001911 PARAMETER Experiment Name: At_Drought_Reproduction_P Parameter: Age (day) Value: 40
  misc_feature: MA Experiment 20001911 PARAMETER Experiment Name: At_Drought_Reproduction_P Parameter: Organism Value: A. thaliana
  misc_feature: MA Experiment 20001911 PARAMETER Experiment Name: At_Drought_Reproduction_P Parameter: Plant Line Value: WS
  misc_feature: MA Experiment 20001911 PARAMETER Experiment Name: At_Drought_Reproduction_P Parameter: Timepoint (day) Value: 10
  misc_feature: MA Experiment 20001911 PARAMETER Experiment Name: At_Drought_Reproduction_P Parameter: Tissue Value: Flowers
  misc_feature: MA Experiment 20001911 PARAMETER Experiment Name: At_Drought_Reproduction_P Parameter: Treatment Value: Drought vs. No Drought
accgaaaaagataaaaactcacactttctctctctctctctagaaaaagaaagaaagaagaaaaacttattgttattcccatttcgcccctatccgaaaaatggttgaagctcaatcatggacaacgcggcggatgagcaatcctagattcgacgccgccgcaaccgccgcaccaaccatcgtagacatccccggaacaccaccacactcctccgcttcttcaccactcaaacccttcttcctctcttcccccaccgtatcaccaacaatcctcacggcggctataatcgccgcctggtttggctcaaatataggagtcctcctcttaaacaaataccttctcttctactacggtttccgttacccaatcttcctcaccatgacacacatgttatcatgcgccgcctatagctccgccgtaatcaatatcgccggaatcgtgccacgtcagcacatcttatctcgccgtcagtttctaaagatcctctctttgtcagcgatcttttgtctctccgtcgtctgtggcaacacttcgctacgttatatccctgtttcttttaatcaagctattggagctacgacgccgtttttcaccgccgtgttctcttttctcattacttgtaaaacagagtccactgaagtttatttagctcttcttccggttgtctccggcatcgttcttgcttctaactctgaaccttcttttcatctttttggtttccttatctgtgttgcttccaccgccggtagagctctcaaatccgtcgtccaggggattattctgacgtcggaatcggagaagctacattctatgaatcttttgctatacatggctccaatggcggcttgtatcttactaccatttacgctatacattgaaggaaacgttttaagagttctaatcgagaaagcgaggacggatccattgatcatcttcttgttagccgggaatgcgacagtggcatatttagtgaatttgacgaatttcttggtgacaaagcatacaagtgctctcacattgcaggttttggggaacggaaaagctgcggtggctgccggagtctcggttttgatatttaggaatccggtgacggtgatgggaatagccggatttggtgtgacgattatgggtgtggttctctatagcgaagctaggaagagatccaaattgctaaaccagaagtgaaaagtgtgaagagaaagattattggatttaaaccggtgaagtaatttttactttttaatttttacttcttttttttcggtttagtttcttgattctttggaattctgctattgtttggaaccggtttggttcgttttgagagggggaaaatcaatttaattgtaaatggttgagattggggaaaaactatgaaaagaaaagtggagatatatttatgtaacaaaagtgaaaaagtagggagcataattaaaggaaataagattgtatctttattttattttactttcttttagttttttcttttcttgtactattatgttttatagtttgtcttaccaaaattatcgaaacatagtgaggaaaatagtcaaaataataaatttctttctact

SEQ ID NO: 30110 - protein, 361 aa, Arabidopsis thaliana
  peptide (1)..(361): Ceres Seq. ID no. 13487070
  misc_feature (73)..(196): Pfam Name: Integral membrane protein DUF6 Pfam Description: Integral membrane protein DUF6
  misc_feature (63)..(352): Homolog of NCBI NO: 18411611 NR Description: glucose-6-phosphate/phosphate
  misc_feature (59)..(307): Homolog of NCBI NO: 15229717 NR Description: phosphate translocator-related [Arabidopsis
  misc_feature (170)..(356): Homolog of NCBI NO: 15229717 NR Description: phosphate translocator-related [Arabidopsis
  misc_feature (48)..(354): Homolog of NCBI NO: 15228248 NR Description: phosphate translocator-related [Arabidopsis
  misc_feature (48)..(354): Homolog of NCBI NO: 17064798 NR Description: phosphate/phosphoenolpyruvate translocator-like
  misc_feature (48)..(354): Homolog of NCBI NO: 15237644 NR Description: phosphate translocator-related [Arabidopsis
  misc_feature (59)..(356): Homolog of NCBI NO: 30681126 NR Description: phosphate translocator-related [Arabidopsis
  misc_feature (59)..(356): Homolog of NCBI NO: 9759107 NR Description: phosphate/phosphoenolpyruvate translocator
  misc_feature (59)..(356): Homolog of NCBI NO: 27476065 NR Description: Putative phosphate/phosphoenolpyruvate
  misc_feature (1)..(361): Homolog of NCBI NO: 15221371 NR Description: phosphate translocator-related [Arabidopsis
MVEAQSWTTRRMSNPRFDAAATAAPTIVDIPGTPPHSSASSPLKPFFLSSPTVSPTILTAAIIAAWFGSNIGVLLLNKYLLFYYGFRYPIFLTMTHMLSCAAYSSAVINIAGIVPRQHILSRRQFLKILSLSAIFCLSVVCGNTSLRYIPVSFNQAIGATTPFFTAVFSFLITCKTESTEVYLALLPVVSGIVLASNSEPSFHLFGFLICVASTAGRALKSVVQGIILTSESEKLHSMNLLLYMAPMAACILLPFTLYIEGNVLRVLIEKARTDPLIIFLLAGNATVAYLVNLTNFLVTKHTSALTLQVLGNGKAAVAAGVSVLIFRNPVTVMGIAGFGVTIMGVVLYSEARKRSKLLNQK

SEQ ID NO: 30111 - protein, 350 aa, Arabidopsis thaliana
  peptide (1)..(350): Ceres Seq. ID no. 13487071
  misc_feature (62)..(185): Pfam Name: Integral membrane protein DUF6 Pfam Description: Integral membrane protein DUF6
  misc_feature (52)..(341): Homolog of NCBI NO: 18411611 NR Description: glucose-6-phosphate/phosphate
  misc_feature (48)..(296): Homolog of NCBI NO: 15229717 NR Description: phosphate translocator-related [Arabidopsis
  misc_feature (159)..(345): Homolog of NCBI NO: 15229717 NR Description: phosphate translocator-related [Arabidopsis
  misc_feature (37)..(343): Homolog of NCBI NO: 15228248 NR Description: phosphate translocator-related [Arabidopsis
  misc_feature (37)..(343): Homolog of NCBI NO: 17064798 NR Description: phosphate/phosphoenolpyruvate translocator-like
  misc_feature (37)..(343): Homolog of NCBI NO: 15237644 NR Description: phosphate translocator-related [Arabidopsis
  misc_feature (48)..(345): Homolog of NCBI NO: 30681126 NR Description: phosphate translocator-related [Arabidopsis
  misc_feature (48)..(345): Homolog of NCBI NO: 9759107 NR Description: phosphate/phosphoenolpyruvate translocator
  misc_feature (48)..(345): Homolog of NCBI NO: 27476065 NR Description: Putative phosphate/phosphoenolpyruvate
  misc_feature (1)..(350): Homolog of NCBI NO: 15221371 NR Description: phosphate translocator-related [Arabidopsis
MSNPRFDAAATAAPTIVDIPGTPPHSSASSPLKPFFLSSPTVSPTILTAAIIAAWFGSNIGVLLLNKYLLFYYGFRYPIFLTMTHMLSCAAYSSAVINIAGIVPRQHILSRRQFLKILSLSAIFCLSVVCGNTSLRYIPVSFNQAIGATTPFFTAVFSFLITCKTESTEVYLALLPVVSGIVLASNSEPSFHLFGFLICVASTAGRALKSVVQGIILTSESEKLHSMNLLLYMAPMAACILLPFTLYIEGNVLRVLIEKARTDPLIIFLLAGNATVAYLVNLTNFLVTKHTSALTLQVLGNGKAAVAAGVSVLIFRNPVTVMGIAGFGVTIMGVVLYSEARKRSKLLNQK

SEQ ID NO: 30112 - protein, 268 aa, Arabidopsis thaliana
  peptide (1)..(268): Ceres Seq. ID no. 13487072
  misc_feature (1)..(103): Pfam Name: Integral membrane protein DUF6 Pfam Description: Integral membrane protein DUF6
  misc_feature (1)..(259): Homolog of NCBI NO: 18411611 NR Description: glucose-6-phosphate/phosphate
  misc_feature (1)..(214): Homolog of NCBI NO: 15229717 NR Description: phosphate translocator-related [Arabidopsis
  misc_feature (77)..(263): Homolog of NCBI NO: 15229717 NR Description: phosphate translocator-related [Arabidopsis
  misc_feature (1)..(261): Homolog of NCBI NO: 15228248 NR Description: phosphate translocator-related [Arabidopsis
  misc_feature (1)..(261): Homolog of NCBI NO: 17064798 NR Description: phosphate/phosphoenolpyruvate translocator-like
  misc_feature (1)..(261): Homolog of NCBI NO: 15237644 NR Description: phosphate translocator-related [Arabidopsis
  misc_feature (1)..(263): Homolog of NCBI NO: 30681126 NR Description: phosphate translocator-related [Arabidopsis
  misc_feature (1)..(263): Homolog of NCBI NO: 9759107 NR Description: phosphate/phosphoenolpyruvate translocator
  misc_feature (1)..(263): Homolog of NCBI NO: 27476065 NR Description: Putative phosphate/phosphoenolpyruvate
  misc_feature (1)..(268): Homolog of NCBI NO: 15221371 NR Description: phosphate translocator-related [Arabidopsis
MTHMLSCAAYSSAVINIAGIVPRQHILSRRQFLKILSLSAIFCLSVVCGNTSLRYIPVSFNQAIGATTPFFTAVFSFLITCKTESTEVYLALLPVVSGIVLASNSEPSFHLFGFLICVASTAGRALKSVVQGIILTSESEKLHSMNLLLYMAPMAACILLPFTLYIEGNVLRVLIEKARTDPLIIFLLAGNATVAYLVNLTNFLVTKHTSALTLQVLGNGKAAVAAGVSVLIFRNPVTVMGIAGFGVTIMGVVLYSEARKRSKLLNQK

SEQ ID NO: 30113 - DNA, 908 bp, Arabidopsis thaliana
  misc_feature (1)..(908): Ceres Seq. ID no. 12388520
  misc_feature: MA Experiment ID: 108462 Result: Up-regulated in Transcription
  misc_feature: MA Experiment 108462 PARAMETER Experiment Name: At_Germinating_Seeds_cDNA_P Parameter: Age (day) Value: 2 vs. 0
  misc_feature: MA Experiment 108462 PARAMETER Experiment Name: At_Germinating_Seeds_cDNA_P Parameter: Tissue Value: Germinating Seeds
  misc_feature: MA Experiment ID: 108464 Result: Up-regulated in Transcription
  misc_feature: MA Experiment 108464 PARAMETER Experiment Name: At_Germinating_Seeds_cDNA_P Parameter: Age (day) Value: 4 vs. 0
  misc_feature: MA Experiment 108464 PARAMETER Experiment Name: At_Germinating_Seeds_cDNA_P Parameter: Tissue Value: Germinating Seeds
  misc_feature: MA Experiment ID: 20000113 Result: Up-regulated in Transcription
  misc_feature: MA Experiment 20000113 PARAMETER Experiment Name: At_42deg_Heat_cDNA_P Parameter: Temperature (deg C) Value: 42 vs. 22
  misc_feature: MA Experiment 20000113 PARAMETER Experiment Name: At_42deg_Heat_cDNA_P Parameter: Timepoint (hr) Value: 8
  misc_feature: MA Experiment 20000113 PARAMETER Experiment Name: At_42deg_Heat_cDNA_P Parameter: Tissue Value: Aerial
  misc_feature: MA Experiment ID: 20000224 Result: Down-regulated in Transcription
aatagcttcgtacccgataaatacggttgctctctcgttttttccagcagagacactttttctaattttctcttcttcttcttctttctcgttttgagagaaaacaaaaaaattctgaatctacaggtttcacgaaaaggagaagaaaaaaacaatggcggatcagctcaccgacgatcagatctctgagtttaaggaagctttcagcttattcgacaaggatggtgatggttgcattaccaccaaggagctgggtactgtgatgcgttcccttggacaaaacccaaccgaagcagagcttcaagacatgatcaacgaagtggatgctgatggtaacggtaccattgatttcccagagttcttgaaccttatggctcgtaagatgaaggacaccgactctgaggaagagctcaaggaagcattccgggttttcgacaaggaccagaacggtttcatctcagcagctgagctccgccatgtgatgacaaaccttggtgagaagcttactgatgaagaagttgatgagatgatcaaggaagctgatgttgatggtgatggtcagattaactacgaagagtttgttaaggtcatgatggctaagtgatgctgttttagaaccaaacaatggctctataaacttggtttgcatctcttacatataaattcttatgttatgttctataatttttattcatgggactcgaggtatgttttctgcttgtttaagacgcgaatgttttatcccttttatgctctattttgcgtctgaacattttcaaaagtcttgtttttttgttgtcttgctcctgtaatttgtaaccttggtctagttcgcggttttttattaatggtgtctctctagtaaagcattgtatcatggttttgtgaaatgcaaattaggtcctatc

SEQ ID NO: 30114 - protein, 149 aa, Arabidopsis thaliana; identical to SEQ ID NO: 29417
  peptide (1)..(149): Ceres Seq. ID no. 12388521
  misc_feature (12)..(40): Pfam Name: EF hand Pfam Description: EF hand
  misc_feature (1)..(149): Homolog of NCBI NO: 289525 NR Description: calmodulin
  misc_feature (1)..(149): Homolog of NCBI NO: 30688187 NR Description: calmodulin-6 (CAM6) [Arabidopsis thaliana]
  misc_feature (1)..(149): Homolog of NCBI NO: 3121849 NR Description: CALMODULIN
  misc_feature (1)..(149): Homolog of NCBI NO: 115515 NR Description: Calmodulin
  misc_feature (1)..(149): Homolog of NCBI NO: 34903134 NR Description: unnamed protein product [Oryza sativa (japonica
  misc_feature (1)..(149): Homolog of NCBI NO: 3121848 NR Description: CALMODULIN
  misc_feature (1)..(149): Homolog of NCBI NO: 34304715 NR Description: calmodulin 4 [Daucus carota]
  misc_feature (1)..(149): Homolog of NCBI NO: 15229784 NR Description: calmodulin 7
  misc_feature (1)..(149): Homolog of NCBI NO: 30683369 NR Description: calmodulin [Arabidopsis thaliana]
  misc_feature (1)..(149): Homolog of NCBI NO: 15225840 NR Description: calmodulin; protein id: At2g27030.1, supported by

SEQ ID NO: 30115 - protein, 113 aa, Arabidopsis thaliana; identical to SEQ ID NO: 29418
  peptide (1)..(113): Ceres Seq. ID no. 12388522
  misc_feature (1)..(113): Homolog of NCBI NO: 289525 NR Description: calmodulin
  misc_feature (1)..(113): Homolog of NCBI NO: 30688187 NR Description: calmodulin-6 (CAM6) [Arabidopsis thaliana]
  misc_feature (1)..(113): Homolog of NCBI NO: 3121849 NR Description: CALMODULIN
  misc_feature (1)..(113): Homolog of NCBI NO: 115515 NR Description: Calmodulin
  misc_feature (1)..(113): Homolog of NCBI NO: 34903134 NR Description: unnamed protein product [Oryza sativa (japonica
  misc_feature (1)..(113): Homolog of NCBI NO: 3121848 NR Description: CALMODULIN
  misc_feature (1)..(113): Homolog of NCBI NO: 34304715 NR Description: calmodulin 4 [Daucus carota]
  misc_feature (1)..(113): Homolog of NCBI NO: 15229784 NR Description: calmodulin 7
  misc_feature (1)..(113): Homolog of NCBI NO: 30683369 NR Description: calmodulin [Arabidopsis thaliana]
  misc_feature (1)..(113): Homolog of NCBI NO: 15225840 NR Description: calmodulin; protein id: At2g27030.1, supported by

SEQ ID NO: 30116 - protein, 98 aa, Arabidopsis thaliana; identical to SEQ ID NO: 29419
  peptide (1)..(98): Ceres Seq. ID no. 12388523
  misc_feature (1)..(98): Homolog of NCBI NO: 289525 NR Description: calmodulin
  misc_feature (1)..(98): Homolog of NCBI NO: 30688187 NR Description: calmodulin-6 (CAM6) [Arabidopsis thaliana]
  misc_feature (1)..(98): Homolog of NCBI NO: 3121849 NR Description: CALMODULIN
  misc_feature (1)..(98): Homolog of NCBI NO: 115515 NR Description: Calmodulin
  misc_feature (1)..(98): Homolog of NCBI NO: 34903134 NR Description: unnamed protein product [Oryza sativa (japonica
  misc_feature (1)..(98): Homolog of NCBI NO: 3121848 NR Description: CALMODULIN
  misc_feature (1)..(98): Homolog of NCBI NO: 34304715 NR Description: calmodulin 4 [Daucus carota]
  misc_feature (1)..(98): Homolog of NCBI NO: 15229784 NR Description: calmodulin 7
  misc_feature (1)..(98): Homolog of NCBI NO: 30683369 NR Description: calmodulin [Arabidopsis thaliana]
  misc_feature (1)..(98): Homolog of NCBI NO: 15225840 NR Description: calmodulin; protein id: At2g27030.1, supported by

SEQ ID NO: 30117 - DNA, 1356 bp, Arabidopsis thaliana
  misc_feature (1)..(1356): Ceres Seq. ID no. 13504985
  misc_feature: MA Experiment ID: 108461 Result: Up-regulated in Transcription
  misc_feature: MA Experiment 108461 PARAMETER Experiment Name: At_Germinating_Seeds_cDNA_P Parameter: Age (day) Value: 1 vs. 0
  misc_feature: MA Experiment 108461 PARAMETER Experiment Name: At_Germinating_Seeds_cDNA_P Parameter: Tissue Value: Germinating Seeds
  misc_feature: MA Experiment ID: 108462 Result: Up-regulated in Transcription
  misc_feature: MA Experiment 108462 PARAMETER Experiment Name: At_Germinating_Seeds_cDNA_P Parameter: Age (day) Value: 2 vs. 0
  misc_feature: MA Experiment 108462 PARAMETER Experiment Name: At_Germinating_Seeds_cDNA_P Parameter: Tissue Value: Germinating Seeds
  misc_feature: MA Experiment ID: 108463 Result: Up-regulated in Transcription
  misc_feature: MA Experiment 108463 PARAMETER Experiment Name: At_Germinating_Seeds_cDNA_P Parameter: Age (day) Value: 3 vs. 0
  misc_feature: MA Experiment 108463 PARAMETER Experiment Name: At_Germinating_Seeds_cDNA_P Parameter: Tissue Value: Germinating Seeds
  misc_feature: MA Experiment ID: 108464 Result: Up-regulated in Transcription
  misc_feature: MA Experiment 108464 PARAMETER Experiment Name: At_Germinating_Seeds_cDNA_P Parameter: Age (day) Value: 4 vs. 0
  misc_feature: MA Experiment 108464 PARAMETER Experiment Name: At_Germinating_Seeds_cDNA_P Parameter: Tissue Value: Germinating Seeds
  misc_feature: MA Experiment ID: 108501 Result: Down-regulated in Transcription
  misc_feature: MA Experiment 108501 PARAMETER Experiment Name: At_ap2_floral_buds_cDNA_P Parameter: Plant Line Value: ap2 (Ler.)
  misc_feature: MA Experiment 108501 PARAMETER Experiment Name: At_ap2_floral_buds_cDNA_P Parameter: Tissue Value: Closed Flower
  misc_feature: MA Experiment ID: 20000113 Result: Up-regulated in Transcription
  misc_feature: MA Experiment 20000113 PARAMETER Experiment Name: At_42deg_Heat_cDNA_P Parameter: Temperature (deg C) Value: 42 vs. 22
  misc_feature: MA Experiment 20000113 PARAMETER Experiment Name: At_42deg_Heat_cDNA_P Parameter: Timepoint (hr) Value: 8
  misc_feature: MA Experiment 20000113 PARAMETER Experiment Name: At_42deg_Heat_cDNA_P Parameter: Tissue Value: Aerial
  misc_feature: MA Experiment ID: 20000180 Result: Up-regulated in Transcription
  misc_feature: MA Experiment 20000180 PARAMETER Experiment Name: At_Germinating_Seeds_P Parameter: Age (hr) Value: 24 vs. 0
  misc_feature: MA Experiment 20000180 PARAMETER Experiment Name: At_Germinating_Seeds_P Parameter: Tissue Value: Germinating Seeds
  misc_feature: MA Experiment ID: 20000184 Result: Up-regulated in Transcription
  misc_feature: MA Experiment 20000184 PARAMETER Experiment Name: At_Shoots__P Parameter: Age (day) Value: 7
  misc_feature: MA Experiment 20000184 PARAMETER Experiment Name: At_Shoots__P Parameter: Tissue Value: Shoots vs. Whole Plant
  misc_feature: MA Experiment ID: 20000185 Result: Down-regulated in Transcription
  misc_feature: MA Experiment 20000185 PARAMETER Experiment Name: At_Roots__P Parameter: Age (day) Value: 7 vs. 21
  misc_feature: MA Experiment 20000185 PARAMETER Experiment Name: At_Roots__P Parameter: Organism Value: A. thaliana
  misc_feature: MA Experiment 20000185 PARAMETER Experiment Name: At_Roots__P Parameter: Tissue Value: Roots vs. Whole Plant
  misc_feature: MA Experiment ID: 20000234 Result: Up-regulated in Transcription
  misc_feature: MA Experiment 20000234 PARAMETER Experiment Name: At_Siliques_P Parameter: Age (day) Value: 21
  misc_feature: MA Experiment 20000234 PARAMETER Experiment Name: At_Siliques_P Parameter: Organism Value: A. thaliana
  misc_feature: MA Experiment 20000234 PARAMETER Experiment Name: At_Siliques_P Parameter: Plant Line Value: WS
  misc_feature: MA Experiment 20000234 PARAMETER Experiment Name: At_Siliques_P Parameter: Tissue Value: Less Than 5mm Siliques vs. Whole Plant
  misc_feature: MA Experiment ID: 20000235 Result: Up-regulated in Transcription
  misc_feature: MA Experiment 20000235 PARAMETER Experiment Name: At_Siliques_P Parameter: Age (day) Value: 21
  misc_feature: MA Experiment 20000235 PARAMETER Experiment Name: At_Siliques_P Parameter: Organism Value: A. thaliana
  misc_feature: MA Experiment 20000235 PARAMETER Experiment Name: At_Siliques_P Parameter: Plant Line Value: WS
  misc_feature: MA Experiment 20000235 PARAMETER Experiment Name: At_Siliques_P Parameter: Tissue Value: 5-10mm Siliques vs. Whole Plant
  misc_feature: MA Experiment ID: 20000264 Result: Up-regulated in Transcription
  misc_feature: MA Experiment 20000264 PARAMETER Experiment Name: At_Open_Flower_P Parameter: Age (day) Value: 21
  misc_feature: MA Experiment 20000264 PARAMETER Experiment Name: At_Open_Flower_P Parameter: Plant Line Value: WS
  misc_feature: MA Experiment 20000264 PARAMETER Experiment Name: At_Open_Flower_P Parameter: Tissue Value: Open Flower vs. Whole Plant
  misc_feature: MA Experiment ID: 20000265 Result: Up-regulated in Transcription
  misc_feature: MA Experiment 20000265 PARAMETER Experiment Name: At_Open_Flower_P Parameter: Age (day) Value: 21
  misc_feature: MA Experiment 20000265 PARAMETER Experiment Name: At_Open_Flower_P Parameter: Plant Line Value: WS
  misc_feature: MA Experiment 20000265 PARAMETER Experiment Name: At_Open_Flower_P Parameter: Tissue Value: Closed Flower vs. Whole Plant
  misc_feature: MA Experiment ID: 20000286 Result: Up-regulated in Transcription
  misc_feature: MA Experiment 20000286 PARAMETER Experiment Name: At_Open_Flower_P Parameter: Age (day) Value: 21
  misc_feature: MA Experiment 20000286 PARAMETER Experiment Name: At_Open_Flower_P Parameter: Plant Line Value: WS
  misc_feature: MA Experiment 20000286 PARAMETER Experiment Name: At_Open_Flower_P Parameter: Tissue Value: Half Open vs. Whole Plant
  misc_feature: MA Experiment ID: 20000438 Result: Up-regulated in Transcription
  misc_feature: MA Experiment 20000438 PARAMETER Experiment Name: At_Shoots__P Parameter: Age (day) Value: 14
  misc_feature: MA Experiment 20000438 PARAMETER Experiment Name: At_Shoots__P Parameter: Tissue Value: Shoots vs. Whole Plant
  misc_feature: MA Experiment ID: 20000439 Result: Down-regulated in Transcription
  misc_feature: MA Experiment 20000439 PARAMETER Experiment Name: At_Roots__P Parameter: Age (day) Value: 14 vs. 21
  misc_feature: MA Experiment 20000439 PARAMETER Experiment Name: At_Roots__P Parameter: Organism Value: A. thaliana
  misc_feature: MA Experiment 20000439 PARAMETER Experiment Name: At_Roots__P Parameter: Tissue Value: Roots vs. Whole Plant
  misc_feature: MA Experiment ID: 20000496 Result: Up-regulated in Transcription
  misc_feature: MA Experiment 20000496 PARAMETER Experiment Name: At_Guard_Cells_P Parameter: Harvest Date Value: 7/19/2002
  misc_feature: MA Experiment 20000496 PARAMETER Experiment Name: At_Guard_Cells_P Parameter: Organism Value: Canola
  misc_feature: MA Experiment 20000496 PARAMETER Experiment Name: At_Guard_Cells_P Parameter: Tissue Value: Guard Cells vs. Leaves
  misc_feature: MA Experiment ID: 20001247 Result: Down-regulated in Transcription
  misc_feature: MA Experiment 20001247 PARAMETER Experiment Name: At_Far-red-induction_P Parameter: Age (day) Value: 7
  misc_feature: MA Experiment 20001247 PARAMETER Experiment Name: At_Far-red-induction_P Parameter: Light Value: Far-red vs. White
  misc_feature: MA Experiment 20001247 PARAMETER Experiment Name: At_Far-red-induction_P Parameter: Organism Value: A. thaliana
  misc_feature: MA Experiment 20001247 PARAMETER Experiment Name: At_Far-red-induction_P Parameter: Plant Line Value: Columbia
  misc_feature: MA Experiment 20001247 PARAMETER Experiment Name: At_Far-red-induction_P Parameter: Timepoint (hr) Value: 1
  misc_feature: MA Experiment 20001247 PARAMETER Experiment Name: At_Far-red-induction_P Parameter: Tissue Value: Whole Plant
  misc_feature: MA Experiment ID: 20001248 Result: Down-regulated in Transcription
  misc_feature: MA Experiment 20001248 PARAMETER Experiment Name: At_Far-red-induction_P Parameter: Age (day) Value: 7
  misc_feature: MA Experiment 20001248 PARAMETER Experiment Name: At_Far-red-induction_P Parameter: Light Value: Far-red vs. White
  misc_feature: MA Experiment 20001248 PARAMETER Experiment Name: At_Far-red-induction_P Parameter: Organism Value: A. thaliana
  misc_feature: MA Experiment 20001248 PARAMETER Experiment Name: At_Far-red-induction_P Parameter: Plant Line Value: Columbia
  misc_feature: MA Experiment 20001248 PARAMETER Experiment Name: At_Far-red-induction_P Parameter: Timepoint (hr) Value: 4
  misc_feature: MA Experiment 20001248 PARAMETER Experiment Name: At_Far-red-induction_P Parameter: Tissue Value: Whole Plant
  misc_feature: MA Experiment ID: 20001450 Result: Down-regulated in Transcription
  misc_feature: MA Experiment 20001450 PARAMETER Experiment Name: At_Far-red-induction_P Parameter: Age (day) Value: 7
  misc_feature: MA Experiment 20001450 PARAMETER Experiment Name: At_Far-red-induction_P Parameter: Light Value: Far-red vs. White
  misc_feature: MA Experiment 20001450 PARAMETER Experiment Name: At_Far-red-induction_P Parameter: Organism Value: A. thaliana
  misc_feature: MA Experiment 20001450 PARAMETER Experiment Name: At_Far-red-induction_P Parameter: Plant Line Value: Columbia
  misc_feature: MA Experiment 20001450 PARAMETER Experiment Name: At_Far-red-induction_P Parameter: Timepoint (hr) Value: 8
  misc_feature: MA Experiment 20001450 PARAMETER Experiment Name: At_Far-red-induction_P Parameter: Tissue Value: Whole Plant
  misc_feature: MA Experiment ID: 20001911 Result: Down-regulated in Transcription
  misc_feature: MA Experiment 20001911 PARAMETER Experiment Name: At_Drought_Reproduction_P Parameter: Age (day) Value: 40
  misc_feature: MA Experiment 20001911 PARAMETER Experiment Name: At_Drought_Reproduction_P Parameter: Organism Value: A. thaliana
  misc_feature: MA Experiment 20001911 PARAMETER Experiment Name: At_Drought_Reproduction_P Parameter: Plant Line Value: WS
  misc_feature: MA Experiment 20001911 PARAMETER Experiment Name: At_Drought_Reproduction_P Parameter: Timepoint (day) Value: 10
  misc_feature: MA Experiment 20001911 PARAMETER Experiment Name: At_Drought_Reproduction_P Parameter: Tissue Value: Flowers
  misc_feature: MA Experiment 20001911 PARAMETER Experiment Name: At_Drought_Reproduction_P Parameter: Treatment Value: Drought vs. No Drought
atattgttttgagccatggaaactcttttccacactcttcttagattattactattcgtagccatctctcatactctgtcccctctcgccggttctttccggatttctaatgactttccggcggttttcaacttcggagactctaactctgacaccggagaacttagctcgggtcttggattccttccacaaccttcctatgaaataaccttctttagatctccaacttccggaagattctgcaatggacgtcttatcgtcgattttctaatggaagcaattgatcgaccatatttgaggccttatttagattcgataagtcgacaaacttaccgaagaggctgcaattttgctgcggctgcgtcaacgattcagaaggcaaatgctgcatcctatagcccctttggttttggtgttcaagtctctcaattcatcacctttaagtccaaagtccttcaattgatacaacaagatgaagagctccaaagatacttaccgtccgaatatttttttagtaatggattgtatatgtttgatatcggacaaaatgatattgccggagcattttacaccaagacagtagatcaagttcttgctctggttcctataatcttagatatatttcaagatggaataaagagattatatgcagagggggcaagaaactattggatacacaacacaggaccacttgggtgtttagcacaagttgtgtcaatttttggggaagacaaatcaaagcttgatgagtttggttgtgtcagtgaccataaccaagctgctaagcttttcaatttgcagcttcatggtcttttcaaaaaactccctcaacaatatcccaattcccgtttcacatacgtagatatcttctctatcaaatccgacctcatcctgaatcattccaaatatggttttgatcattcgataatggtatgttgtggaaccggaggaccaccactgaactacgatgatcaggttggttgcggtaagacagcaagatcaaatggtacgatcataaccgccaaaccttgttatgatagttccaaatatgttaactgggacggcattcattacactgaagctgcaaatcggtttgttgcactacacattctcaccggtaaatactctgagacggcgtcatctttgaatctttagcaatgtaacaaagaaagttacattatcactttctttatggattacatatatatttagttgtatgttaactggtttatttatgattatatgaataatttccataaacttaactgtttcatttccaaaaaaaggcattttccaattttctttcacaaagatagatgctttgtcacaataaaatgaatctttcaaatttcctgc

SEQ ID NO: 30118 - protein, 379 aa, Arabidopsis thaliana
  peptide (1)..(379): Ceres Seq. ID no. 13504986
  misc_feature (37)..(365): Pfam Name: GDSL-like Lipase/Acylhydrolase Pfam Description: GDSL-like Lipase/Acylhydrolase
  misc_feature (37)..(365): Pfam Name: GDSL-like Lipase/Acylhydrolase Pfam Description: GDSL-like Lipase/Acylhydrolase
  misc_feature (34)..(372): Homolog of NCBI NO: 33147016 NR Description: putative early nodulin 8 precursor
  misc_feature (8)..(368): Homolog of NCBI NO: 15220550 NR Description: GDSL-motif lipase/hydrolase protein [Arabidopsis
  misc_feature (35)..(372): Homolog of NCBI NO: 15223585 NR Description: GDSL-motif lipase/hydrolase protein [Arabidopsis
  misc_feature (6)..(371): Homolog of NCBI NO: 15217506 NR Description: GDSL-motif lipase/hydrolase protein [Arabidopsis
  misc_feature (13)..(372): Homolog of NCBI NO: 21537184 NR Description: early nodule-specific protein, putative
  misc_feature (34)..(372): Homolog of NCBI NO: 33147016 NR Description: putative early nodulin 8 precursor
  misc_feature (35)..(372): Homolog of NCBI NO: 15223585 NR Description: GDSL-motif lipase/hydrolase protein [Arabidopsis
  misc_feature (13)..(372): Homolog of NCBI NO: 21537184 NR Description: early nodule-specific protein, putative
  misc_feature (1)..(379): Homolog of NCBI NO: 15229919 NR Description: GDSL-motif lipase/hydrolase protein [Arabidopsis
  misc_feature (1)..(379): Homolog of NCBI NO: 21553789 NR Description: putative nodulin [Arabidopsis thaliana]
  misc_feature (25)..(379): Homolog of NCBI NO: 23397291 NR Description: putative nodulin [Arabidopsis thaliana]
  misc_feature (9)..(372): Homolog of NCBI NO: 25405771 NR Description: hypothetical protein T22H22.20 [imported] -
  misc_feature (8)..(372): Homolog of NCBI NO: 18405064 NR Description: GDSL-motif lipase/hydrolase protein [Arabidopsis
  misc_feature (6)..(371): Homolog of NCBI NO: 15217506 NR Description: GDSL-motif lipase/hydrolase protein [Arabidopsis
  misc_feature (8)..(368): Homolog of NCBI NO: 15220550 NR Description: GDSL-motif lipase/hydrolase protein [Arabidopsis
  misc_feature (8)..(372): Homolog of NCBI NO: 18405064 NR Description: GDSL-motif lipase/hydrolase protein [Arabidopsis
  misc_feature (9)..(372): Homolog of NCBI NO: 25405771 NR Description: hypothetical protein T22H22.20 [imported] -
  misc_feature (25)..(379): Homolog of NCBI NO: 23397291 NR Description: putative nodulin [Arabidopsis thaliana]
  misc_feature (1)..(379): Homolog of NCBI NO: 21553789 NR Description: putative nodulin [Arabidopsis thaliana]
  misc_feature (1)..(379): Homolog of NCBI NO: 15229919 NR Description: GDSL-motif lipase/hydrolase protein [Arabidopsis
METLFHTLLRLLLFVAISHTLSPLAGSFRISNDFPAVFNFGDSNSDTGELSSGLGFLPQPSYEITFFRSPTSGRFCNGRLIVDFLMEAIDRPYLRPYLDSISRQTYRRGCNFAAAASTIQKANAASYSPFGFGVQVSQFITFKSKVLQLIQQDEELQRYLPSEYFFSNGLYMFDIGQNDIAGAFYTKTVDQVLALVPIILDIFQDGIKRLYAEGARNYWIHNTGPLGCLAQVVSIFGEDKSKLDEFGCVSDHNQAAKLFNLQLHGLFKKLPQQYPNSRFTYVDIFSIKSDLILNHSKYGFDHSIMVCCGTGGPPLNYDDQVGCGKTARSNGTIITAKPCYDSSKYVNWDGIHYTEAANRFVALHILTGKYSETASSLNL

SEQ ID NO: 30119 - protein, 294 aa, Arabidopsis thaliana
  peptide (1)..(294): Ceres Seq. ID no. 13504987
  misc_feature (1)..(280): Pfam Name: GDSL-like Lipase/Acylhydrolase Pfam Description: GDSL-like Lipase/Acylhydrolase
  misc_feature (1)..(280): Pfam Name: GDSL-like Lipase/Acylhydrolase Pfam Description: GDSL-like Lipase/Acylhydrolase
  misc_feature (1)..(287): Homolog of NCBI NO: 33147016 NR Description: putative early nodulin 8 precursor
  misc_feature (1)..(283): Homolog of NCBI NO: 15220550 NR Description: GDSL-motif lipase/hydrolase protein [Arabidopsis
  misc_feature (1)..(287): Homolog of NCBI NO: 15223585 NR Description: GDSL-motif lipase/hydrolase protein [Arabidopsis
  misc_feature (1)..(286): Homolog of NCBI NO: 15217506 NR Description: GDSL-motif lipase/hydrolase protein [Arabidopsis
  misc_feature (1)..(287): Homolog of NCBI NO: 21537184 NR Description: early nodule-specific protein, putative
  misc_feature (1)..(287): Homolog of NCBI NO: 33147016 NR Description: putative early nodulin 8 precursor
  misc_feature (1)..(287): Homolog of NCBI NO: 15223585 NR Description: GDSL-motif lipase/hydrolase protein [Arabidopsis
  misc_feature (1)..(287): Homolog of NCBI NO: 21537184 NR Description: early nodule-specific protein, putative
  misc_feature (1)..(294): Homolog of NCBI NO: 15229919 NR Description: GDSL-motif lipase/hydrolase protein [Arabidopsis
  misc_feature (1)..(294): Homolog of NCBI NO: 21553789 NR Description: putative nodulin [Arabidopsis thaliana]
  misc_feature (1)..(294): Homolog of NCBI NO: 23397291 NR Description: putative nodulin [Arabidopsis thaliana]
  misc_feature (1)..(287): Homolog of NCBI NO: 25405771 NR Description: hypothetical protein T22H22.20 [imported] -
  misc_feature (1)..(287): Homolog of NCBI NO: 18405064 NR Description: GDSL-motif lipase/hydrolase protein [Arabidopsis
  misc_feature (1)..(286): Homolog of NCBI NO: 15217506 NR Description: GDSL-motif lipase/hydrolase protein [Arabidopsis
  misc_feature (1)..(283): Homolog of NCBI NO: 15220550 NR Description: GDSL-motif lipase/hydrolase protein [Arabidopsis
  misc_feature (1)..(287): Homolog of NCBI NO: 18405064 NR Description: GDSL-motif lipase/hydrolase protein [Arabidopsis
  misc_feature (1)..(287): Homolog of NCBI NO: 25405771 NR Description: hypothetical protein T22H22.20 [imported] -
  misc_feature (1)..(294): Homolog of NCBI NO: 23397291 NR Description: putative nodulin [Arabidopsis thaliana]
  misc_feature (1)..(294): Homolog of NCBI NO: 21553789 NR Description: putative nodulin [Arabidopsis thaliana]
  misc_feature (1)..(294): Homolog of NCBI NO: 15229919 NR Description: GDSL-motif lipase/hydrolase protein [Arabidopsis
MEAIDRPYLRPYLDSISRQTYRRGCNFAAAASTIQKANAASYSPFGFGVQVSQFITFKSKVLQLIQQDEELQRYLPSEYFFSNGLYMFDIGQNDIAGAFYTKTVDQVLALVPIILDIFQDGIKRLYAEGARNYWIHNTGPLGCLAQVVSIFGEDKSKLDEFGCVSDHNQAAKLFNLQLHGLFKKLPQQYPNSRFTYVDIFSIKSDLILNHSKYGFDHSIMVCCGTGGPPLNYDDQVGCGKTARSNGTIITAKPCYDSSKYVNWDGIHYTEAANRFVALHILTGKYSETASSLNL

SEQ ID NO: 30120 - protein, 208 aa, Arabidopsis thaliana
  peptide (1)..(208): Ceres Seq. ID no. 13504988
  misc_feature (1)..(194): Pfam Name: GDSL-like Lipase/Acylhydrolase Pfam Description: GDSL-like Lipase/Acylhydrolase
  misc_feature (1)..(194): Pfam Name: GDSL-like Lipase/Acylhydrolase Pfam Description: GDSL-like Lipase/Acylhydrolase
  misc_feature (1)..(201): Homolog of NCBI NO: 33147016 NR Description: putative early nodulin 8 precursor
  misc_feature (1)..(197): Homolog of NCBI NO: 15220550 NR Description: GDSL-motif lipase/hydrolase protein [Arabidopsis
  misc_feature (1)..(201): Homolog of NCBI NO: 15223585 NR Description: GDSL-motif lipase/hydrolase protein [Arabidopsis
  misc_feature (1)..(200): Homolog of NCBI NO: 15217506 NR Description: GDSL-motif lipase/hydrolase protein [Arabidopsis
  misc_feature (1)..(201): Homolog of NCBI NO: 21537184 NR Description: early nodule-specific protein, putative
  misc_feature (1)..(201): Homolog of NCBI NO: 33147016 NR Description: putative early nodulin 8 precursor
  misc_feature (1)..(201): Homolog of NCBI NO: 15223585 NR Description: GDSL-motif lipase/hydrolase protein [Arabidopsis
  misc_feature (1)..(201): Homolog of NCBI NO: 21537184 NR Description: early nodule-specific protein, putative
  misc_feature (1)..(208): Homolog of NCBI NO: 15229919 NR Description: GDSL-motif lipase/hydrolase protein [Arabidopsis
  misc_feature (1)..(208): Homolog of NCBI NO: 21553789 NR Description: putative nodulin [Arabidopsis thaliana]
  misc_feature (1)..(208): Homolog of NCBI NO: 23397291 NR Description: putative nodulin [Arabidopsis thaliana]
  misc_feature (1)..(201): Homolog of NCBI NO: 25405771 NR Description: hypothetical protein T22H22.20 [imported] -
  misc_feature (1)..(201): Homolog of NCBI NO: 18405064 NR Description: GDSL-motif lipase/hydrolase protein [Arabidopsis
  misc_feature (1)..(200): Homolog of NCBI NO: 15217506 NR Description: GDSL-motif lipase/hydrolase protein [Arabidopsis
  misc_feature (1)..(197): Homolog of NCBI NO: 15220550 NR Description: GDSL-motif lipase/hydrolase protein [Arabidopsis
  misc_feature (1)..(201): Homolog of NCBI NO: 18405064 NR Description: GDSL-motif lipase/hydrolase protein [Arabidopsis
  misc_feature (1)..(201): Homolog of NCBI NO: 25405771 NR Description: hypothetical protein T22H22.20 [imported] -
  misc_feature (1)..(208): Homolog of NCBI NO: 23397291 NR Description: putative nodulin [Arabidopsis thaliana]
  misc_feature (1)..(208): Homolog of NCBI NO: 21553789 NR Description: putative nodulin [Arabidopsis thaliana]
  misc_feature (1)..(208): Homolog of NCBI NO: 15229919 NR Description: GDSL-motif lipase/hydrolase protein [Arabidopsis
MFDIGQNDIAGAFYTKTVDQVLALVPIILDIFQDGIKRLYAEGARNYWIHNTGPLGCLAQVVSIFGEDKSKLDEFGCVSDHNQAAKLFNLQLHGLFKKLPQQYPNSRFTYVDIFSIKSDLILNHSKYGFDHSIMVCCGTGGPPLNYDDQVGCGKTARSNGTIITAKPCYDSSKYVNWDGIHYTEAANRFVALHILTGKYSETASSLNL

SEQ ID NO: 30121 - DNA, 747 bp, Arabidopsis thaliana
  misc_feature (1)..(747): Ceres Seq. ID no. 12397065
  misc_feature: MA Experiment ID: 108434 Result: Up-regulated in Transcription
  misc_feature: MA Experiment 108434 PARAMETER Experiment Name: At_Root_Tips_cDNA_P Parameter: Tissue Value: Root Tips
  misc_feature: MA Experiment ID: 108435 Result: Down-regulated in Transcription
  misc_feature: MA Experiment 108435 PARAMETER Experiment Name: At_stm_Mutants_cDNA_P Parameter: Plant Line Value: wt Landsburg vs stm
  misc_feature: MA Experiment 108435 PARAMETER Experiment Name: At_stm_Mutants_cDNA_P Parameter: Tissue Value: Shoot Apical Meristem Region
  misc_feature: MA Experiment ID: 108488 Result: Up-regulated in Transcription
  misc_feature: MA Experiment ID: 108595 Result: Down-regulated in Transcription
  misc_feature: MA Experiment 108595 PARAMETER Experiment Name: At_Ler-pi_Ovule_cDNA_P Parameter: Plant Line Value: null
  misc_feature: MA Experiment ID: 20000071 Result: Down-regulated in Transcription
  misc_feature: MA Experiment 20000071 PARAMETER Experiment Name: At_100uM_ABA_Mutants_cDNA_P Parameter: Plant Line Value: CS8104
  misc_feature: MA Experiment 20000071 PARAMETER Experiment Name: At_100uM_ABA_Mutants_cDNA_P Parameter: Timepoint (hr) Value: 6
  misc_feature: MA Experiment 20000071 PARAMETER Experiment Name: At_100uM_ABA_Mutants_cDNA_P Parameter: Tissue Value: Aerial
  misc_feature: MA Experiment 20000071 PARAMETER Experiment Name: At_100uM_ABA_Mutants_cDNA_P Parameter: Treatment Value: 100uM ABA vs. No Treatment
  misc_feature: MA Experiment ID: 20000072 Result: Down-regulated in Transcription
  misc_feature: MA Experiment 20000072 PARAMETER Experiment Name: At_100uM_ABA_Mutants_cDNA_P Parameter: Plant Line Value: CS8105
  misc_feature: MA Experiment 20000072 PARAMETER Experiment Name: At_100uM_ABA_Mutants_cDNA_P Parameter: Timepoint (hr) Value: 6
  misc_feature: MA Experiment 20000072 PARAMETER Experiment Name: At_100uM_ABA_Mutants_cDNA_P Parameter: Tissue Value: Aerial
  misc_feature: MA Experiment 20000072 PARAMETER Experiment Name: At_100uM_ABA_Mutants_cDNA_P Parameter: Treatment Value: 100uM ABA vs. No Treatment
  misc_feature: MA Experiment ID: 20000185 Result: Down-regulated in Transcription
  misc_feature: MA Experiment 20000185 PARAMETER Experiment Name: At_Roots__P Parameter: Age (day) Value: 7 vs. 21
  misc_feature: MA Experiment 20000185 PARAMETER Experiment Name: At_Roots__P Parameter: Organism Value: A. thaliana
  misc_feature: MA Experiment 20000185 PARAMETER Experiment Name: At_Roots__P Parameter: Tissue Value: Roots vs. Whole Plant
  misc_feature: MA Experiment ID: 20000286 Result: Down-regulated in Transcription
  misc_feature: MA Experiment 20000286 PARAMETER Experiment Name: At_Open_Flower_P Parameter: Age (day) Value: 21
  misc_feature: MA Experiment 20000286 PARAMETER Experiment Name: At_Open_Flower_P Parameter: Plant Line Value: WS
  misc_feature: MA Experiment 20000286 PARAMETER Experiment Name: At_Open_Flower_P Parameter: Tissue Value: Half Open vs. Whole Plant
  misc_feature: MA Experiment ID: 20000437 Result: Down-regulated in Transcription
  misc_feature: MA Experiment 20000437 PARAMETER Experiment Name: At_Drought_P Parameter: Age (day) Value: 8
  misc_feature: MA Experiment 20000437 PARAMETER Experiment Name: At_Drought_P Parameter: Organism Value: A. thaliana
  misc_feature: MA Experiment 20000437 PARAMETER Experiment Name: At_Drought_P Parameter: Plant Line Value: WS
  misc_feature: MA Experiment 20000437 PARAMETER Experiment Name: At_Drought_P Parameter: Timepoint (hr) Value: 24
  misc_feature: MA Experiment 20000437 PARAMETER Experiment Name: At_Drought_P Parameter: Tissue Value: Whole Plant
  misc_feature: MA Experiment 20000437 PARAMETER Experiment Name: At_Drought_P Parameter: Treatment Value: Drought vs. No Drought
  misc_feature: MA Experiment ID: 20000439 Result: Down-regulated in Transcription
  misc_feature: MA Experiment 20000439 PARAMETER Experiment Name: At_Roots__P Parameter: Age (day) Value: 14 vs. 21
  misc_feature: MA Experiment 20000439 PARAMETER Experiment Name: At_Roots__P Parameter: Organism Value: A. thaliana
  misc_feature: MA Experiment 20000439 PARAMETER Experiment Name: At_Roots__P Parameter: Tissue Value: Roots vs. Whole Plant
  misc_feature: MA Experiment ID: 20000794 Result: Down-regulated in Transcription
  misc_feature: MA Experiment 20000794 PARAMETER Experiment Name: At_Petals_P Parameter: Age (day) Value: 23-25 days
  misc_feature: MA Experiment 20000794 PARAMETER Experiment Name: At_Petals_P Parameter: Plant Line Value: WS
  misc_feature: MA Experiment 20000794 PARAMETER Experiment Name: At_Petals_P Parameter: Tissue Value: Petals vs. Whole plant
  misc_feature: MA Experiment ID: 20001905 Result: Down-regulated in Transcription
  misc_feature: MA Experiment 20001905 PARAMETER Experiment Name: At_Drought_Reproduction_P Parameter: Age (day) Value: 40
  misc_feature: MA Experiment 20001905 PARAMETER Experiment Name: At_Drought_Reproduction_P Parameter: Organism Value: A. thaliana
  misc_feature: MA Experiment 20001905 PARAMETER Experiment Name: At_Drought_Reproduction_P Parameter: Plant Line Value: WS
  misc_feature: MA Experiment 20001905 PARAMETER Experiment Name: At_Drought_Reproduction_P Parameter: Timepoint (day) Value: 10
  misc_feature: MA Experiment 20001905 PARAMETER Experiment Name: At_Drought_Reproduction_P Parameter: Tissue Value: Rosettes
  misc_feature: MA Experiment 20001905 PARAMETER Experiment Name: At_Drought_Reproduction_P Parameter: Treatment Value: Drought vs. No Drought
  misc_feature: MA Experiment ID: 20001906 Result: Down-regulated in Transcription
  misc_feature: MA Experiment 20001906 PARAMETER Experiment Name: At_Drought_Reproduction_P Parameter: Age (day) Value: 35
  misc_feature: MA Experiment 20001906 PARAMETER Experiment Name: At_Drought_Reproduction_P Parameter: Organism Value: A. thaliana
  misc_feature: MA Experiment 20001906 PARAMETER Experiment Name: At_Drought_Reproduction_P Parameter: Plant Line Value: WS
  misc_feature: MA Experiment 20001906 PARAMETER Experiment Name: At_Drought_Reproduction_P Parameter: Timepoint (day) Value: 5
  misc_feature: MA Experiment 20001906 PARAMETER Experiment Name: At_Drought_Reproduction_P Parameter: Tissue Value: Siliques
  misc_feature: MA Experiment 20001906 PARAMETER Experiment Name: At_Drought_Reproduction_P Parameter: Treatment Value: Drought vs. No Drought
  misc_feature: MA Experiment ID: 20001911 Result: Down-regulated in Transcription
  misc_feature: MA Experiment 20001911 PARAMETER Experiment Name: At_Drought_Reproduction_P Parameter: Age (day) Value: 40
  misc_feature: MA Experiment 20001911 PARAMETER Experiment Name: At_Drought_Reproduction_P Parameter: Organism Value: A. thaliana
  misc_feature: MA Experiment 20001911 PARAMETER Experiment Name: At_Drought_Reproduction_P Parameter: Plant Line Value: WS
  misc_feature: MA Experiment 20001911 PARAMETER Experiment Name: At_Drought_Reproduction_P Parameter: Timepoint (day) Value: 10
  misc_feature: MA Experiment 20001911 PARAMETER Experiment Name: At_Drought_Reproduction_P Parameter: Tissue Value: Flowers
  misc_feature: MA Experiment 20001911 PARAMETER Experiment Name: At_Drought_Reproduction_P Parameter: Treatment Value: Drought vs. No Drought
ctcttcattatcctcaaaatcgctcgagagtgagaactctgctcttcttcttcttcctccgccatagctacaatgcttagtctctcaatcgctacgccggggacggcggcgatttttcgtagaggaactgcttcggcgacttcaacttcgtcttcattccatggtgtcagaatccagcaccaggtttctgctcgcgtccccgcggcggcgacgatatcgtcgtcgtctcctaaaccgtcggtggtgatgatgtcgaaaagagaggcggaattgaaagagataagatcgaagacgacggagcagttacaagaggaggttgttgaccttaaaggtgagctctttatgcttcgtctccagaaatcggcaaggaatgagttcaaatctagcgactttcgtcgtatgaagaaacaagttgctcggatgttgacggttaaaagagagagggagatcaaagaagggataaagaaaaggttgtcgaggaaacttgacagacaatggaagaaaagcatagtaccaagaccacctccgtctctgaagaaacttcaagaagaagaagctgcagaagaagcagctgaagctgctaaatctgcttgaaaaaacccgctattgatttatggtctcttccttgttgtttcctcgagatgttgttaatctctgttatttgttgctgaaccatcttgtatttgtttttcttttggtgtaaacactttccttatcaagtagtttacatgaatcccttaaagattg

SEQ ID NO: 30122 - protein, 173 aa, Arabidopsis thaliana
  peptide (1)..(173): Ceres Seq. ID no. 12397066
  misc_feature (63)..(131): Homolog of NCBI NO: 23022263 NR Description: hypothetical protein [Clostridium thermocellum
  misc_feature (1)..(160): Homolog of NCBI NO: 5739218 NR Description: ribosomal protein L29 [Zea mays]
  misc_feature (1)..(173): Homolog of NCBI NO: 15238369 NR Description: 50S ribosomal protein L29
MLSLSIATPGTAAIFRRGTASATSTSSSFHGVRIQHQVSARVPAAATISSSSPKPSVVMMSKREAELKEIRSKTTEQLQEEVVDLKGELFMLRLQKSARNEFKSSDFRRMKKQVARMLTVKREREIKEGIKKRLSRKLDRQWKKSIVPRPPPSLKKLQEEEAAEEAAEAAKSA

SEQ ID NO: 30123 - protein, 115 aa, Arabidopsis thaliana
  peptide (1)..(115): Ceres Seq. ID no. 12397067
  misc_feature (5)..(73): Homolog of NCBI NO: 23022263 NR Description: hypothetical protein [Clostridium thermocellum
  misc_feature (1)..(102): Homolog of NCBI NO: 5739218 NR Description: ribosomal protein L29 [Zea mays]
  misc_feature (1)..(115): Homolog of NCBI NO: 15238369 NR Description: 50S ribosomal protein L29
MMSKREAELKEIRSKTTEQLQEEVVDLKGELFMLRLQKSARNEFKSSDFRRMKKQVARMLTVKREREIKEGIKKRLSRKLDRQWKKSIVPRPPPSLKKLQEEEAAEEAAEAAKSA

SEQ ID NO: 30124 - protein, 114 aa, Arabidopsis thaliana
  peptide (1)..(114): Ceres Seq. ID no. 12397068
  misc_feature (4)..(72): Homolog of NCBI NO: 23022263 NR Description: hypothetical protein [Clostridium thermocellum
  misc_feature (1)..(101): Homolog of NCBI NO: 5739218 NR Description: ribosomal protein L29 [Zea mays]
  misc_feature (1)..(114): Homolog of NCBI NO: 15238369 NR Description: 50S ribosomal protein L29
MSKREAELKEIRSKTTEQLQEEVVDLKGELFMLRLQKSARNEFKSSDFRRMKKQVARMLTVKREREIKEGIKKRLSRKLDRQWKKSIVPRPPPSLKKLQEEEAAEEAAEAAKSA

SEQ ID NO: 30125 - DNA, 1654 bp, Arabidopsis thaliana
  misc_feature (1)..(1654): Ceres Seq. ID no. 13496814
  misc_feature: MA Experiment ID: 108434 Result: Up-regulated in Transcription
  misc_feature: MA Experiment 108434 PARAMETER Experiment Name: At_Root_Tips_cDNA_P Parameter: Tissue Value: Root Tips
  misc_feature: MA Experiment ID: 108435 Result: Up-regulated in Transcription
  misc_feature: MA Experiment 108435 PARAMETER Experiment Name: At_stm_Mutants_cDNA_P Parameter: Plant Line Value: wt Landsburg vs stm
  misc_feature: MA Experiment 108435 PARAMETER Experiment Name: At_stm_Mutants_cDNA_P Parameter: Tissue Value: Shoot Apical Meristem Region
  misc_feature: MA Experiment ID: 108461 Result: Down-regulated in Transcription
  misc_feature: MA Experiment 108461 PARAMETER Experiment Name: At_Germinating_Seeds_cDNA_P Parameter: Age (day) Value: 1 vs. 0
  misc_feature: MA Experiment 108461 PARAMETER Experiment Name: At_Germinating_Seeds_cDNA_P Parameter: Tissue Value: Germinating Seeds
  misc_feature: MA Experiment ID: 108462 Result: Down-regulated in Transcription
  misc_feature: MA Experiment 108462 PARAMETER Experiment Name: At_Germinating_Seeds_cDNA_P Parameter: Age (day) Value: 2 vs. 0
  misc_feature: MA Experiment 108462 PARAMETER Experiment Name: At_Germinating_Seeds_cDNA_P Parameter: Tissue Value: Germinating Seeds
  misc_feature: MA Experiment ID: 108463 Result: Down-regulated in Transcription
  misc_feature: MA Experiment 108463 PARAMETER Experiment Name: At_Germinating_Seeds_cDNA_P Parameter: Age (day) Value: 3 vs. 0
  misc_feature: MA Experiment 108463 PARAMETER Experiment Name: At_Germinating_Seeds_cDNA_P Parameter: Tissue Value: Germinating Seeds
  misc_feature: MA Experiment ID: 108464 Result: Down-regulated in Transcription
  misc_feature: MA Experiment 108464 PARAMETER Experiment Name: At_Germinating_Seeds_cDNA_P Parameter: Age (day) Value: 4 vs. 0
  misc_feature: MA Experiment 108464 PARAMETER Experiment Name: At_Germinating_Seeds_cDNA_P Parameter: Tissue Value: Germinating Seeds
  misc_feature: MA Experiment ID: 20000307 Result: Down-regulated in Transcription
  misc_feature: MA Experiment 20000307 PARAMETER Experiment Name: At_Germinating_Seeds_Sub_P Parameter: Age (hr) Value: 24 vs. 0
  misc_feature: MA Experiment 20000307 PARAMETER Experiment Name: At_Germinating_Seeds_Sub_P Parameter: Organism Value: A. thaliana
  misc_feature: MA Experiment 20000307 PARAMETER Experiment Name: At_Germinating_Seeds_Sub_P Parameter: Plant Line Value: WS
  misc_feature: MA Experiment 20000307 PARAMETER Experiment Name: At_Germinating_Seeds_Sub_P Parameter: Tissue Value: Germinating Seeds
  misc_feature: MA Experiment ID: 20000355 Result: Up-regulated in Transcription
  misc_feature: MA Experiment 20000355 PARAMETER Experiment Name: At_Siliques_Sub_P Parameter: Age (day) Value: 21
  misc_feature: MA Experiment 20000355 PARAMETER Experiment Name: At_Siliques_Sub_P Parameter: Organism Value: A. thaliana
  misc_feature: MA Experiment 20000355 PARAMETER Experiment Name: At_Siliques_Sub_P Parameter: Plant Line Value: WS
  misc_feature: MA Experiment 20000355 PARAMETER Experiment Name: At_Siliques_Sub_P Parameter: Tissue Value: Less Than 5mm Siliques vs. Whole Plant
  misc_feature: MA Experiment ID: 20000440 Result: Up-regulated in Transcription
  misc_feature: MA Experiment 20000440 PARAMETER Experiment Name: At_Closed-Flower__Sub_P Parameter: Tissue Value: Closed Flower vs. Whole Plant
atatttaattttcttcagtcagagatttcgaaaccctagtcgatttcgagatccaactaactctgctccttatctcagcttgttgaatttgcgaagtatgggagacgctagagacaacgaagcctacgaggaggagctcttggactatgaagaagaagacgagaaggtcccagattctggaaacaaagttaacggcgaagctgtgaaaaaagggtacgtgggaatacacagttctggattcagagacttccttttgaaaccggagcttctcagagctattgttgactcaggatttgaacatccatctgaagtgcaacacgaatgtatccctcaagctatcttgggtatggatgttatctgccaagcaaagtctggtatggggaagactgctgtgtttgtcctgtctactctacaacagattgaaccatctcctggccaggtttctgcacttgtcttgtgccatacaagagagctagcttaccagatctgcaatgagtttgtgcgattcagtacctatctgcctgatacaaaagtttcggtgttctatggtggagtcaacattaaaattcacaaagacttgctgaagaatgaatgtcctcacattgttgttggtacccctggtcgagtgcttgcacttgccagggagaaagatctctctttgaagaatgtgaggcattttattcttgatgagtgtgataaaatgctcgagtcacttgacatgcgaagggatgtgcaggagattttcaagatgactcctcatgacaaacaagtaatgatgttctcagcaacgctcagcaaagagatacgcccagtctgcaagaagtttatgcaagatccaatggaaatatatgttgatgatgaagccaagttgactcttcatggacttgtccagcactacatcaaactgagcgagatggagaaaaatcgcaagttgaatgaccttcttgatgcgttggacttcaatcaagttgtcatttttgtgaagagcgtgagcagggctgcggagctgaacaagttactggtggaatgcaatttcccctcaatatgcatacactctggcatgtctcaagaagagaggttgactcgatacaaaagtttcaaggaagggcacaagaggatccttgtggcgactgacttggtaggaagagggattgacatagagcgtgtcaacattgttatcaactatgacatgccagattctgcggatacctatcttcatagggttgggagagctggtagatttggaaccaagggtcttgcaatcacatttgttgcatctgcttcagattcagaggtccttaatcaggttcaagagaggtttgaggtcgatataaaggagcttcctgagcagattgatacatcgacttacatgccgtcttaaacaagtagcatcatctctgaggaacgaacctcttcagatttcaaccttttaggtgttcaaaggggtcatggaggtccacaactatctctcacaccgtttgttgcttcgctattttagacttttctatgaggacaagtttttccatatatttagaccgttttgtaactcttgaaaaatgagattgagctactctccaaatcgcgcacagttgagagctctcctgttttttgtactagtgatggttatctttaaaatattaagatttcaggattg

SEQ ID NO: 30126 - protein, 459 aa, Arabidopsis thaliana
  peptide (1)..(459): Ceres Seq. ID no. 13496815
  misc_feature (91)..(298): Pfam Name: DEAD/DEAH box helicase Pfam Description: DEAD/DEAH box helicase
  misc_feature (43)..(278): Homolog of NCBI NO: 21040373 NR Description: DEAD/H (Asp-Glu-Ala-Asp/His) box polypeptide 39
  misc_feature (43)..(457): Homolog of NCBI NO: 16758334 NR Description: nuclear RNA helicase, DECD variant of DEAD box
  misc_feature (38)..(457): Homolog of NCBI NO: 28278325 NR Description: Unknown (protein for MGC:55433) [Danio rerio]
  misc_feature (116)..(459): Homolog of NCBI NO: 30683509 NR Description: DEAD/DEAH box helicase, putative [Arabidopsis
  misc_feature (35)..(459): Homolog of NCBI NO: 34913862 NR Description: putative DEAD BOX RNA helicase
  misc_feature (33)..(456): Homolog of NCBI NO: 8953379 NR Description: DEAD BOX RNA helicase RH15-like protein
  misc_feature (33)..(456): Homolog of NCBI NO: 8953382 NR Description: DEAD BOX RNA helicase RH15 [Arabidopsis thaliana]
  misc_feature (33)..(459): Homolog of NCBI NO: 18416486 NR Description: DEAD/DEAH box helicase, putative [Arabidopsis
  misc_feature (33)..(459): Homolog of NCBI NO: 18416493 NR Description: DEAD/DEAH box helicase, putative [Arabidopsis
  misc_feature (9)..(459): Homolog of NCBI NO: 11358797 NR Description: RNA helicase RH15 [imported] - Arabidopsis
YLIFFSQRFRNPSRFRDPTNSAPYLSLLNLRSMGDARDNEAYEEELLDYEEEDEKVPDSGNKVNGEAVKKGYVGIHSSGFRDFLLKPELLRAIVDSGFEHPSEVQHECIPQAILGMDVICQAKSGMGKTAVFVLSTLQQIEPSPGQVSALVLCHTRELAYQICNEFVRFSTYLPDTKVSVFYGGVNIKIHKDLLKNECPHIVVGTPGRVLALAREKDLSLKNVRHFILDECDKMLESLDMRRDVQEIFKMTPHDKQVMMFSATLSKEIRPVCKKFMQDPMEIYVDDEAKLTLHGLVQHYIKLSEMEKNRKLNDLLDALDFNQVVIFVKSVSRAAELNKLLVECNFPSICIHSGMSQEERLTRYKSFKEGHKRILVATDLVGRGIDIERVNIVINYDMPDSADTYLHRVGRAGRFGTKGLAITFVASASDSEVLNQVQERFEVDIKELPEQIDTSTYMPS

SEQ ID NO: 30127 - protein, 427 aa, Arabidopsis thaliana; identical to SEQ ID NO: 20810
  peptide (1)..(427): Ceres Seq. ID no. 13496816
  misc_feature (59)..(266): Pfam Name: DEAD/DEAH box helicase Pfam Description: DEAD/DEAH box helicase
  misc_feature (11)..(246): Homolog of NCBI NO: 21040373 NR Description: DEAD/H (Asp-Glu-Ala-Asp/His) box polypeptide 39
  misc_feature (11)..(425): Homolog of NCBI NO: 16758334 NR Description: nuclear RNA helicase, DECD variant of DEAD box
  misc_feature (6)..(425): Homolog of NCBI NO: 28278325 NR Description: Unknown (protein for MGC:55433) [Danio rerio]
  misc_feature (84)..(427): Homolog of NCBI NO: 30683509 NR Description: DEAD/DEAH box helicase, putative [Arabidopsis
  misc_feature (3)..(427): Homolog of NCBI NO: 34913862 NR Description: putative DEAD BOX RNA helicase
  misc_feature (1)..(424): Homolog of NCBI NO: 8953379 NR Description: DEAD BOX RNA helicase RH15-like protein
  misc_feature (1)..(424): Homolog of NCBI NO: 8953382 NR Description: DEAD BOX RNA helicase RH15 [Arabidopsis thaliana]
  misc_feature (1)..(427): Homolog of NCBI NO: 18416486 NR Description: DEAD/DEAH box helicase, putative [Arabidopsis
  misc_feature (1)..(427): Homolog of NCBI NO: 18416493 NR Description: DEAD/DEAH box helicase, putative [Arabidopsis
  misc_feature (1)..(427): Homolog of NCBI NO: 11358797 NR Description: RNA helicase RH15 [imported] - Arabidopsis

SEQ ID NO: 30128 - protein, 344 aa, Arabidopsis thaliana; identical to SEQ ID NO: 20811
  peptide (1)..(344): Ceres Seq. ID no. 13496817
  misc_feature (1)..(183): Pfam Name: DEAD/DEAH box helicase Pfam Description: DEAD/DEAH box helicase
  misc_feature (1)..(163): Homolog of NCBI NO: 21040373 NR Description: DEAD/H (Asp-Glu-Ala-Asp/His) box polypeptide 39
  misc_feature (1)..(342): Homolog of NCBI NO: 16758334 NR Description: nuclear RNA helicase, DECD variant of DEAD box
  misc_feature (1)..(342): Homolog of NCBI NO: 28278325 NR Description: Unknown (protein for MGC:55433) [Danio rerio]
  misc_feature (1)..(344): Homolog of NCBI NO: 30683509 NR Description: DEAD/DEAH box helicase, putative [Arabidopsis
  misc_feature (1)..(344): Homolog of NCBI NO: 34913862 NR Description: putative DEAD BOX RNA helicase
  misc_feature (1)..(341): Homolog of NCBI NO: 8953379 NR Description: DEAD BOX RNA helicase RH15-like protein
  misc_feature (1)..(341): Homolog of NCBI NO: 8953382 NR Description: DEAD BOX RNA helicase RH15 [Arabidopsis thaliana]
  misc_feature (1)..(344): Homolog of NCBI NO: 18416486 NR Description: DEAD/DEAH box helicase, putative [Arabidopsis
  misc_feature (1)..(344): Homolog of NCBI NO: 18416493 NR Description: DEAD/DEAH box helicase, putative [Arabidopsis
  misc_feature (1)..(344): Homolog of NCBI NO: 11358797 NR Description: RNA helicase RH15 [imported] - Arabidopsis

SEQ ID NO: 30129 - DNA, 888 bp, Arabidopsis thaliana
  misc_feature (1)..(888): Ceres Seq. ID no. 12488396
  misc_feature: MA Experiment ID: 108435 Result: Down-regulated in Transcription
  misc_feature: MA Experiment 108435 PARAMETER Experiment Name: At_stm_Mutants_cDNA_P Parameter: Plant Line Value: wt Landsburg vs stm
  misc_feature: MA Experiment 108435 PARAMETER Experiment Name: At_stm_Mutants_cDNA_P Parameter: Tissue Value: Shoot Apical Meristem Region
  misc_feature: MA Experiment ID: 108461 Result: Up-regulated in Transcription
  misc_feature: MA Experiment 108461 PARAMETER Experiment Name: At_Germinating_Seeds_cDNA_P Parameter: Age (day) Value: 1 vs. 0
  misc_feature: MA Experiment 108461 PARAMETER Experiment Name: At_Germinating_Seeds_cDNA_P Parameter: Tissue Value: Germinating Seeds
  misc_feature: MA Experiment ID: 108462 Result: Up-regulated in Transcription
  misc_feature: MA Experiment 108462 PARAMETER Experiment Name: At_Germinating_Seeds_cDNA_P Parameter: Age (day) Value: 2 vs. 0
  misc_feature: MA Experiment 108462 PARAMETER Experiment Name: At_Germinating_Seeds_cDNA_P Parameter: Tissue Value: Germinating Seeds
  misc_feature: MA Experiment ID: 108463 Result: Up-regulated in Transcription
  misc_feature: MA Experiment 108463 PARAMETER Experiment Name: At_Germinating_Seeds_cDNA_P Parameter: Age (day) Value: 3 vs. 0
  misc_feature: MA Experiment 108463 PARAMETER Experiment Name: At_Germinating_Seeds_cDNA_P Parameter: Tissue Value: Germinating Seeds
  misc_feature: MA Experiment ID: 108464 Result: Up-regulated in Transcription
  misc_feature: MA Experiment 108464 PARAMETER Experiment Name: At_Germinating_Seeds_cDNA_P Parameter: Age (day) Value: 4 vs. 0
  misc_feature: MA Experiment 108464 PARAMETER Experiment Name: At_Germinating_Seeds_cDNA_P Parameter: Tissue Value: Germinating Seeds
  misc_feature: MA Experiment ID: 108579 Result: Down-regulated in Transcription
  misc_feature: MA Experiment 108579 PARAMETER Experiment Name: At_4deg_Cold_cDNA_P Parameter: Temperature (deg C) Value: 4 vs. 22
  misc_feature: MA Experiment 108579 PARAMETER Experiment Name: At_4deg_Cold_cDNA_P Parameter: Timepoint (hr) Value: 6
  misc_feature: MA Experiment 108579 PARAMETER Experiment Name: At_4deg_Cold_cDNA_P Parameter: Tissue Value: Aerial
  misc_feature: MA Experiment ID: 108595 Result: Down-regulated in Transcription
  misc_feature: MA Experiment 108595 PARAMETER Experiment Name: At_Ler-pi_Ovule_cDNA_P Parameter: Plant Line Value: null
  misc_feature: MA Experiment ID: 20000180 Result: Up-regulated in Transcription
  misc_feature: MA Experiment 20000180 PARAMETER Experiment Name: At_Germinating_Seeds_P Parameter: Age (hr) Value: 24 vs. 0
  misc_feature: MA Experiment 20000180 PARAMETER Experiment Name: At_Germinating_Seeds_P Parameter: Tissue Value: Germinating Seeds
  misc_feature: MA Experiment ID: 20000184 Result: Down-regulated in Transcription
  misc_feature: MA Experiment 20000184 PARAMETER Experiment Name: At_Shoots__P Parameter: Age (day) Value: 7
  misc_feature: MA Experiment 20000184 PARAMETER Experiment Name: At_Shoots__P Parameter: Tissue Value: Shoots vs. Whole Plant
  misc_feature: MA Experiment ID: 20000794 Result: Up-regulated in Transcription
  misc_feature: MA Experiment 20000794 PARAMETER Experiment Name: At_Petals_P Parameter: Age (day) Value: 23-25 days
  misc_feature: MA Experiment 20000794 PARAMETER Experiment Name: At_Petals_P Parameter: Plant Line Value: WS
  misc_feature: MA Experiment 20000794 PARAMETER Experiment Name: At_Petals_P Parameter: Tissue Value: Petals vs. Whole plant
attgttcttgaacatctccgaagctaactccgaacatcaaaactgtatcttcttctcctcctcctctggcccttttcacaaagggacaaagagtttttgttgtcagtaacttcaagctctaagctatggctgtcaccaagatttatattgtgtactattccttgcacggccacgtcgagacaatggcacgagaggtacttcggggagtaaactctgttccagacgtggaagcaacactttggcaagtgccagagacattaccggagaaaatattggagaaagtgaaggccgttccaagaccggacgatgtgccggatattcgaccagaacaactggcggaagccgacggattcatgtttggctttccttctaggtttggagtgatggcatcacaggtcatgactttctttgacaatacaaatgatctctggactacacaggctctcgctgggaaacctgcaggaatcttctggagtacgggtttccacggtggaggccaagaactaactgcgttgacggcagtgacaaaactggctcatcacgggatgatatttgtaccggtaggatacacattcggtaaaagtatgtacgagatgggagaggtgaaaggtggttcgccttatggctcagggacttatgcagctgatggatcacgcgagccaacagagctggagattcagcaggcaaattaccatggcaagtactttgcaggaatagccaagaaactcaagaaacggtctcctgtctaaattctaaaccatatcaactctgtgtttcctatactaaacaatctgtaaatgtaaaggtgaacactgaaaataagatcgacatatacagagcaaaacaccggtgtgtaagctaatggtcaataaatcacattttccattg

SEQ ID NO: 30130 - protein, 207 aa, Arabidopsis thaliana
  peptide (1)..(207): Ceres Seq. ID no. 12488397
  misc_feature (5)..(201): Homolog of NCBI NO: 15234512 NR Description: quinone reductase family
  misc_feature (4)..(202): Homolog of NCBI NO: 7445353 NR Description: hypothetical protein M4I22.80 - Arabidopsis
  misc_feature (4)..(205): Homolog of NCBI NO: 12484052 NR Description: quinone-oxidoreductase QR2 [Triphysaria
  misc_feature (5)..(202): Homolog of NCBI NO: 38636776 NR Description: putative quinone-oxidoreductase QR2
  misc_feature (4)..(202): Homolog of NCBI NO: 15239652 NR Description: quinone reductase, putative; protein id:
  misc_feature (4)..(202): Homolog of NCBI NO: 30687535 NR Description: quinone reductase family [Arabidopsis thaliana]
  misc_feature (1)..(202): Homolog of NCBI NO: 34910128 NR Description: putative 1,4-benzoquinone reductase
  misc_feature (4)..(202): Homolog of NCBI NO: 5031275 NR Description: unknown [Prunus armeniaca]
  misc_feature (1)..(202): Homolog of NCBI NO: 21068664 NR Description: putative quinone oxidoreductase [Cicer arietinum]
  misc_feature (1)..(207): Homolog of NCBI NO: 22327957 NR Description: quinone reductase family
MAVTKIYIVYYSLHGHVETMAREVLRGVNSVPDVEATLWQVPETLPEKILEKVKAVPRPDDVPDIRPEQLAEADGFMFGFPSRFGVMASQVMTFFDNTNDLWTTQALAGKPAGIFWSTGFHGGGQELTALTAVTKLAHHGMIFVPVGYTFGKSMYEMGEVKGGSPYGSGTYAADGSREPTELEIQQANYHGKYFAGIAKKLKKRSPV

SEQ ID NO: 30131 - protein, 188 aa, Arabidopsis thaliana
  peptide (1)..(188): Ceres Seq. ID no. 12488398
  misc_feature (1)..(182): Homolog of NCBI NO: 15234512 NR Description: quinone reductase family
  misc_feature (1)..(183): Homolog of NCBI NO: 7445353 NR Description: hypothetical protein M4I22.80 - Arabidopsis
  misc_feature (1)..(186): Homolog of NCBI NO: 12484052 NR Description: quinone-oxidoreductase QR2 [Triphysaria
  misc_feature (1)..(183): Homolog of NCBI NO: 38636776 NR Description: putative quinone-oxidoreductase QR2
  misc_feature (1)..(183): Homolog of NCBI NO: 15239652 NR Description: quinone reductase, putative; protein id:
  misc_feature (1)..(183): Homolog of NCBI NO: 30687535 NR Description: quinone reductase family [Arabidopsis thaliana]
  misc_feature (1)..(183): Homolog of NCBI NO: 34910128 NR Description: putative 1,4-benzoquinone reductase
  misc_feature (1)..(183): Homolog of NCBI NO: 5031275 NR Description: unknown [Prunus armeniaca]
  misc_feature (1)..(183): Homolog of NCBI NO: 21068664 NR Description: putative quinone oxidoreductase [Cicer arietinum]
  misc_feature (1)..(188): Homolog of NCBI NO: 22327957 NR Description: quinone reductase family
MAREVLRGVNSVPDVEATLWQVPETLPEKILEKVKAVPRPDDVPDIRPEQLAEADGFMFGFPSRFGVMASQVMTFFDNTNDLWTTQALAGKPAGIFWSTGFHGGGQELTALTAVTKLAHHGMIFVPVGYTFGKSMYEMGEVKGGSPYGSGTYAADGSREPTELEIQQANYHGKYFAGIAKKLKKRSPV

SEQ ID NO: 30132 - protein, 131 aa, Arabidopsis thaliana
  peptide (1)..(131): Ceres Seq. ID no. 12488399
  misc_feature (1)..(125): Homolog of NCBI NO: 15234512 NR Description: quinone reductase family
  misc_feature (1)..(126): Homolog of NCBI NO: 7445353 NR Description: hypothetical protein M4I22.80 - Arabidopsis
  misc_feature (1)..(129): Homolog of NCBI NO: 12484052 NR Description: quinone-oxidoreductase QR2 [Triphysaria
  misc_feature (1)..(126): Homolog of NCBI NO: 38636776 NR Description: putative quinone-oxidoreductase QR2
  misc_feature (1)..(126): Homolog of NCBI NO: 15239652 NR Description: quinone reductase, putative; protein id:
  misc_feature (1)..(126): Homolog of NCBI NO: 30687535 NR Description: quinone reductase family [Arabidopsis thaliana]
  misc_feature (1)..(126): Homolog of NCBI NO: 34910128 NR Description: putative 1,4-benzoquinone reductase
  misc_feature (1)..(126): Homolog of NCBI NO: 5031275 NR Description: unknown [Prunus armeniaca]
  misc_feature (1)..(126): Homolog of NCBI NO: 21068664 NR Description: putative quinone oxidoreductase [Cicer arietinum]
  misc_feature (1)..(131): Homolog of NCBI NO: 22327957 NR Description: quinone reductase family
MFGFPSRFGVMASQVMTFFDNTNDLWTTQALAGKPAGIFWSTGFHGGGQELTALTAVTKLAHHGMIFVPVGYTFGKSMYEMGEVKGGSPYGSGTYAADGSREPTELEIQQANYHGKYFAGIAKKLKKRSPV

SEQ ID NO: 30133 - DNA, 843 bp, Arabidopsis thaliana
  misc_feature (1)..(843): Ceres Seq. ID no. 13580431
  misc_feature: MA Experiment ID: 108668 Result: Up-regulated in Transcription
  misc_feature: MA Experiment 108668 PARAMETER Experiment Name: At_2mM_SA_cDNA_P Parameter: Plant Line Value: WS
  misc_feature: MA Experiment 108668 PARAMETER Experiment Name: At_2mM_SA_cDNA_P Parameter: Timepoint (hr) Value: 6
  misc_feature: MA Experiment 108668 PARAMETER Experiment Name: At_2mM_SA_cDNA_P Parameter: Treatment Value: 2mM SA vs. No Treatment
  misc_feature: MA Experiment ID: 20000069 Result: Up-regulated in Transcription
  misc_feature: MA Experiment 20000069 PARAMETER Experiment Name: At_100uM_ABA_Mutants_cDNA_P Parameter: Plant Line Value: CS23
  misc_feature: MA Experiment 20000069 PARAMETER Experiment Name: At_100uM_ABA_Mutants_cDNA_P Parameter: Timepoint (hr) Value: 6
  misc_feature: MA Experiment 20000069 PARAMETER Experiment Name: At_100uM_ABA_Mutants_cDNA_P Parameter: Tissue Value: Aerial
  misc_feature: MA Experiment 20000069 PARAMETER Experiment Name: At_100uM_ABA_Mutants_cDNA_P Parameter: Treatment Value: 100uM ABA vs. No Treatment
  misc_feature: MA Experiment ID: 20000071 Result: Up-regulated in Transcription
  misc_feature: MA Experiment 20000071 PARAMETER Experiment Name: At_100uM_ABA_Mutants_cDNA_P Parameter: Plant Line Value: CS8104
  misc_feature: MA Experiment 20000071 PARAMETER Experiment Name: At_100uM_ABA_Mutants_cDNA_P Parameter: Timepoint (hr) Value: 6
  misc_feature: MA Experiment 20000071 PARAMETER Experiment Name: At_100uM_ABA_Mutants_cDNA_P Parameter: Tissue Value: Aerial
  misc_feature: MA Experiment 20000071 PARAMETER Experiment Name: At_100uM_ABA_Mutants_cDNA_P Parameter: Treatment Value: 100uM ABA vs. No Treatment
  misc_feature: MA Experiment ID: 20000089 Result: Up-regulated in Transcription
  misc_feature: MA Experiment ID: 20000117 Result: Up-regulated in Transcription
  misc_feature: MA Experiment 20000117 PARAMETER Experiment Name: At_100uM_ABA_Mutants_cDNA_P Parameter: Plant Line Value: Columbia
  misc_feature: MA Experiment 20000117 PARAMETER Experiment Name: At_100uM_ABA_Mutants_cDNA_P Parameter: Timepoint (hr) Value: 6
  misc_feature: MA Experiment 20000117 PARAMETER Experiment Name: At_100uM_ABA_Mutants_cDNA_P Parameter: Tissue Value: Aerial
  misc_feature: MA Experiment 20000117 PARAMETER Experiment Name: At_100uM_ABA_Mutants_cDNA_P Parameter: Treatment Value: 100uM ABA vs. No Treatment
  misc_feature: MA Experiment ID: 20000182 Result: Up-regulated in Transcription
  misc_feature: MA Experiment 20000182 PARAMETER Experiment Name: At_2mM_SA_P Parameter: Age (day) Value: 14
  misc_feature: MA Experiment 20000182 PARAMETER Experiment Name: At_2mM_SA_P Parameter: Organism Value: A. thaliana
  misc_feature: MA Experiment 20000182 PARAMETER Experiment Name: At_2mM_SA_P Parameter: Plant Line Value: WS
  misc_feature: MA Experiment 20000182 PARAMETER Experiment Name: At_2mM_SA_P Parameter: Timepoint (hr) Value: 6
  misc_feature: MA Experiment 20000182 PARAMETER Experiment Name: At_2mM_SA_P Parameter: Tissue Value: Aerial
  misc_feature: MA Experiment 20000182 PARAMETER Experiment Name: At_2mM_SA_P Parameter: Treatment Value: 2mM SA vs. No Treatment
  misc_feature: MA Experiment ID: 20000184 Result: Down-regulated in Transcription
  misc_feature: MA Experiment 20000184 PARAMETER Experiment Name: At_Shoots__P Parameter: Age (day) Value: 7
  misc_feature: MA Experiment 20000184 PARAMETER Experiment Name: At_Shoots__P Parameter: Tissue Value: Shoots vs. Whole Plant
  misc_feature: MA Experiment ID: 20000234 Result: Down-regulated in Transcription
  misc_feature: MA Experiment 20000234 PARAMETER Experiment Name: At_Siliques_P Parameter: Age (day) Value: 21
  misc_feature: MA Experiment 20000234 PARAMETER Experiment Name: At_Siliques_P Parameter: Organism Value: A. thaliana
  misc_feature: MA Experiment 20000234 PARAMETER Experiment Name: At_Siliques_P Parameter: Plant Line Value: WS
  misc_feature: MA Experiment 20000234 PARAMETER Experiment Name: At_Siliques_P Parameter: Tissue Value: Less Than 5mm Siliques vs. Whole Plant
  misc_feature: MA Experiment ID: 20001557 Result: Down-regulated in Transcription
  misc_feature: MA Experiment 20001557 PARAMETER Experiment Name: At_Drought_Soil_Dry_P Parameter: Age (day) Value: 27
  misc_feature: MA Experiment 20001557 PARAMETER Experiment Name: At_Drought_Soil_Dry_P Parameter: Organism Value: A. thaliana
  misc_feature: MA Experiment 20001557 PARAMETER Experiment Name: At_Drought_Soil_Dry_P Parameter: Plant Line Value: WS
  misc_feature: MA Experiment 20001557 PARAMETER Experiment Name: At_Drought_Soil_Dry_P Parameter: Post Timepoint (hr) Value: 3
  misc_feature: MA Experiment 20001557 PARAMETER Experiment Name: At_Drought_Soil_Dry_P Parameter: Post-Treatment Value: Re-Water vs. No Drought
  misc_feature: MA Experiment 20001557 PARAMETER Experiment Name: At_Drought_Soil_Dry_P Parameter: Timepoint (day) Value: 13
  misc_feature: MA Experiment 20001557 PARAMETER Experiment Name: At_Drought_Soil_Dry_P Parameter: Treatment Value: Drought vs. No Drought
aaaaacttgtgcgtgattcatcgtcacatcgccttgatcatggaaactcctatcgatgctccgaataaggacgaacatgaatgccctaggtggaagaaatcaactgtagtttttgtgttgggtggtcctggaagtggaaaaggtactcagtgtgctaatgttgtgaagcactttagctatacccattttagtgctggtgatcttctcagagcagaaattaagtccggttctgaatttggagccatgatccaaagtatgattgcagaggggagaatagtgccgtctgagatcacagtgaaacttttgtgtaaagctatggaggaaagtggtaatgataagttccttattgatggcttccctcgcaatgaagaaaatcgaaacgtattcgaaaatgttgctagaatcgagcctgcttttgttctattctttgattgtccagaagaagaactagaaagacgcattatgagcaggaaccagggaagagaagacgataatatagagaccataaagaagcgatttaaagtgtttgttgaatctaccctcccaattattagctactacgaatcgaaagggaaacttcgaaagatcaatgctgcaaaatccagcgaagaggttttcgaggctgtcagagttctatttgcatctgaaacttgacaagcatcaaggacttggattcaccgaacagaacaaaacagagactccaaagtcaatgatgtgccttgtcgtatacgtaactaagtttacagattcatgctttatttgtatatgtaattatctctacattttacatgttctcatcatacgatatagccaaactttcgtcgcaataaccatatttttagc

SEQ ID NO: 30134 - protein, 217 aa, Arabidopsis thaliana
  peptide (1)..(217): Ceres Seq. ID no. 13580432
  misc_feature (39)..(192): Pfam Name: Adenylate kinase Pfam Description: Adenylate kinase
  misc_feature (3)..(213): Homolog of NCBI NO: 28374307 NR Description: Similar to RIKEN cDNA 0610011D08 gene [Xenopus
  misc_feature (32)..(176): Homolog of NCBI NO: 5305496 NR Description: adenylate kinase [Ceratopteris richardii]
  misc_feature (25)..(214): Homolog of NCBI NO: 3913952 NR Description: ADENYLATE KINASE (ATP-AMP TRANSPHOSPHORYLASE)
  misc_feature (29)..(217): Homolog of NCBI NO: 34897826 NR Description: putative UMP/CMP kinase [Oryza sativa (japonica
  misc_feature (32)..(214): Homolog of NCBI NO: 6683811 NR Description: UMP/CMP kinase a [Oryza sativa]
  misc_feature (32)..(214): Homolog of NCBI NO: 6683813 NR Description: UMP/CMP kinase b [Oryza sativa]
  misc_feature (32)..(216): Homolog of NCBI NO: 30690246 NR Description: predicted protein [Arabidopsis thaliana]
  misc_feature (32)..(216): Homolog of NCBI NO: 30690243 NR Description: predicted protein [Arabidopsis thaliana]
  misc_feature (14)..(217): Homolog of NCBI NO: 11260827 NR Description: URIDYLATE KINASE-like protein - Arabidopsis
  misc_feature (14)..(217): Homolog of NCBI NO: 18411518 NR Description: URIDYLATE KINASE-related protein [Arabidopsis
KNLCVIHRHIALIMETPIDAPNKDEHECPRWKKSTVVFVLGGPGSGKGTQCANVVKHFSYTHFSAGDLLRAEIKSGSEFGAMIQSMIAEGRIVPSEITVKLLCKAMEESGNDKFLIDGFPRNEENRNVFENVARIEPAFVLFFDCPEEELERRIMSRNQGREDDNIETIKKRFKVFVESTLPIISYYESKGKLRKINAAKSSEEVFEAVRVLFASET

SEQ ID NO: 30135 - protein, 204 aa, Arabidopsis thaliana
  peptide (1)..(204): Ceres Seq. ID no. 13580433
  misc_feature (26)..(179): Pfam Name: Adenylate kinase Pfam Description: Adenylate kinase
  misc_feature (1)..(200): Homolog of NCBI NO: 28374307 NR Description: Similar to RIKEN cDNA 0610011D08 gene [Xenopus
  misc_feature (19)..(163): Homolog of NCBI NO: 5305496 NR Description: adenylate kinase [Ceratopteris richardii]
  misc_feature (12)..(201): Homolog of NCBI NO: 3913952 NR Description: ADENYLATE KINASE (ATP-AMP TRANSPHOSPHORYLASE)
  misc_feature (16)..(204): Homolog of NCBI NO: 34897826 NR Description: putative UMP/CMP kinase [Oryza sativa (japonica
  misc_feature (19)..(201): Homolog of NCBI NO: 6683811 NR Description: UMP/CMP kinase a [Oryza sativa]
  misc_feature (19)..(201): Homolog of NCBI NO: 6683813 NR Description: UMP/CMP kinase b [Oryza sativa]
  misc_feature (19)..(203): Homolog of NCBI NO: 30690246 NR Description: predicted protein [Arabidopsis thaliana]
  misc_feature (19)..(203): Homolog of NCBI NO: 30690243 NR Description: predicted protein [Arabidopsis thaliana]
  misc_feature (1)..(204): Homolog of NCBI NO: 11260827 NR Description: URIDYLATE KINASE-like protein - Arabidopsis
  misc_feature (1)..(204): Homolog of NCBI NO: 18411518 NR Description: URIDYLATE KINASE-related protein [Arabidopsis
METPIDAPNKDEHECPRWKKSTVVFVLGGPGSGKGTQCANVVKHFSYTHFSAGDLLRAEIKSGSEFGAMIQSMIAEGRIVPSEITVKLLCKAMEESGNDKFLIDGFPRNEENRNVFENVARIEPAFVLFFDCPEEELERRIMSRNQGREDDNIETIKKRFKVFVESTLPIISYYESKGKLRKINAAKSSEEVFEAVRVLFASET

SEQ ID NO: 30136 - protein, 136 aa, Arabidopsis thaliana
  peptide (1)..(136): Ceres Seq. ID no. 13580434
  misc_feature (1)..(111): Pfam Name: Adenylate kinase Pfam Description: Adenylate kinase
  misc_feature (1)..(132): Homolog of NCBI NO: 28374307 NR Description: Similar to RIKEN cDNA 0610011D08 gene [Xenopus
  misc_feature (1)..(95): Homolog of NCBI NO: 5305496 NR Description: adenylate kinase [Ceratopteris richardii]
  misc_feature (1)..(133): Homolog of NCBI NO: 3913952 NR Description: ADENYLATE KINASE (ATP-AMP TRANSPHOSPHORYLASE)
  misc_feature (1)..(136): Homolog of NCBI NO: 34897826 NR Description: putative UMP/CMP kinase [Oryza sativa (japonica
  misc_feature (1)..(133): Homolog of NCBI NO: 6683811 NR Description: UMP/CMP kinase a [Oryza sativa]
  misc_feature (1)..(133): Homolog of NCBI NO: 6683813 NR Description: UMP/CMP kinase b [Oryza sativa]
  misc_feature (1)..(135): Homolog of NCBI NO: 30690246 NR Description: predicted protein [Arabidopsis thaliana]
  misc_feature (1)..(135): Homolog of NCBI NO: 30690243 NR Description: predicted protein [Arabidopsis thaliana]
  misc_feature (1)..(136): Homolog of NCBI NO: 11260827 NR Description: URIDYLATE KINASE-like protein - Arabidopsis
  misc_feature (1)..(136): Homolog of NCBI NO: 18411518 NR Description: URIDYLATE KINASE-related protein [Arabidopsis
MIQSMIAEGRIVPSEITVKLLCKAMEESGNDKFLIDGFPRNEENRNVFENVARIEPAFVLFFDCPEEELERRIMSRNQGREDDNIETIKKRFKVFVESTLPIISYYESKGKLRKINAAKSSEEVFEAVRVLFASET

SEQ ID NO: 30137 - DNA, 649 bp, Arabidopsis thaliana
  misc_feature (1)..(649): Ceres Seq. ID no. 12324000
  misc_feature: MA Experiment ID: 108462 Result: Up-regulated in Transcription
  misc_feature: MA Experiment 108462 PARAMETER Experiment Name: At_Germinating_Seeds_cDNA_P Parameter: Age (day) Value: 2 vs. 0
  misc_feature: MA Experiment 108462 PARAMETER Experiment Name: At_Germinating_Seeds_cDNA_P Parameter: Tissue Value: Germinating Seeds
  misc_feature: MA Experiment ID: 108463 Result: Up-regulated in Transcription
  misc_feature: MA Experiment 108463 PARAMETER Experiment Name: At_Germinating_Seeds_cDNA_P Parameter: Age (day) Value: 3 vs. 0
  misc_feature: MA Experiment 108463 PARAMETER Experiment Name: At_Germinating_Seeds_cDNA_P Parameter: Tissue Value: Germinating Seeds
  misc_feature: MA Experiment ID: 108464 Result: Up-regulated in Transcription
  misc_feature: MA Experiment 108464 PARAMETER Experiment Name: At_Germinating_Seeds_cDNA_P Parameter: Age (day) Value: 4 vs. 0
  misc_feature: MA Experiment 108464 PARAMETER Experiment Name: At_Germinating_Seeds_cDNA_P Parameter: Tissue Value: Germinating Seeds
  misc_feature: MA Experiment ID: 108576 Result: Up-regulated in Transcription
  misc_feature: MA Experiment 108576 PARAMETER Experiment Name: At_42deg_Heat_cDNA_P Parameter: Temperature (deg C) Value: 42 vs. 22
  misc_feature: MA Experiment 108576 PARAMETER Experiment Name: At_42deg_Heat_cDNA_P Parameter: Timepoint (hr) Value: 1
  misc_feature: MA Experiment 108576 PARAMETER Experiment Name: At_42deg_Heat_cDNA_P Parameter: Tissue Value: Aerial
  misc_feature: MA Experiment ID: 108579 Result: Down-regulated in Transcription
  misc_feature: MA Experiment 108579 PARAMETER Experiment Name: At_4deg_Cold_cDNA_P Parameter: Temperature (deg C) Value: 4 vs. 22
  misc_feature: MA Experiment 108579 PARAMETER Experiment Name: At_4deg_Cold_cDNA_P Parameter: Timepoint (hr) Value: 6
  misc_feature: MA Experiment 108579 PARAMETER Experiment Name: At_4deg_Cold_cDNA_P Parameter: Tissue Value: Aerial
  misc_feature: MA Experiment ID: 20000111 Result: Up-regulated in Transcription
  misc_feature: MA Experiment 20000111 PARAMETER Experiment Name: At_42deg_Heat_cDNA_P Parameter: Temperature (deg C) Value: 42 vs. 22
  misc_feature: MA Experiment 20000111 PARAMETER Experiment Name: At_42deg_Heat_cDNA_P Parameter: Timepoint (hr) Value: 6
  misc_feature: MA Experiment 20000111 PARAMETER Experiment Name: At_42deg_Heat_cDNA_P Parameter: Tissue Value: Aerial
  misc_feature: MA Experiment ID: 20000112 Result: Up-regulated in Transcription
  misc_feature: MA Experiment 20000112 PARAMETER Experiment Name: At_42deg_Heat_cDNA_P Parameter: Temperature (deg C) Value: 42 vs. 22
  misc_feature: MA Experiment 20000112 PARAMETER Experiment Name: At_42deg_Heat_cDNA_P Parameter: Timepoint (hr) Value: 2
  misc_feature: MA Experiment 20000112 PARAMETER Experiment Name: At_42deg_Heat_cDNA_P Parameter: Tissue Value: Aerial
  misc_feature: MA Experiment ID: 20000113 Result: Up-regulated in Transcription
  misc_feature: MA Experiment 20000113 PARAMETER Experiment Name: At_42deg_Heat_cDNA_P Parameter: Temperature (deg C) Value: 42 vs. 22
  misc_feature: MA Experiment 20000113 PARAMETER Experiment Name: At_42deg_Heat_cDNA_P Parameter: Timepoint (hr) Value: 8
  misc_feature: MA Experiment 20000113 PARAMETER Experiment Name: At_42deg_Heat_cDNA_P Parameter: Tissue Value: Aerial
  misc_feature: MA Experiment ID: 20000144 Result: Up-regulated in Transcription
  misc_feature: MA Experiment 20000144 PARAMETER Experiment Name: At_42deg_Heat_cDNA_P Parameter: Temperature (deg C) Value: 42 vs. 22
  misc_feature: MA Experiment 20000144 PARAMETER Experiment Name: At_42deg_Heat_cDNA_P Parameter: Timepoint (hr) Value: 1
  misc_feature: MA Experiment 20000144 PARAMETER Experiment Name: At_42deg_Heat_cDNA_P Parameter: Tissue Value: Aerial
  misc_feature: MA Experiment ID: 20000171 Result: Up-regulated in Transcription
  misc_feature: MA Experiment 20000171 PARAMETER Experiment Name: At_42deg_Heat_P Parameter: Age (day) Value: 14
  misc_feature: MA Experiment 20000171 PARAMETER Experiment Name: At_42deg_Heat_P Parameter: Organism Value: A. thaliana
  misc_feature: MA Experiment 20000171 PARAMETER Experiment Name: At_42deg_Heat_P Parameter: Plant Line Value: WS
  misc_feature: MA Experiment 20000171 PARAMETER Experiment Name: At_42deg_Heat_P Parameter: Temperature (deg C) Value: 42 vs. 22
  misc_feature: MA Experiment 20000171 PARAMETER Experiment Name: At_42deg_Heat_P Parameter: Timepoint (hr) Value: 1
  misc_feature: MA Experiment 20000171 PARAMETER Experiment Name: At_42deg_Heat_P Parameter: Tissue Value: Aerial
  misc_feature: MA Experiment ID: 20000179 Result: Up-regulated in Transcription
  misc_feature: MA Experiment 20000179 PARAMETER Experiment Name: At_Germinating_Seeds_P Parameter: Age (hr) Value: 6 vs. 0
  misc_feature: MA Experiment 20000179 PARAMETER Experiment Name: At_Germinating_Seeds_P Parameter: Tissue Value: Germinating Seeds
  misc_feature: MA Experiment ID: 20000180 Result: Up-regulated in Transcription
  misc_feature: MA Experiment 20000180 PARAMETER Experiment Name: At_Germinating_Seeds_P Parameter: Age (hr) Value: 24 vs. 0
  misc_feature: MA Experiment 20000180 PARAMETER Experiment Name: At_Germinating_Seeds_P Parameter: Tissue Value: Germinating Seeds
  misc_feature: MA Experiment ID: 20000224 Result: Down-regulated in Transcription
  misc_feature: MA Experiment ID: 20000264 Result: Down-regulated in Transcription
  misc_feature: MA Experiment 20000264 PARAMETER Experiment Name: At_Open_Flower_P Parameter: Age (day) Value: 21
  misc_feature: MA Experiment 20000264 PARAMETER Experiment Name: At_Open_Flower_P Parameter: Plant Line Value: WS
  misc_feature: MA Experiment 20000264 PARAMETER Experiment Name: At_Open_Flower_P Parameter: Tissue Value: Open Flower vs. Whole Plant
  misc_feature: MA Experiment ID: 20000265 Result: Down-regulated in Transcription
  misc_feature: MA Experiment 20000265 PARAMETER Experiment Name: At_Open_Flower_P Parameter: Age (day) Value: 21
  misc_feature: MA Experiment 20000265 PARAMETER Experiment Name: At_Open_Flower_P Parameter: Plant Line Value: WS
  misc_feature: MA Experiment 20000265 PARAMETER Experiment Name: At_Open_Flower_P Parameter: Tissue Value: Closed Flower vs. Whole Plant
  misc_feature: MA Experiment ID: 20000286 Result: Down-regulated in Transcription
  misc_feature: MA Experiment 20000286 PARAMETER Experiment Name: At_Open_Flower_P Parameter: Age (day) Value: 21
  misc_feature: MA Experiment 20000286 PARAMETER Experiment Name: At_Open_Flower_P Parameter: Plant Line Value: WS
  misc_feature: MA Experiment 20000286 PARAMETER Experiment Name: At_Open_Flower_P Parameter: Tissue Value: Half Open vs. Whole Plant
  misc_feature: MA Experiment ID: 20001450 Result: Up-regulated in Transcription
  misc_feature: MA Experiment 20001450 PARAMETER Experiment Name: At_Far-red-induction_P Parameter: Age (day) Value: 7
  misc_feature: MA Experiment 20001450 PARAMETER Experiment Name: At_Far-red-induction_P Parameter: Light Value: Far-red vs. White
  misc_feature: MA Experiment 20001450 PARAMETER Experiment Name: At_Far-red-induction_P Parameter: Organism Value: A. thaliana
  misc_feature: MA Experiment 20001450 PARAMETER Experiment Name: At_Far-red-induction_P Parameter: Plant Line Value: Columbia
  misc_feature: MA Experiment 20001450 PARAMETER Experiment Name: At_Far-red-induction_P Parameter: Timepoint (hr) Value: 8
  misc_feature: MA Experiment 20001450 PARAMETER Experiment Name: At_Far-red-induction_P Parameter: Tissue Value: Whole Plant
  misc_feature: MA Experiment ID: 20001451 Result: Up-regulated in Transcription
  misc_feature: MA Experiment 20001451 PARAMETER Experiment Name: At_Far-red-induction_P Parameter: Age (day) Value: 7
  misc_feature: MA Experiment 20001451 PARAMETER Experiment Name: At_Far-red-induction_P Parameter: Light Value: Far-red vs. White
  misc_feature: MA Experiment 20001451 PARAMETER Experiment Name: At_Far-red-induction_P Parameter: Organism Value: A. thaliana
  misc_feature: MA Experiment 20001451 PARAMETER Experiment Name: At_Far-red-induction_P Parameter: Plant Line Value: Columbia
  misc_feature: MA Experiment 20001451 PARAMETER Experiment Name: At_Far-red-induction_P Parameter: Timepoint (hr) Value: 24
  misc_feature: MA Experiment 20001451 PARAMETER Experiment Name: At_Far-red-induction_P Parameter: Tissue Value: Whole Plant
  misc_feature: MA Experiment ID: 20001557 Result: Down-regulated in Transcription
  misc_feature: MA Experiment 20001557 PARAMETER Experiment Name: At_Drought_Soil_Dry_P Parameter: Age (day) Value: 27
  misc_feature: MA Experiment 20001557 PARAMETER Experiment Name: At_Drought_Soil_Dry_P Parameter: Organism Value: A. thaliana
  misc_feature: MA Experiment 20001557 PARAMETER Experiment Name: At_Drought_Soil_Dry_P Parameter: Plant Line Value: WS
  misc_feature: MA Experiment 20001557 PARAMETER Experiment Name: At_Drought_Soil_Dry_P Parameter: Post Timepoint (hr) Value: 3
  misc_feature: MA Experiment 20001557 PARAMETER Experiment Name: At_Drought_Soil_Dry_P Parameter: Post-Treatment Value: Re-Water vs. No Drought
  misc_feature: MA Experiment 20001557 PARAMETER Experiment Name: At_Drought_Soil_Dry_P Parameter: Timepoint (day) Value: 13
  misc_feature: MA Experiment 20001557 PARAMETER Experiment Name: At_Drought_Soil_Dry_P Parameter: Treatment Value: Drought vs. No Drought
  misc_feature: MA Experiment ID: 20001558 Result: Down-regulated in Transcription
  misc_feature: MA Experiment 20001558 PARAMETER Experiment Name: At_Drought_Soil_Dry_P Parameter: Age (day) Value: 27
  misc_feature: MA Experiment 20001558 PARAMETER Experiment Name: At_Drought_Soil_Dry_P Parameter: Organism Value: A. thaliana
  misc_feature: MA Experiment 20001558 PARAMETER Experiment Name: At_Drought_Soil_Dry_P Parameter: Plant Line Value: WS
  misc_feature: MA Experiment 20001558 PARAMETER Experiment Name: At_Drought_Soil_Dry_P Parameter: Post Timepoint (hr) Value: 6
  misc_feature: MA Experiment 20001558 PARAMETER Experiment Name: At_Drought_Soil_Dry_P Parameter: Post-Treatment Value: Re-Water vs. No Drought
  misc_feature: MA Experiment 20001558 PARAMETER Experiment Name: At_Drought_Soil_Dry_P Parameter: Timepoint (day) Value: 13
  misc_feature: MA Experiment 20001558 PARAMETER Experiment Name: At_Drought_Soil_Dry_P Parameter: Treatment Value: Drought vs. No Drought
tttagttgtttttccgatcgatctgcgagtcgagtagtttttttatttgccggcgccgggagagatcctttgatctttttccgatggaggagcaattcggcgggagcgatgagagatggaaaggatcattggagaatataacggagatggcatcgaatctcgattcgcttcagaaacttctcctcaagaaagcagtcttcgttgaagaagacactttctctagagcttctctcgtctccgagcaagcccgaacaatcaaggttcttgagcaaagagtacaaacactagaaagagaactagatgctgccattacagctgctgctcatgctcggtctgagaaacgccaagctgagtcctctcaaaaggctgctgaatcacgtgcccaagatgtcacaaaagagcttgaaaacaccacaaaggttttcaagctgcatatggaagagcttcgaggaatgcaagaacagatatccaaacgcgataacgagatcaaactcttagaagctataatccaaacgctcggcggcaaagagcggttgggaaaaagcgacgtgaatggatgatgatgatgcgttttttcacttgtaaaggtttgtactcctgagtttgtggagatgtatcacttcgaagataaatgtatttttgtctgtcc

SEQ ID NO: 30138 - protein, 158 aa, Arabidopsis thaliana
  peptide (1)..(158): Ceres Seq. ID no. 12324001
  misc_feature (1)..(158): Homolog of NCBI NO: 21553794 NR Description: unknown [Arabidopsis thaliana]
  misc_feature (1)..(158): Homolog of NCBI NO: 15237639 NR Description: putative protein
MEEQFGGSDERWKGSLENITEMASNLDSLQKLLLKKAVFVEEDTFSRASLVSEQARTIKVLEQRVQTLERELDAAITAAAHARSEKRQAESSQKAAESRAQDVTKELENTTKVFKLHMEELRGMQEQISKRDNEIKLLEAIIQTLGGKERLGKSDVNG

SEQ ID NO: 30139 - protein, 137 aa, Arabidopsis thaliana
  peptide (1)..(137): Ceres Seq. ID no. 12324002
  misc_feature (1)..(137): Homolog of NCBI NO: 21553794 NR Description: unknown [Arabidopsis thaliana]
  misc_feature (1)..(137): Homolog of NCBI NO: 15237639 NR Description: putative protein
MASNLDSLQKLLLKKAVFVEEDTFSRASLVSEQARTIKVLEQRVQTLERELDAAITAAAHARSEKRQAESSQKAAESRAQDVTKELENTTKVFKLHMEELRGMQEQISKRDNEIKLLEAIIQTLGGKERLGKSDVNG

SEQ ID NO: 30140 - DNA, 825 bp, Arabidopsis thaliana
  misc_feature (1)..(825): Ceres Seq. ID no. 12322128
  misc_feature: MA Experiment ID: 20000171 Result: Up-regulated in Transcription
  misc_feature: MA Experiment 20000171 PARAMETER Experiment Name: At_42deg_Heat_P Parameter: Age (day) Value: 14
  misc_feature: MA Experiment 20000171 PARAMETER Experiment Name: At_42deg_Heat_P Parameter: Organism Value: A. thaliana
  misc_feature: MA Experiment 20000171 PARAMETER Experiment Name: At_42deg_Heat_P Parameter: Plant Line Value: WS
  misc_feature: MA Experiment 20000171 PARAMETER Experiment Name: At_42deg_Heat_P Parameter: Temperature (deg C) Value: 42 vs. 22
  misc_feature: MA Experiment 20000171 PARAMETER Experiment Name: At_42deg_Heat_P Parameter: Timepoint (hr) Value: 1
  misc_feature: MA Experiment 20000171 PARAMETER Experiment Name: At_42deg_Heat_P Parameter: Tissue Value: Aerial
aacaaagttgtgtctctctgaagtctgaaccaaaaagataagacgaaaaggagatcaatggaggaagaatacataagagtaataagcataacaacaataggagtaatctcatggggtctcatattcatccttgtaagacgaatcttctcaagctactcgttcgactttagcactcgtatagtctcaacgcttcacgcaacaatcgctgtcactttagcaactctctcgattcaagattggtcttgtcctgtttgtcccattgcttctacatcgtctctccggcagatggaaacgttggctttttcattgtcttacatgatctacgatctcatttgtagccactttgatcaagtccttagcattgataatgcggttcatcattctgtttgcattcttggttttgtagctggacttttctaccaaaagtgtggatccgagatggtggcagcaatatggataacagagatctcaagtccgtttcttcacctcagggagattcttaaagagattggttatagagacaccgacctaaatcttgcagccgatgtgtgttttgcaacaattttctcgttggccagaatggtgggtggaccttacctagtttacgtaacaatatcagccgataatcccattctcatcaaggcaatggcgttggggttacaacttgtgagcgcattctggttctataaaatcctcaaaatgatgagatacaaatttatcaaaagatcaatgtccaacaaaaaatcgacttagttgaaattgcaaaaactctatcatgtaacatttgactcatccttttctatatgtaagttaaatgtgaggaat

SEQ ID NO: 30141 - protein, 231 aa, Arabidopsis thaliana
  peptide (1)..(231): Ceres Seq. ID no. 12322129
  misc_feature (34)..(223): Homolog of NCBI NO: 27661880 NR Description: hypothetical protein XP_236191 [Rattus norvegicus]
  misc_feature (19)..(223): Homolog of NCBI NO: 34535216 NR Description: unnamed protein product [Homo sapiens]
  misc_feature (121)..(164): Homolog of NCBI NO: 25405881 NR Description: protein F27F5.9 [imported] - Arabidopsis thaliana
  misc_feature (1)..(76): Homolog of NCBI NO: 25405881 NR Description: protein F27F5.9 [imported] - Arabidopsis thaliana
  misc_feature (15)..(228): Homolog of NCBI NO: 34903030 NR Description: unnamed protein product [Oryza sativa (japonica
  misc_feature (1)..(164): Homolog of NCBI NO: 25518603 NR Description: hypothetical protein T32G9.28 - Arabidopsis
  misc_feature (1)..(231): Homolog of NCBI NO: 22330031 NR Description: hypothetical protein
  misc_feature (1)..(224): Homolog of NCBI NO: 15219511 NR Description: hypothetical protein; protein id: At1g35170.1
  misc_feature (1)..(230): Homolog of NCBI NO: 30693154 NR Description: expressed protein [Arabidopsis thaliana]
MEEEYIRVISITTIGVISWGLIFILVRRIFSSYSFDFSTRIVSTLHATIAVTLATLSIQDWSCPVCPIASTSSLRQMETLAFSLSYMIYDLICSHFDQVLSIDNAVHHSVCILGFVAGLFYQKCGSEMVAAIWITEISSPFLHLREILKEIGYRDTDLNLAADVCFATIFSLARMVGGPYLVYVTISADNPILIKAMALGLQLVSAFWFYKILKMMRYKFIKRSMSNKKST

SEQ ID NO: 30142 - protein, 155 aa, Arabidopsis thaliana
  peptide (1)..(155): Ceres Seq. ID no. 12322130
  misc_feature (1)..(147): Homolog of NCBI NO: 27661880 NR Description: hypothetical protein XP_236191 [Rattus norvegicus]
  misc_feature (1)..(147): Homolog of NCBI NO: 34535216 NR Description: unnamed protein product [Homo sapiens]
  misc_feature (45)..(88): Homolog of NCBI NO: 25405881 NR Description: protein F27F5.9 [imported] - Arabidopsis thaliana
  misc_feature (1)..(152): Homolog of NCBI NO: 34903030 NR Description: unnamed protein product [Oryza sativa (japonica
  misc_feature (1)..(88): Homolog of NCBI NO: 25518603 NR Description: hypothetical protein T32G9.28 - Arabidopsis
  misc_feature (1)..(155): Homolog of NCBI NO: 22330031 NR Description: hypothetical protein
  misc_feature (1)..(148): Homolog of NCBI NO: 15219511 NR Description: hypothetical protein; protein id: At1g35170.1
  misc_feature (1)..(154): Homolog of NCBI NO: 30693154 NR Description: expressed protein [Arabidopsis thaliana]
METLAFSLSYMIYDLICSHFDQVLSIDNAVHHSVCILGFVAGLFYQKCGSEMVAAIWITEISSPFLHLREILKEIGYRDTDLNLAADVCFATIFSLARMVGGPYLVYVTISADNPILIKAMALGLQLVSAFWFYKILKMMRYKFIKRSMSNKKST

SEQ ID NO: 30143 - protein, 145 aa, Arabidopsis thaliana
  peptide (1)..(145): Ceres Seq. ID no. 12322131
  misc_feature (1)..(137): Homolog of NCBI NO: 27661880 NR Description: hypothetical protein XP_236191 [Rattus norvegicus]
  misc_feature (1)..(137): Homolog of NCBI NO: 34535216 NR Description: unnamed protein product [Homo sapiens]
  misc_feature (35)..(78): Homolog of NCBI NO: 25405881 NR Description: protein F27F5.9 [imported] - Arabidopsis thaliana
  misc_feature (1)..(142): Homolog of NCBI NO: 34903030 NR Description: unnamed protein product [Oryza sativa (japonica
  misc_feature (1)..(78): Homolog of NCBI NO: 25518603 NR Description: hypothetical protein T32G9.28 - Arabidopsis
  misc_feature (1)..(145): Homolog of NCBI NO: 22330031 NR Description: hypothetical protein
  misc_feature (1)..(138): Homolog of NCBI NO: 15219511 NR Description: hypothetical protein; protein id: At1g35170.1
  misc_feature (1)..(144): Homolog of NCBI NO: 30693154 NR Description: expressed protein [Arabidopsis thaliana]
MIYDLICSHFDQVLSIDNAVHHSVCILGFVAGLFYQKCGSEMVAAIWITEISSPFLHLREILKEIGYRDTDLNLAADVCFATIFSLARMVGGPYLVYVTISADNPILIKAMALGLQLVSAFWFYKILKMMRYKFIKRSMSNKKST

SEQ ID NO: 30144 - DNA, 2221 bp, Arabidopsis thaliana
  misc_feature (1)..(2221): Ceres Seq. ID no. 13490207
  misc_feature: MA Experiment ID: 108434 Result: Down-regulated in Transcription
  misc_feature: MA Experiment 108434 PARAMETER Experiment Name: At_Root_Tips_cDNA_P Parameter: Tissue Value: Root Tips
  misc_feature: MA Experiment ID: 108461 Result: Up-regulated in Transcription
  misc_feature: MA Experiment 108461 PARAMETER Experiment Name: At_Germinating_Seeds_cDNA_P Parameter: Age (day) Value: 1 vs. 0
  misc_feature: MA Experiment 108461 PARAMETER Experiment Name: At_Germinating_Seeds_cDNA_P Parameter: Tissue Value: Germinating Seeds
  misc_feature: MA Experiment ID: 108462 Result: Up-regulated in Transcription
  misc_feature: MA Experiment 108462 PARAMETER Experiment Name: At_Germinating_Seeds_cDNA_P Parameter: Age (day) Value: 2 vs. 0
  misc_feature: MA Experiment 108462 PARAMETER Experiment Name: At_Germinating_Seeds_cDNA_P Parameter: Tissue Value: Germinating Seeds
  misc_feature: MA Experiment ID: 108464 Result: Up-regulated in Transcription
  misc_feature: MA Experiment 108464 PARAMETER Experiment Name: At_Germinating_Seeds_cDNA_P Parameter: Age (day) Value: 4 vs. 0
  misc_feature: MA Experiment 108464 PARAMETER Experiment Name: At_Germinating_Seeds_cDNA_P Parameter: Tissue Value: Germinating Seeds
  misc_feature: MA Experiment ID: 108488 Result: Down-regulated in Transcription
  misc_feature: MA Experiment ID: 108489 Result: Up-regulated in Transcription
  misc_feature: MA Experiment ID: 108501 Result: Down-regulated in Transcription
  misc_feature: MA Experiment 108501 PARAMETER Experiment Name: At_ap2_floral_buds_cDNA_P Parameter: Plant Line Value: ap2 (Ler.)
  misc_feature: MA Experiment 108501 PARAMETER Experiment Name: At_ap2_floral_buds_cDNA_P Parameter: Tissue Value: Closed Flower
  misc_feature: MA Experiment ID: 108561 Result: Up-regulated in Transcription
  misc_feature: MA Experiment 108561 PARAMETER Experiment Name: At_100uM_ABA_cDNA_P Parameter: Timepoint (hr) Value: 6
  misc_feature: MA Experiment 108561 PARAMETER Experiment Name: At_100uM_ABA_cDNA_P Parameter: Tissue Value: Aerial
  misc_feature: MA Experiment 108561 PARAMETER Experiment Name: At_100uM_ABA_cDNA_P Parameter: Treatment Value: 100uM ABA vs. No Treatment
  misc_feature: MA Experiment ID: 108574 Result: Down-regulated in Transcription
  misc_feature: MA Experiment 108574 PARAMETER Experiment Name: At_Wounding__cDNA_P Parameter: Timepoint (hr) Value: 1
  misc_feature: MA Experiment 108574 PARAMETER Experiment Name: At_Wounding__cDNA_P Parameter: Tissue Value: Aerial
  misc_feature: MA Experiment 108574 PARAMETER Experiment Name: At_Wounding__cDNA_P Parameter: Treatment Value: Wounding vs. No Wounding
  misc_feature: MA Experiment ID: 108579 Result: Down-regulated in Transcription
  misc_feature: MA Experiment 108579 PARAMETER Experiment Name: At_4deg_Cold_cDNA_P Parameter: Temperature (deg C) Value: 4 vs. 22
  misc_feature: MA Experiment 108579 PARAMETER Experiment Name: At_4deg_Cold_cDNA_P Parameter: Timepoint (hr) Value: 6
  misc_feature: MA Experiment 108579 PARAMETER Experiment Name: At_4deg_Cold_cDNA_P Parameter: Tissue Value: Aerial
  misc_feature: MA Experiment ID: 108594 Result: Up-regulated in Transcription
  misc_feature: MA Experiment 108594 PARAMETER Experiment Name: At_Ler-rhl_Root_cDNA_P Parameter: Plant Line Value: null
  misc_feature: MA Experiment ID: 108595 Result: Up-regulated in Transcription
  misc_feature: MA Experiment 108595 PARAMETER Experiment Name: At_Ler-pi_Ovule_cDNA_P Parameter: Plant Line Value: null
  misc_feature: MA Experiment ID: 108607 Result: Up-regulated in Transcription
  misc_feature: MA Experiment 108607 PARAMETER Experiment Name: At_100uM_ABA_cDNA_P Parameter: Timepoint (hr) Value: 4
  misc_feature: MA Experiment 108607 PARAMETER Experiment Name: At_100uM_ABA_cDNA_P Parameter: Tissue Value: Aerial
  misc_feature: MA Experiment 108607 PARAMETER Experiment Name: At_100uM_ABA_cDNA_P Parameter: Treatment Value: 100uM ABA vs. No Treatment
  misc_feature: MA Experiment ID: 20000069 Result: Up-regulated in Transcription
  misc_feature: MA Experiment 20000069 PARAMETER Experiment Name: At_100uM_ABA_Mutants_cDNA_P Parameter: Plant Line Value: CS23
  misc_feature: MA Experiment 20000069 PARAMETER Experiment Name: At_100uM_ABA_Mutants_cDNA_P Parameter: Timepoint (hr) Value: 6
  misc_feature: MA Experiment 20000069 PARAMETER Experiment Name: At_100uM_ABA_Mutants_cDNA_P Parameter: Tissue Value: Aerial
  misc_feature: MA Experiment 20000069 PARAMETER Experiment Name: At_100uM_ABA_Mutants_cDNA_P Parameter: Treatment Value: 100uM ABA vs. No Treatment
  misc_feature: MA Experiment ID: 20000070 Result: Up-regulated in Transcription
  misc_feature: MA Experiment 20000070 PARAMETER Experiment Name: At_100uM_ABA_Mutants_cDNA_P Parameter: Plant Line Value: CS24
  misc_feature: MA Experiment 20000070 PARAMETER Experiment Name: At_100uM_ABA_Mutants_cDNA_P Parameter: Timepoint (hr) Value: 6
  misc_feature: MA Experiment 20000070 PARAMETER Experiment Name: At_100uM_ABA_Mutants_cDNA_P Parameter: Tissue Value: Aerial
  misc_feature: MA Experiment 20000070 PARAMETER Experiment Name: At_100uM_ABA_Mutants_cDNA_P Parameter: Treatment Value: 100uM ABA vs. No Treatment
  misc_feature: MA Experiment ID: 20000086 Result: Up-regulated in Transcription
  misc_feature: MA Experiment 20000086 PARAMETER Experiment Name: At_100uM_ABA_Mutants_cDNA_P Parameter: Plant Line Value: CS22
  misc_feature: MA Experiment 20000086 PARAMETER Experiment Name: At_100uM_ABA_Mutants_cDNA_P Parameter: Timepoint (hr) Value: 6
  misc_feature: MA Experiment 20000086 PARAMETER Experiment Name: At_100uM_ABA_Mutants_cDNA_P Parameter: Tissue Value: Aerial
  misc_feature: MA Experiment 20000086 PARAMETER Experiment Name: At_100uM_ABA_Mutants_cDNA_P Parameter: Treatment Value: 100uM ABA vs. No Treatment
  misc_feature: MA Experiment ID: 20000087 Result: Up-regulated in Transcription
  misc_feature: MA Experiment 20000087 PARAMETER Experiment Name: At_100uM_ABA_Mutants_cDNA_P Parameter: Plant Line Value: WS
  misc_feature: MA Experiment 20000087 PARAMETER Experiment Name: At_100uM_ABA_Mutants_cDNA_P Parameter: Timepoint (hr) Value: 6
  misc_feature: MA Experiment 20000087 PARAMETER Experiment Name: At_100uM_ABA_Mutants_cDNA_P Parameter: Tissue Value: Aerial
  misc_feature: MA Experiment 20000087 PARAMETER Experiment Name: At_100uM_ABA_Mutants_cDNA_P Parameter: Treatment Value: 100uM ABA vs. No Treatment
  misc_feature: MA Experiment ID: 20000117 Result: Up-regulated in Transcription
  misc_feature: MA Experiment 20000117 PARAMETER Experiment Name: At_100uM_ABA_Mutants_cDNA_P Parameter: Plant Line Value: Columbia
  misc_feature: MA Experiment 20000117 PARAMETER Experiment Name: At_100uM_ABA_Mutants_cDNA_P Parameter: Timepoint (hr) Value: 6
  misc_feature: MA Experiment 20000117 PARAMETER Experiment Name: At_100uM_ABA_Mutants_cDNA_P Parameter: Tissue Value: Aerial
  misc_feature: MA Experiment 20000117 PARAMETER Experiment Name: At_100uM_ABA_Mutants_cDNA_P Parameter: Treatment Value: 100uM ABA vs. No Treatment
  misc_feature: MA Experiment ID: 20000180 Result: Up-regulated in Transcription
  misc_feature: MA Experiment 20000180 PARAMETER Experiment Name: At_Germinating_Seeds_P Parameter: Age (hr) Value: 24 vs. 0
  misc_feature: MA Experiment 20000180 PARAMETER Experiment Name: At_Germinating_Seeds_P Parameter: Tissue Value: Germinating Seeds
  misc_feature: MA Experiment ID: 20000224 Result: Down-regulated in Transcription
  misc_feature: MA Experiment ID: 20000234 Result: Down-regulated in Transcription
  misc_feature: MA Experiment 20000234 PARAMETER Experiment Name: At_Siliques_P Parameter: Age (day) Value: 21
  misc_feature: MA Experiment 20000234 PARAMETER Experiment Name: At_Siliques_P Parameter: Organism Value: A. thaliana
  misc_feature: MA Experiment 20000234 PARAMETER Experiment Name: At_Siliques_P Parameter: Plant Line Value: WS
  misc_feature: MA Experiment 20000234 PARAMETER Experiment Name: At_Siliques_P Parameter: Tissue Value: Less Than 5mm Siliques vs. Whole Plant
  misc_feature: MA Experiment ID: 20000264 Result: Down-regulated in Transcription
  misc_feature: MA Experiment 20000264 PARAMETER Experiment Name: At_Open_Flower_P Parameter: Age (day) Value: 21
  misc_feature: MA Experiment 20000264 PARAMETER Experiment Name: At_Open_Flower_P Parameter: Plant Line Value: WS
  misc_feature: MA Experiment 20000264 PARAMETER Experiment Name: At_Open_Flower_P Parameter: Tissue Value: Open Flower vs. Whole Plant
  misc_feature: MA Experiment ID: 20000265 Result: Down-regulated in Transcription
  misc_feature: MA Experiment 20000265 PARAMETER Experiment Name: At_Open_Flower_P Parameter: Age (day) Value: 21
  misc_feature: MA Experiment 20000265 PARAMETER Experiment Name: At_Open_Flower_P Parameter: Plant Line Value: WS
  misc_feature: MA Experiment 20000265 PARAMETER Experiment Name: At_Open_Flower_P Parameter: Tissue Value: Closed Flower vs. Whole Plant
  misc_feature: MA Experiment ID: 20000268 Result: Down-regulated in Transcription
  misc_feature: MA Experiment 20000268 PARAMETER Experiment Name: At_100mM_NaCl__P Parameter: Age (day) Value: 14
  misc_feature: MA Experiment 20000268 PARAMETER Experiment Name: At_100mM_NaCl__P Parameter: Organism Value: A. thaliana
  misc_feature: MA Experiment 20000268 PARAMETER Experiment Name: At_100mM_NaCl__P Parameter: Plant Line Value: WS
  misc_feature: MA Experiment 20000268 PARAMETER Experiment Name: At_100mM_NaCl__P Parameter: Timepoint (hr) Value: 6
  misc_feature: MA Experiment 20000268 PARAMETER Experiment Name: At_100mM_NaCl__P Parameter: Tissue Value: Whole Plant
  misc_feature: MA Experiment 20000268 PARAMETER Experiment Name: At_100mM_NaCl__P Parameter: Treatment Value: 100mM NaCl vs. No Treatment
  misc_feature: MA Experiment ID: 20000286 Result: Down-regulated in Transcription
  misc_feature: MA Experiment 20000286 PARAMETER Experiment Name: At_Open_Flower_P Parameter: Age (day) Value: 21
  misc_feature: MA Experiment 20000286 PARAMETER Experiment Name: At_Open_Flower_P Parameter: Plant Line Value: WS
  misc_feature: MA Experiment 20000286 PARAMETER Experiment Name: At_Open_Flower_P Parameter: Tissue Value: Half Open vs. Whole Plant
  misc_feature: MA Experiment ID: 20000308 Result: Down-regulated in Transcription
  misc_feature: MA Experiment 20000308 PARAMETER Experiment Name: At_100mM_NaCl__P Parameter: Age (day) Value: 17
  misc_feature: MA Experiment 20000308 PARAMETER Experiment Name: At_100mM_NaCl__P Parameter: Organism Value: A. thaliana
  misc_feature: MA Experiment 20000308 PARAMETER Experiment Name: At_100mM_NaCl__P Parameter: Plant Line Value: WS
  misc_feature: MA Experiment 20000308 PARAMETER Experiment Name: At_100mM_NaCl__P Parameter: Timepoint (hr) Value: 72
  misc_feature: MA Experiment 20000308 PARAMETER Experiment Name: At_100mM_NaCl__P Parameter: Tissue Value: Whole Plant
  misc_feature: MA Experiment 20000308 PARAMETER Experiment Name: At_100mM_NaCl__P Parameter: Treatment Value: 100mM NaCl vs. No Treatment
  misc_feature: MA Experiment ID: 20000438 Result: Down-regulated in Transcription
  misc_feature: MA Experiment 20000438 PARAMETER Experiment Name: At_Shoots__P Parameter: Age (day) Value: 14
  misc_feature: MA Experiment 20000438 PARAMETER Experiment Name: At_Shoots__P Parameter: Tissue Value: Shoots vs. Whole Plant
  misc_feature: MA Experiment ID: 20000439 Result: Down-regulated in Transcription
  misc_feature: MA Experiment 20000439 PARAMETER Experiment Name: At_Roots__P Parameter: Age (day) Value: 14 vs. 21
  misc_feature: MA Experiment 20000439 PARAMETER Experiment Name: At_Roots__P Parameter: Organism Value: A. thaliana
  misc_feature: MA Experiment 20000439 PARAMETER Experiment Name: At_Roots__P Parameter: Tissue Value: Roots vs. Whole Plant
  misc_feature: MA Experiment ID: 20000441 Result: Up-regulated in Transcription
  misc_feature: MA Experiment 20000441 PARAMETER Experiment Name: At_1uM_BR-BRZ__P Parameter: Tissue Value: Shoot Apices
  misc_feature: MA Experiment 20000441 PARAMETER Experiment Name: At_1uM_BR-BRZ__P Parameter: Treatment Value: 1uM BR vs. No Treatment
  misc_feature: MA Experiment ID: 20000443 Result: Up-regulated in Transcription
  misc_feature: MA Experiment 20000443 PARAMETER Experiment Name: At_1uM_BR-BRZ__P Parameter: Tissue Value: Shoot Apices
  misc_feature: MA Experiment 20000443 PARAMETER Experiment Name: At_1uM_BR-BRZ__P Parameter: Treatment Value: 1uM BRZ vs. No Treatment
  misc_feature: MA Experiment ID: 20000575 Result: Down-regulated in Transcription
  misc_feature: MA Experiment 20000575 PARAMETER Experiment Name: At_100uM_ABA_Mutants__P Parameter: Organism Value: A. thaliana
  misc_feature: MA Experiment 20000575 PARAMETER Experiment Name: At_100uM_ABA_Mutants__P Parameter: Plant Line Value: CS22
  misc_feature: MA Experiment 20000575 PARAMETER Experiment Name: At_100uM_ABA_Mutants__P Parameter: Timepoint (hr) Value: 6
  misc_feature: MA Experiment 20000575 PARAMETER Experiment Name: At_100uM_ABA_Mutants__P Parameter: Tissue Value: Whole Plant
  misc_feature: MA Experiment 20000575 PARAMETER Experiment Name: At_100uM_ABA_Mutants__P Parameter: Treatment Value: 1uM ABA vs. No Treatment
  misc_feature: MA Experiment ID: 20000578 Result: Up-regulated in Transcription
  misc_feature: MA Experiment 20000578 PARAMETER Experiment Name: At_CS3726__P Parameter: Organism Value: A. thaliana
  misc_feature: MA Experiment 20000578 PARAMETER Experiment Name: At_CS3726__P Parameter: Plant Line Value: CS3726
  misc_feature: MA Experiment 20000578 PARAMETER Experiment Name: At_CS3726__P Parameter: Tissue Value: Whole Plant
  misc_feature: MA Experiment ID: 20001450 Result: Up-regulated in Transcription
  misc_feature: MA Experiment 20001450 PARAMETER Experiment Name: At_Far-red-induction_P Parameter: Age (day) Value: 7
  misc_feature: MA Experiment 20001450 PARAMETER Experiment Name: At_Far-red-induction_P Parameter: Light Value: Far-red vs. White
  misc_feature: MA Experiment 20001450 PARAMETER Experiment Name: At_Far-red-induction_P Parameter: Organism Value: A. thaliana
  misc_feature: MA Experiment 20001450 PARAMETER Experiment Name: At_Far-red-induction_P Parameter: Plant Line Value: Columbia
  misc_feature: MA Experiment 20001450 PARAMETER Experiment Name: At_Far-red-induction_P Parameter: Timepoint (hr) Value: 8
  misc_feature: MA Experiment 20001450 PARAMETER Experiment Name: At_Far-red-induction_P Parameter: Tissue Value: Whole Plant
  misc_feature: MA Experiment ID: 20001451 Result: Up-regulated in Transcription
  misc_feature: MA Experiment 20001451 PARAMETER Experiment Name: At_Far-red-induction_P Parameter: Age (day) Value: 7
  misc_feature: MA Experiment 20001451 PARAMETER Experiment Name: At_Far-red-induction_P Parameter: Light Value: Far-red vs. White
  misc_feature: MA Experiment 20001451 PARAMETER Experiment Name: At_Far-red-induction_P Parameter: Organism Value: A. thaliana
  misc_feature: MA Experiment 20001451 PARAMETER Experiment Name: At_Far-red-induction_P Parameter: Plant Line Value: Columbia
  misc_feature: MA Experiment 20001451 PARAMETER Experiment Name: At_Far-red-induction_P Parameter: Timepoint (hr) Value: 24
  misc_feature: MA Experiment 20001451 PARAMETER Experiment Name: At_Far-red-induction_P Parameter: Tissue Value: Whole Plant
  misc_feature: MA Experiment ID: 20001905 Result: Up-regulated in Transcription
  misc_feature: MA Experiment 20001905 PARAMETER Experiment Name: At_Drought_Reproduction_P Parameter: Age (day) Value: 40
  misc_feature: MA Experiment 20001905 PARAMETER Experiment Name: At_Drought_Reproduction_P Parameter: Organism Value: A. thaliana
  misc_feature: MA Experiment 20001905 PARAMETER Experiment Name: At_Drought_Reproduction_P Parameter: Plant Line Value: WS
  misc_feature: MA Experiment 20001905 PARAMETER Experiment Name: At_Drought_Reproduction_P Parameter: Timepoint (day) Value: 10
  misc_feature: MA Experiment 20001905 PARAMETER Experiment Name: At_Drought_Reproduction_P Parameter: Tissue Value: Rosettes
  misc_feature: MA Experiment 20001905 PARAMETER Experiment Name: At_Drought_Reproduction_P Parameter: Treatment Value: Drought vs. No Drought
  misc_feature: Phenotype: FERTILITY Fertility-Reduced
  misc_feature: Phenotype: ROSETTE LEAVES Other
  misc_feature: Phenotype: FERTILITY Fertility-Reduced
  misc_feature: Phenotype: FERTILITY Fertility-Reduced
  misc_feature: Phenotype: FERTILITY Fertility-Reduced
attcgcttccgtttcttaaagcataaaaaccaaaactttctctttcgttttgctttcttccaagcatctgcaggagtgaatcgcaaaaccaaatttggaggattctttctgaggggtttctcagtgagaaaatggcttcgaaacggatcttgaaggagctgaaggatctccagaaagaccctccaacctcctgcagtgcaggtccagttgctgaagacatgtttcattggcaagctacaattatgggtcctgcagagagtccgtattcaggcggtgtgtttctcgttaccattcacttccctccggactatcctttcaagccaccaaaggttgcatttaggacgaaggtgtttcaccctaatatcaacagcaacggaagcatttgccttgacattttgaaagaacaatggagccctgccctcaccatttcgaaggtgttgctttcgatatgttcgctgttaacggatccaaatccagatgacccgttagtgccagagattgcacacatgtacaaaaccgacagagccaagtacaaggctactgctagaaactggactcagaagtatgccatgggctaaacaaagattcgtatgcttcagcacctgtttatgctcttatatctgtttatttctttttcttgttttaactctaataaaaatgtctaaaaatatcaacttttttcgtctgtactatatgtttatggttttattatcatcatctttatctgaaatttgaagatggaattccaaagcttgaaggttatttgttaaagtttatttactagtgagtgatgagaaacattgtgttgttgttcatttcattttttctttgtcaggaatattcattgacttgttttctttaaaaaaaaaaaaaaaaaaaaatgaggttctcgagaaccgctcacacaaaaacgttttcgaaatccctaatctactctctcttctctatatctctactcttgagaaatggctcttagaactgtgctcgtctccgacgtccctagcctcccggattctgtctacggtttatccgaagtttagagttgagcaaaccgacgtcgtttaggttaccggggttttcggtgattggacatagaggaatcggtatgaatgtgttgcaatcgtctgatcggagagcgagaggtgttaaagaaaactcgattctttcattcaattccgccgctaagtatccgattgattacattgagttcgatgttcaggtgacaaaagatgattgccctgtcattttccatgatgatttcatctactctgaagaaaatggtattgttaatgagagtagagtgacggatctgagtctgtctgagtttctcctttatggacctcagaaggaaactgagaaaatagggaagacactgatgaggaaatctaaagaagggaaggttttgaaatgggacgttgatttggatgattctctttgtacgttgcaagaagcttttgaacaagttgaacaaactcttgggttcaatatcgagttgaaatttgatgatcagaccgtctatgaacgagagtttcttgtccatatcctgagatcagtactacaggtggtctctaactatgctaaagacagaccagtaatcttctcaagtttccaaccagatgcagctaagcttgttagggaactgcagagcacttaccctgttttctttctgactgatgcgggaaacgagattcacaatgacgagagaagaaactcgctcgaagaagccattcaagtttgcttggaaggaggtcttcaaggtattgtttcagaggtaaaaggagtgttcaggaacccagcagccattagcaagatcaaagaatctaacctctctctcctcacatacggcaaactcaacaatgtcggagaggcagtgtacatgcaatatgtgatggggatcgatggagtgattgtagattttgttgaggagattatagagtccacgacacgcatgatgataagaccaccaccatcatcatcaccattaccatcaccttccaaggatgatgatgttgccattacaagacctgagttttcacagaaggagatttcttttcttctcaagcttctctctcagttgatacaacattgatatctctgtttttccgttttcttttatcccaagtttctttttagggtttgattttcttattgatttaattattattctgggtgtattacccaatagttggaattgtaaataattataaatttatttcttttt

SEQ ID NO: 30145 - protein, 327 aa, Arabidopsis thaliana
  peptide (1)..(327): Ceres Seq. ID no. 15218812
  misc_feature (112)..(281): Homolog of NCBI NO: 32415413 NR Description: related to multifunctional cyclin-dependent
  misc_feature (1)..(95): Homolog of NCBI NO: 7445886 NR Description: PHO85-like protein - fission yeast
  misc_feature (98)..(272): Homolog of NCBI NO: 7445886 NR Description: PHO85-like protein - fission yeast
  misc_feature (1)..(139): Homolog of NCBI NO: 21740744 NR Description: OSJNBa0072K14.9 [Oryza sativa (japonica
  misc_feature (153)..(326): Homolog of NCBI NO: 21740744 NR Description: OSJNBa0072K14.9 [Oryza sativa (japonica
  misc_feature (1)..(284): Homolog of NCBI NO: 34146826 NR Description: At5g43300 [Arabidopsis thaliana]
  misc_feature (1)..(326): Homolog of NCBI NO: 38175529 NR Description: PHO85-like protein [Oryza sativa (japonica
  misc_feature (1)..(327): Homolog of NCBI NO: 28058728 NR Description: expressed protein [Arabidopsis thaliana]
  misc_feature (1)..(327): Homolog of NCBI NO: 18396047 NR Description: expressed protein [Arabidopsis thaliana]
  misc_feature (1)..(327): Homolog of NCBI NO: 15237552 NR Description: expressed protein [Arabidopsis thaliana]
  misc_feature (112)..(281): Homolog of NCBI NO: 32415413 NR Description: related to multifunctional cyclin-dependent
  misc_feature (1)..(95): Homolog of NCBI NO: 7445886 NR Description: PHO85-like protein - fission yeast
  misc_feature (98)..(272): Homolog of NCBI NO: 7445886 NR Description: PHO85-like protein - fission yeast
  misc_feature (1)..(139): Homolog of NCBI NO: 21740744 NR Description: OSJNBa0072K14.9 [Oryza sativa (japonica
  misc_feature (153)..(326): Homolog of NCBI NO: 21740744 NR Description: OSJNBa0072K14.9 [Oryza sativa (japonica
  misc_feature (1)..(284): Homolog of NCBI NO: 34146826 NR Description: At5g43300 [Arabidopsis thaliana]
  misc_feature (1)..(326): Homolog of NCBI NO: 38175529 NR Description: PHO85-like protein [Oryza sativa (japonica
  misc_feature (1)..(327): Homolog of NCBI NO: 28058728 NR Description: expressed protein [Arabidopsis thaliana]
  misc_feature (1)..(327): Homolog of NCBI NO: 18396047 NR Description: expressed protein [Arabidopsis thaliana]
  misc_feature (1)..(327): Homolog of NCBI NO: 15237552 NR Description: expressed protein [Arabidopsis thaliana]
MNVLQSSDRRARGVKENSILSFNSAAKYPIDYIEFDVQVTKDDCPVIFHDDFIYSEENGIVNESRVTDLSLSEFLLYGPQKETEKIGKTLMRKSKEGKVLKWDVDLDDSLCTLQEAFEQVEQTLGFNIELKFDDQTVYEREFLVHILRSVLQVVSNYAKDRPVIFSSFQPDAAKLVRELQSTYPVFFLTDAGNEIHNDERRNSLEEAIQVCLEGGLQGIVSEVKGVFRNPAAISKIKESNLSLLTYGKLNNVGEAVYMQYVMGIDGVIVDFVEEIIESTTRMMIRPPPSSSPLPSPSKDDDVAITRPEFSQKEISFLLKLLSQLIQH

SEQ ID NO: 30146 - protein, 237 aa, Arabidopsis thaliana
  peptide (1)..(237): Ceres Seq. ID no. 15218813
  misc_feature (8)..(182): Homolog of NCBI NO: 19115043 NR Description: contains glycerophosphoryl diester
  misc_feature (22)..(191): Homolog of NCBI NO: 32415413 NR Description: related to multifunctional cyclin-dependent
  misc_feature (8)..(182): Homolog of NCBI NO: 7445886 NR Description: PHO85-like protein - fission yeast
  misc_feature (1)..(49): Homolog of NCBI NO: 21740744 NR Description: OSJNBa0072K14.9 [Oryza sativa (japonica
  misc_feature (63)..(236): Homolog of NCBI NO: 21740744 NR Description: OSJNBa0072K14.9 [Oryza sativa (japonica
  misc_feature (1)..(194): Homolog of NCBI NO: 34146826 NR Description: At5g43300 [Arabidopsis thaliana]
  misc_feature (1)..(236): Homolog of NCBI NO: 38175529 NR Description: PHO85-like protein [Oryza sativa (japonica
  misc_feature (1)..(237): Homolog of NCBI NO: 28058728 NR Description: expressed protein [Arabidopsis thaliana]
  misc_feature (1)..(237): Homolog of NCBI NO: 18396047 NR Description: expressed protein [Arabidopsis thaliana]
  misc_feature (1)..(237): Homolog of NCBI NO: 15237552 NR Description: expressed protein [Arabidopsis thaliana]
  misc_feature (8)..(182): Homolog of NCBI NO: 19115043 NR Description: contains glycerophosphoryl diester
  misc_feature (22)..(191): Homolog of NCBI NO: 32415413 NR Description: related to multifunctional cyclin-dependent
  misc_feature (8)..(182): Homolog of NCBI NO: 7445886 NR Description: PHO85-like protein - fission yeast
  misc_feature (1)..(49): Homolog of NCBI NO: 21740744 NR Description: OSJNBa0072K14.9 [Oryza sativa (japonica
  misc_feature (63)..(236): Homolog of NCBI NO: 21740744 NR Description: OSJNBa0072K14.9 [Oryza sativa (japonica
  misc_feature (1)..(194): Homolog of NCBI NO: 34146826 NR Description: At5g43300 [Arabidopsis thaliana]
  misc_feature (1)..(236): Homolog of NCBI NO: 38175529 NR Description: PHO85-like protein [Oryza sativa (japonica
  misc_feature (1)..(237): Homolog of NCBI NO: 28058728 NR Description: expressed protein [Arabidopsis thaliana]
  misc_feature (1)..(237): Homolog of NCBI NO: 18396047 NR Description: expressed protein [Arabidopsis thaliana]
  misc_feature (1)..(237): Homolog of NCBI NO: 15237552 NR Description: expressed protein [Arabidopsis thaliana]
MRKSKEGKVLKWDVDLDDSLCTLQEAFEQVEQTLGFNIELKFDDQTVYEREFLVHILRSVLQVVSNYAKDRPVIFSSFQPDAAKLVRELQSTYPVFFLTDAGNEIHNDERRNSLEEAIQVCLEGGLQGIVSEVKGVFRNPAAISKIKESNLSLLTYGKLNNVGEAVYMQYVMGIDGVIVDFVEEIIESTTRMMIRPPPSSSPLPSPSKDDDVAITRPEFSQKEISFLLKLLSQLIQH

SEQ ID NO: 30147 - DNA, 801 bp, Arabidopsis thaliana
  misc_feature (1)..(801): Ceres Seq. ID no. 12377352
  misc_feature: MA Experiment ID: 108434 Result: Up-regulated in Transcription
  misc_feature: MA Experiment 108434 PARAMETER Experiment Name: At_Root_Tips_cDNA_P Parameter: Tissue Value: Root Tips
  misc_feature: MA Experiment ID: 108462 Result: Down-regulated in Transcription
  misc_feature: MA Experiment 108462 PARAMETER Experiment Name: At_Germinating_Seeds_cDNA_P Parameter: Age (day) Value: 2 vs. 0
  misc_feature: MA Experiment 108462 PARAMETER Experiment Name: At_Germinating_Seeds_cDNA_P Parameter: Tissue Value: Germinating Seeds
  misc_feature: MA Experiment ID: 108463 Result: Down-regulated in Transcription
  misc_feature: MA Experiment 108463 PARAMETER Experiment Name: At_Germinating_Seeds_cDNA_P Parameter: Age (day) Value: 3 vs. 0
  misc_feature: MA Experiment 108463 PARAMETER Experiment Name: At_Germinating_Seeds_cDNA_P Parameter: Tissue Value: Germinating Seeds
  misc_feature: MA Experiment ID: 108464 Result: Down-regulated in Transcription
  misc_feature: MA Experiment 108464 PARAMETER Experiment Name: At_Germinating_Seeds_cDNA_P Parameter: Age (day) Value: 4 vs. 0
  misc_feature: MA Experiment 108464 PARAMETER Experiment Name: At_Germinating_Seeds_cDNA_P Parameter: Tissue Value: Germinating Seeds
  misc_feature: MA Experiment ID: 108572 Result: Down-regulated in Transcription
  misc_feature: MA Experiment 108572 PARAMETER Experiment Name: At_Drought_cDNA_P Parameter: Timepoint (hr) Value: 1
  misc_feature: MA Experiment 108572 PARAMETER Experiment Name: At_Drought_cDNA_P Parameter: Tissue Value: Aerial
  misc_feature: MA Experiment 108572 PARAMETER Experiment Name: At_Drought_cDNA_P Parameter: Treatment Value: Drought vs. No Drought
  misc_feature: MA Experiment ID: 108573 Result: Down-regulated in Transcription
  misc_feature: MA Experiment 108573 PARAMETER Experiment Name: At_Drought_cDNA_P Parameter: Timepoint (hr) Value: 6
  misc_feature: MA Experiment 108573 PARAMETER Experiment Name: At_Drought_cDNA_P Parameter: Tissue Value: Aerial
  misc_feature: MA Experiment 108573 PARAMETER Experiment Name: At_Drought_cDNA_P Parameter: Treatment Value: Drought vs. No Drought
  misc_feature: MA Experiment ID: 108579 Result: Up-regulated in Transcription
  misc_feature: MA Experiment 108579 PARAMETER Experiment Name: At_4deg_Cold_cDNA_P Parameter: Temperature (deg C) Value: 4 vs. 22
  misc_feature: MA Experiment 108579 PARAMETER Experiment Name: At_4deg_Cold_cDNA_P Parameter: Timepoint (hr) Value: 6
  misc_feature: MA Experiment 108579 PARAMETER Experiment Name: At_4deg_Cold_cDNA_P Parameter: Tissue Value: Aerial
  misc_feature: MA Experiment ID: 108585 Result: Down-regulated in Transcription
  misc_feature: MA Experiment 108585 PARAMETER Experiment Name: At_5mM_NaNP_cDNA_P Parameter: Timepoint (hr) Value: 6
  misc_feature: MA Experiment 108585 PARAMETER Experiment Name: At_5mM_NaNP_cDNA_P Parameter: Tissue Value: Aerial
  misc_feature: MA Experiment 108585 PARAMETER Experiment Name: At_5mM_NaNP_cDNA_P Parameter: Treatment Value: null
  misc_feature: MA Experiment ID: 20000113 Result: Down-regulated in Transcription
  misc_feature: MA Experiment 20000113 PARAMETER Experiment Name: At_42deg_Heat_cDNA_P Parameter: Temperature (deg C) Value: 42 vs. 22
  misc_feature: MA Experiment 20000113 PARAMETER Experiment Name: At_42deg_Heat_cDNA_P Parameter: Timepoint (hr) Value: 8
  misc_feature: MA Experiment 20000113 PARAMETER Experiment Name: At_42deg_Heat_cDNA_P Parameter: Tissue Value: Aerial
aaatcactccactcacaaaatcctcagccatctctaatcacattttacaatcgcctcttcaaatttcccgataaacaaaaaatgagttccggcgccggcagtggaacaactaaaggtggcagaggaaagccaaaagctacaaagtccgtctctcgatcttctaaagctggtcttcaatttcccgttggaagaatcgctagattccttaaagccggtaaatacgccgaacgtgttggtgccggtgctcccgtttatctctccgccgttctcgaatacctcgccgctgaggtattggagctagctggaaatgcagcaagagataacaagaagacacgtatcgtaccacggcacattcagcttgcagtgaggaacgatgaagagcttagtaaacttcttggaagtgtaacaattgctaatggaggagttttgcccaacattcatcagactcttctcccatcaaaggttggaaagaacaaaggcgatatcggatctgcttctcaagagttttaattttattttttagcttgtaacatagacatggctctctgttccacaatagttttggtattttcatgttactcaaaaactgtgtttgcaaatccagtaatgaattcggtttgaagaagtgaaatagttaaatttgatgtgttgaaatagcggattcaatggcttcaatacaagtgctaataggtttggctttagccatggtttctgcaagtgagactcttgcttctttgtgagaatgtaataatgagacagtgttggaaacagcccatttgatatgagcctccttttctgatt

SEQ ID NO: 30148 - protein, 169 aa, Arabidopsis thaliana
  peptide (1)..(169): Ceres Seq. ID no. 12377353
  misc_feature (30)..(154): Pfam Name: Core histone H2A/H2B/H3/H4 Pfam Description: Core histone H2A/H2B/H3/H4
  misc_feature (32)..(158): Homolog of NCBI NO: 7439709 NR Description: histone H2A - loblolly pine
  misc_feature (40)..(159): Homolog of NCBI NO: 15237024 NR Description: histone H2A- like protein
  misc_feature (28)..(162): Homolog of NCBI NO: 685035 NR Description: histone H2A homolog
  misc_feature (32)..(159): Homolog of NCBI NO: 15239697 NR Description: histone H2A (gb|AAF64418.1)
  misc_feature (28)..(169): Homolog of NCBI NO: 21321778 NR Description: unknown protein [Oryza sativa (japonica
  misc_feature (34)..(169): Homolog of NCBI NO: 462234 NR Description: Histone H2A
  misc_feature (32)..(169): Homolog of NCBI NO: 15214035 NR Description: Histone H2A
  misc_feature (28)..(169): Homolog of NCBI NO: 21593507 NR Description: putative histone H2A [Arabidopsis thaliana]
  misc_feature (28)..(169): Homolog of NCBI NO: 15223948 NR Description: putative histone H2A
  misc_feature (28)..(169): Homolog of NCBI NO: 15221875 NR Description: histone H2A, putative
KSLHSQNPQPSLITFYNRLFKFPDKQKMSSGAGSGTTKGGRGKPKATKSVSRSSKAGLQFPVGRIARFLKAGKYAERVGAGAPVYLSAVLEYLAAEVLELAGNAARDNKKTRIVPRHIQLAVRNDEELSKLLGSVTIANGGVLPNIHQTLLPSKVGKNKGDIGSASQEF

SEQ ID NO: 30149 - protein, 142 aa, Arabidopsis thaliana
  peptide (1)..(142): Ceres Seq. ID no. 12377354
  misc_feature (3)..(127): Pfam Name: Core histone H2A/H2B/H3/H4 Pfam Description: Core histone H2A/H2B/H3/H4
  misc_feature (5)..(131): Homolog of NCBI NO: 7439709 NR Description: histone H2A - loblolly pine
  misc_feature (13)..(132): Homolog of NCBI NO: 15237024 NR Description: histone H2A- like protein
  misc_feature (1)..(135): Homolog of NCBI NO: 685035 NR Description: histone H2A homolog
  misc_feature (5)..(132): Homolog of NCBI NO: 15239697 NR Description: histone H2A (gb|AAF64418.1)
  misc_feature (1)..(142): Homolog of NCBI NO: 21321778 NR Description: unknown protein [Oryza sativa (japonica
  misc_feature (7)..(142): Homolog of NCBI NO: 462234 NR Description: Histone H2A
  misc_feature (5)..(142): Homolog of NCBI NO: 15214035 NR Description: Histone H2A
  misc_feature (1)..(142): Homolog of NCBI NO: 21593507 NR Description: putative histone H2A [Arabidopsis thaliana]
  misc_feature (1)..(142): Homolog of NCBI NO: 15223948 NR Description: putative histone H2A
  misc_feature (1)..(142): Homolog of NCBI NO: 15221875 NR Description: histone H2A, putative
MSSGAGSGTTKGGRGKPKATKSVSRSSKAGLQFPVGRIARFLKAGKYAERVGAGAPVYLSAVLEYLAAEVLELAGNAARDNKKTRIVPRHIQLAVRNDEELSKLLGSVTIANGGVLPNIHQTLLPSKVGKNKGDIGSASQEF

SEQ ID NO: 30150 - DNA, 897 bp, Arabidopsis thaliana
  misc_feature (1)..(897): Ceres Seq. ID no. 12394147
  misc_feature: MA Experiment ID: 108462 Result: Up-regulated in Transcription
  misc_feature: MA Experiment 108462 PARAMETER Experiment Name: At_Germinating_Seeds_cDNA_P Parameter: Age (day) Value: 2 vs. 0
  misc_feature: MA Experiment 108462 PARAMETER Experiment Name: At_Germinating_Seeds_cDNA_P Parameter: Tissue Value: Germinating Seeds
  misc_feature: MA Experiment ID: 108573 Result: Down-regulated in Transcription
  misc_feature: MA Experiment 108573 PARAMETER Experiment Name: At_Drought_cDNA_P Parameter: Timepoint (hr) Value: 6
  misc_feature: MA Experiment 108573 PARAMETER Experiment Name: At_Drought_cDNA_P Parameter: Tissue Value: Aerial
  misc_feature: MA Experiment 108573 PARAMETER Experiment Name: At_Drought_cDNA_P Parameter: Treatment Value: Drought vs. No Drought
  misc_feature: MA Experiment ID: 108595 Result: Down-regulated in Transcription
  misc_feature: MA Experiment 108595 PARAMETER Experiment Name: At_Ler-pi_Ovule_cDNA_P Parameter: Plant Line Value: null
  misc_feature: MA Experiment ID: 20000069 Result: Down-regulated in Transcription
  misc_feature: MA Experiment 20000069 PARAMETER Experiment Name: At_100uM_ABA_Mutants_cDNA_P Parameter: Plant Line Value: CS23
  misc_feature: MA Experiment 20000069 PARAMETER Experiment Name: At_100uM_ABA_Mutants_cDNA_P Parameter: Timepoint (hr) Value: 6
  misc_feature: MA Experiment 20000069 PARAMETER Experiment Name: At_100uM_ABA_Mutants_cDNA_P Parameter: Tissue Value: Aerial
  misc_feature: MA Experiment 20000069 PARAMETER Experiment Name: At_100uM_ABA_Mutants_cDNA_P Parameter: Treatment Value: 100uM ABA vs. No Treatment
  misc_feature: MA Experiment ID: 20000070 Result: Down-regulated in Transcription
  misc_feature: MA Experiment 20000070 PARAMETER Experiment Name: At_100uM_ABA_Mutants_cDNA_P Parameter: Plant Line Value: CS24
  misc_feature: MA Experiment 20000070 PARAMETER Experiment Name: At_100uM_ABA_Mutants_cDNA_P Parameter: Timepoint (hr) Value: 6
  misc_feature: MA Experiment 20000070 PARAMETER Experiment Name: At_100uM_ABA_Mutants_cDNA_P Parameter: Tissue Value: Aerial
  misc_feature: MA Experiment 20000070 PARAMETER Experiment Name: At_100uM_ABA_Mutants_cDNA_P Parameter: Treatment Value: 100uM ABA vs. No Treatment
  misc_feature: MA Experiment ID: 20000071 Result: Down-regulated in Transcription
  misc_feature: MA Experiment 20000071 PARAMETER Experiment Name: At_100uM_ABA_Mutants_cDNA_P Parameter: Plant Line Value: CS8104
  misc_feature: MA Experiment 20000071 PARAMETER Experiment Name: At_100uM_ABA_Mutants_cDNA_P Parameter: Timepoint (hr) Value: 6
  misc_feature: MA Experiment 20000071 PARAMETER Experiment Name: At_100uM_ABA_Mutants_cDNA_P Parameter: Tissue Value: Aerial
  misc_feature: MA Experiment 20000071 PARAMETER Experiment Name: At_100uM_ABA_Mutants_cDNA_P Parameter: Treatment Value: 100uM ABA vs. No Treatment
  misc_feature: MA Experiment ID: 20000086 Result: Down-regulated in Transcription
  misc_feature: MA Experiment 20000086 PARAMETER Experiment Name: At_100uM_ABA_Mutants_cDNA_P Parameter: Plant Line Value: CS22
  misc_feature: MA Experiment 20000086 PARAMETER Experiment Name: At_100uM_ABA_Mutants_cDNA_P Parameter: Timepoint (hr) Value: 6
  misc_feature: MA Experiment 20000086 PARAMETER Experiment Name: At_100uM_ABA_Mutants_cDNA_P Parameter: Tissue Value: Aerial
  misc_feature: MA Experiment 20000086 PARAMETER Experiment Name: At_100uM_ABA_Mutants_cDNA_P Parameter: Treatment Value: 100uM ABA vs. No Treatment
  misc_feature: MA Experiment ID: 20000088 Result: Down-regulated in Transcription
  misc_feature: MA Experiment 20000088 PARAMETER Experiment Name: At_100uM_ABA_Mutants_cDNA_P Parameter: Plant Line Value: Landsberg
  misc_feature: MA Experiment 20000088 PARAMETER Experiment Name: At_100uM_ABA_Mutants_cDNA_P Parameter: Timepoint (hr) Value: 6
  misc_feature: MA Experiment 20000088 PARAMETER Experiment Name: At_100uM_ABA_Mutants_cDNA_P Parameter: Tissue Value: Aerial
  misc_feature: MA Experiment 20000088 PARAMETER Experiment Name: At_100uM_ABA_Mutants_cDNA_P Parameter: Treatment Value: 100uM ABA vs. No Treatment
  misc_feature: MA Experiment ID: 20000089 Result: Down-regulated in Transcription
  misc_feature: MA Experiment ID: 20000090 Result: Down-regulated in Transcription
  misc_feature: MA Experiment ID: 20000117 Result: Down-regulated in Transcription
  misc_feature: MA Experiment 20000117 PARAMETER Experiment Name: At_100uM_ABA_Mutants_cDNA_P Parameter: Plant Line Value: Columbia
  misc_feature: MA Experiment 20000117 PARAMETER Experiment Name: At_100uM_ABA_Mutants_cDNA_P Parameter: Timepoint (hr) Value: 6
  misc_feature: MA Experiment 20000117 PARAMETER Experiment Name: At_100uM_ABA_Mutants_cDNA_P Parameter: Tissue Value: Aerial
  misc_feature: MA Experiment 20000117 PARAMETER Experiment Name: At_100uM_ABA_Mutants_cDNA_P Parameter: Treatment Value: 100uM ABA vs. No Treatment
  misc_feature: MA Experiment ID: 20000180 Result: Up-regulated in Transcription
  misc_feature: MA Experiment 20000180 PARAMETER Experiment Name: At_Germinating_Seeds_P Parameter: Age (hr) Value: 24 vs. 0
  misc_feature: MA Experiment 20000180 PARAMETER Experiment Name: At_Germinating_Seeds_P Parameter: Tissue Value: Germinating Seeds
  misc_feature: MA Experiment ID: 20000184 Result: Up-regulated in Transcription
  misc_feature: MA Experiment 20000184 PARAMETER Experiment Name: At_Shoots__P Parameter: Age (day) Value: 7
  misc_feature: MA Experiment 20000184 PARAMETER Experiment Name: At_Shoots__P Parameter: Tissue Value: Shoots vs. Whole Plant
  misc_feature: MA Experiment ID: 20000185 Result: Down-regulated in Transcription
  misc_feature: MA Experiment 20000185 PARAMETER Experiment Name: At_Roots__P Parameter: Age (day) Value: 7 vs. 21
  misc_feature: MA Experiment 20000185 PARAMETER Experiment Name: At_Roots__P Parameter: Organism Value: A. thaliana
  misc_feature: MA Experiment 20000185 PARAMETER Experiment Name: At_Roots__P Parameter: Tissue Value: Roots vs. Whole Plant
  misc_feature: MA Experiment ID: 20000224 Result: Up-regulated in Transcription
  misc_feature: MA Experiment ID: 20000286 Result: Down-regulated in Transcription
  misc_feature: MA Experiment 20000286 PARAMETER Experiment Name: At_Open_Flower_P Parameter: Age (day) Value: 21
  misc_feature: MA Experiment 20000286 PARAMETER Experiment Name: At_Open_Flower_P Parameter: Plant Line Value: WS
  misc_feature: MA Experiment 20000286 PARAMETER Experiment Name: At_Open_Flower_P Parameter: Tissue Value: Half Open vs. Whole Plant
  misc_feature: MA Experiment ID: 20000438 Result: Up-regulated in Transcription
  misc_feature: MA Experiment 20000438 PARAMETER Experiment Name: At_Shoots__P Parameter: Age (day) Value: 14
  misc_feature: MA Experiment 20000438 PARAMETER Experiment Name: At_Shoots__P Parameter: Tissue Value: Shoots vs. Whole Plant
  misc_feature: MA Experiment ID: 20000439 Result: Down-regulated in Transcription
  misc_feature: MA Experiment 20000439 PARAMETER Experiment Name: At_Roots__P Parameter: Age (day) Value: 14 vs. 21
  misc_feature: MA Experiment 20000439 PARAMETER Experiment Name: At_Roots__P Parameter: Organism Value: A. thaliana
  misc_feature: MA Experiment 20000439 PARAMETER Experiment Name: At_Roots__P Parameter: Tissue Value: Roots vs. Whole Plant
  misc_feature: MA Experiment ID: 20000573 Result: Down-regulated in Transcription
  misc_feature: MA Experiment 20000573 PARAMETER Experiment Name: At_100uM_ABA_Mutants__P Parameter: Organism Value: A. thaliana
  misc_feature: MA Experiment 20000573 PARAMETER Experiment Name: At_100uM_ABA_Mutants__P Parameter: Plant Line Value: CS22 vs. Ler wt
  misc_feature: MA Experiment 20000573 PARAMETER Experiment Name: At_100uM_ABA_Mutants__P Parameter: Timepoint (hr) Value: N/A
  misc_feature: MA Experiment 20000573 PARAMETER Experiment Name: At_100uM_ABA_Mutants__P Parameter: Tissue Value: Whole Plant
  misc_feature: MA Experiment 20000573 PARAMETER Experiment Name: At_100uM_ABA_Mutants__P Parameter: Treatment Value: None
  misc_feature: MA Experiment ID: 20000794 Result: Down-regulated in Transcription
  misc_feature: MA Experiment 20000794 PARAMETER Experiment Name: At_Petals_P Parameter: Age (day) Value: 23-25 days
  misc_feature: MA Experiment 20000794 PARAMETER Experiment Name: At_Petals_P Parameter: Plant Line Value: WS
  misc_feature: MA Experiment 20000794 PARAMETER Experiment Name: At_Petals_P Parameter: Tissue Value: Petals vs. Whole plant
  misc_feature: MA Experiment ID: 20001248 Result: Down-regulated in Transcription
  misc_feature: MA Experiment 20001248 PARAMETER Experiment Name: At_Far-red-induction_P Parameter: Age (day) Value: 7
  misc_feature: MA Experiment 20001248 PARAMETER Experiment Name: At_Far-red-induction_P Parameter: Light Value: Far-red vs. White
  misc_feature: MA Experiment 20001248 PARAMETER Experiment Name: At_Far-red-induction_P Parameter: Organism Value: A. thaliana
  misc_feature: MA Experiment 20001248 PARAMETER Experiment Name: At_Far-red-induction_P Parameter: Plant Line Value: Columbia
  misc_feature: MA Experiment 20001248 PARAMETER Experiment Name: At_Far-red-induction_P Parameter: Timepoint (hr) Value: 4
  misc_feature: MA Experiment 20001248 PARAMETER Experiment Name: At_Far-red-induction_P Parameter: Tissue Value: Whole Plant
  misc_feature: MA Experiment ID: 20001757 Result: Up-regulated in Transcription
  misc_feature: MA Experiment 20001757 PARAMETER Experiment Name: At_50mM_NH4NO3_L-to-H_P Parameter: Timepoint (hr) Value: 6
  misc_feature: MA Experiment 20001757 PARAMETER Experiment Name: At_50mM_NH4NO3_L-to-H_P Parameter: Tissue Value: Leaf
  misc_feature: MA Experiment 20001757 PARAMETER Experiment Name: At_50mM_NH4NO3_L-to-H_P Parameter: Treatment Value: 50mM NH4NO3 vs 100mM Mannitol
  misc_feature: MA Experiment ID: 20001904 Result: Down-regulated in Transcription
  misc_feature: MA Experiment 20001904 PARAMETER Experiment Name: At_Drought_Reproduction_P Parameter: Age (day) Value: 37
  misc_feature: MA Experiment 20001904 PARAMETER Experiment Name: At_Drought_Reproduction_P Parameter: Organism Value: A. thaliana
  misc_feature: MA Experiment 20001904 PARAMETER Experiment Name: At_Drought_Reproduction_P Parameter: Plant Line Value: WS
  misc_feature: MA Experiment 20001904 PARAMETER Experiment Name: At_Drought_Reproduction_P Parameter: Timepoint (day) Value: 7
  misc_feature: MA Experiment 20001904 PARAMETER Experiment Name: At_Drought_Reproduction_P Parameter: Tissue Value: Rosettes
  misc_feature: MA Experiment 20001904 PARAMETER Experiment Name: At_Drought_Reproduction_P Parameter: Treatment Value: Drought vs. No Drought
  misc_feature: MA Experiment ID: 20001905 Result: Down-regulated in Transcription
  misc_feature: MA Experiment 20001905 PARAMETER Experiment Name: At_Drought_Reproduction_P Parameter: Age (day) Value: 40
  misc_feature: MA Experiment 20001905 PARAMETER Experiment Name: At_Drought_Reproduction_P Parameter: Organism Value: A. thaliana
  misc_feature: MA Experiment 20001905 PARAMETER Experiment Name: At_Drought_Reproduction_P Parameter: Plant Line Value: WS
  misc_feature: MA Experiment 20001905 PARAMETER Experiment Name: At_Drought_Reproduction_P Parameter: Timepoint (day) Value: 10
  misc_feature: MA Experiment 20001905 PARAMETER Experiment Name: At_Drought_Reproduction_P Parameter: Tissue Value: Rosettes
  misc_feature: MA Experiment 20001905 PARAMETER Experiment Name: At_Drought_Reproduction_P Parameter: Treatment Value: Drought vs. No Drought
  misc_feature: MA Experiment ID: 20001906 Result: Down-regulated in Transcription
  misc_feature: MA Experiment 20001906 PARAMETER Experiment Name: At_Drought_Reproduction_P Parameter: Age (day) Value: 35
  misc_feature: MA Experiment 20001906 PARAMETER Experiment Name: At_Drought_Reproduction_P Parameter: Organism Value: A. thaliana
  misc_feature: MA Experiment 20001906 PARAMETER Experiment Name: At_Drought_Reproduction_P Parameter: Plant Line Value: WS
  misc_feature: MA Experiment 20001906 PARAMETER Experiment Name: At_Drought_Reproduction_P Parameter: Timepoint (day) Value: 5
  misc_feature: MA Experiment 20001906 PARAMETER Experiment Name: At_Drought_Reproduction_P Parameter: Tissue Value: Siliques
  misc_feature: MA Experiment 20001906 PARAMETER Experiment Name: At_Drought_Reproduction_P Parameter: Treatment Value: Drought vs. No Drought
gacgtgactcttctctctcttcctctccatcaatggcgaccacaaactctctgatgttctaggtaatggtctcacttcggaccaacttctctttccctcaaacaacccacttccgccgcaacattctcactaatctgctctgcttcttccacctcctcctccaccaccgccgtatccgccgtttcaaccacaaacgcctccgccacaactgccgaaaccgcgaccatattcgacgttctggagaaccatctcgtcaatcaaaacttcagacaagccgacgaggagacacggagattactcattcagatatccggagaagccgccgtgaaacgtggctacgttttcttctccgaggtgaaaacaatctcccccgaagatcttcaagctatcgacaatctatggattaaacacagtgatggtagattcggatacagcgtgcaacgcaaaatctggttaaaagtgaagaaagatttcacaagattcttcgttaaagttgagtggatgaagcttcttgacacagaggttgttcaatacaattacagagcgtttcctgacgaattcaagtgggagcttaacgatgaaacgcctttaggacacttaccgctcacaaacgccttgagaggaacgcagcttctgaaatgcgttttaagccatcctgcgtttgcgacagctgatgataacagtggagaaacagaagacgagcttaacagaggtgttgcggtggctaaggaacaggcaggagtaggagcagacaaaagagtgtttaaaacaaattacagcttctgatgtctttctccttcttttttttttttttttttttaatattgattttctgatattgtgaaagtataaacaaatctctgtaatcatatcattaattaaatcggatttctcttc

SEQ ID NO: 30151 - protein, 113 aa, Arabidopsis thaliana
  peptide (1)..(113): Ceres Seq. ID no. 12394148
MVSLRTNFSFPQTTHFRRNILTNLLCFFHLLLHHRRIRRFNHKRLRHNCRNRDHIRRSGEPSRQSKLQTSRRGDTEITHSDIRRSRRETWLRFLLRGENNLPRRSSSYRQSMD

SEQ ID NO: 30152 - protein, 94 aa, Arabidopsis thaliana
  peptide (1)..(94): Ceres Seq. ID no. 12394149
  misc_feature (1)..(55): Homolog of NCBI NO: 23042867 NR Description: hypothetical protein [Trichodesmium erythraeum
  misc_feature (1)..(55): Homolog of NCBI NO: 23126475 NR Description: hypothetical protein [Nostoc punctiforme]
  misc_feature (1)..(54): Homolog of NCBI NO: 11465668 NR Description: ORF238 [Porphyra purpurea]
  misc_feature (1)..(54): Homolog of NCBI NO: 22299137 NR Description: ORF_ID:tlr1594~hypothetical protein
  misc_feature (1)..(60): Homolog of NCBI NO: 33861481 NR Description: conserved hypothetical protein
  misc_feature (1)..(55): Homolog of NCBI NO: 17229318 NR Description: hypothetical protein [Nostoc sp. PCC 7120]
  misc_feature (1)..(55): Homolog of NCBI NO: 23042866 NR Description: hypothetical protein [Trichodesmium erythraeum
  misc_feature (1)..(94): Homolog of NCBI NO: 17380924 NR Description: unknown protein [Arabidopsis thaliana]
  misc_feature (1)..(94): Homolog of NCBI NO: 32816239 NR Description: GUN4 mutant [Arabidopsis thaliana]
  misc_feature (1)..(94): Homolog of NCBI NO: 15231674 NR Description: putative protein
MKLLDTEVVQYNYRAFPDEFKWELNDETPLGHLPLTNALRGTQLLKCVLSHPAFATADDNSGETEDELNRGVAVAKEQAGVGADKRVFKTNYSF

SEQ ID NO: 30153 - DNA, 636 bp, Arabidopsis thaliana
  misc_feature (1)..(636): Ceres Seq. ID no. 12337350
  misc_feature: MA Experiment ID: 108434 Result: Up-regulated in Transcription
  misc_feature: MA Experiment 108434 PARAMETER Experiment Name: At_Root_Tips_cDNA_P Parameter: Tissue Value: Root Tips
  misc_feature: MA Experiment ID: 108462 Result: Up-regulated in Transcription
  misc_feature: MA Experiment 108462 PARAMETER Experiment Name: At_Germinating_Seeds_cDNA_P Parameter: Age (day) Value: 2 vs. 0
  misc_feature: MA Experiment 108462 PARAMETER Experiment Name: At_Germinating_Seeds_cDNA_P Parameter: Tissue Value: Germinating Seeds
  misc_feature: MA Experiment ID: 108572 Result: Down-regulated in Transcription
  misc_feature: MA Experiment 108572 PARAMETER Experiment Name: At_Drought_cDNA_P Parameter: Timepoint (hr) Value: 1
  misc_feature: MA Experiment 108572 PARAMETER Experiment Name: At_Drought_cDNA_P Parameter: Tissue Value: Aerial
  misc_feature: MA Experiment 108572 PARAMETER Experiment Name: At_Drought_cDNA_P Parameter: Treatment Value: Drought vs. No Drought
  misc_feature: MA Experiment ID: 108573 Result: Down-regulated in Transcription
  misc_feature: MA Experiment 108573 PARAMETER Experiment Name: At_Drought_cDNA_P Parameter: Timepoint (hr) Value: 6
  misc_feature: MA Experiment 108573 PARAMETER Experiment Name: At_Drought_cDNA_P Parameter: Tissue Value: Aerial
  misc_feature: MA Experiment 108573 PARAMETER Experiment Name: At_Drought_cDNA_P Parameter: Treatment Value: Drought vs. No Drought
  misc_feature: MA Experiment ID: 108576 Result: Down-regulated in Transcription
  misc_feature: MA Experiment 108576 PARAMETER Experiment Name: At_42deg_Heat_cDNA_P Parameter: Temperature (deg C) Value: 42 vs. 22
  misc_feature: MA Experiment 108576 PARAMETER Experiment Name: At_42deg_Heat_cDNA_P Parameter: Timepoint (hr) Value: 1
  misc_feature: MA Experiment 108576 PARAMETER Experiment Name: At_42deg_Heat_cDNA_P Parameter: Tissue Value: Aerial
  misc_feature: MA Experiment ID: 108577 Result: Down-regulated in Transcription
  misc_feature: MA Experiment 108577 PARAMETER Experiment Name: At_42deg_Heat_cDNA_P Parameter: Temperature (deg C) Value: 42 vs. 22
  misc_feature: MA Experiment 108577 PARAMETER Experiment Name: At_42deg_Heat_cDNA_P Parameter: Timepoint (hr) Value: 6
  misc_feature: MA Experiment 108577 PARAMETER Experiment Name: At_42deg_Heat_cDNA_P Parameter: Tissue Value: Aerial
  misc_feature: MA Experiment ID: 108579 Result: Up-regulated in Transcription
  misc_feature: MA Experiment 108579 PARAMETER Experiment Name: At_4deg_Cold_cDNA_P Parameter: Temperature (deg C) Value: 4 vs. 22
  misc_feature: MA Experiment 108579 PARAMETER Experiment Name: At_4deg_Cold_cDNA_P Parameter: Timepoint (hr) Value: 6
  misc_feature: MA Experiment 108579 PARAMETER Experiment Name: At_4deg_Cold_cDNA_P Parameter: Tissue Value: Aerial
  misc_feature: MA Experiment ID: 20000093 Result: Down-regulated in Transcription
  misc_feature: MA Experiment 20000093 PARAMETER Experiment Name: At_42deg_Heat_cDNA_P Parameter: Temperature (deg C) Value: 42 vs. 22
  misc_feature: MA Experiment 20000093 PARAMETER Experiment Name: At_42deg_Heat_cDNA_P Parameter: Timepoint (hr) Value: 0.5
  misc_feature: MA Experiment 20000093 PARAMETER Experiment Name: At_42deg_Heat_cDNA_P Parameter: Tissue Value: Aerial
  misc_feature: MA Experiment ID: 20000111 Result: Down-regulated in Transcription
  misc_feature: MA Experiment 20000111 PARAMETER Experiment Name: At_42deg_Heat_cDNA_P Parameter: Temperature (deg C) Value: 42 vs. 22
  misc_feature: MA Experiment 20000111 PARAMETER Experiment Name: At_42deg_Heat_cDNA_P Parameter: Timepoint (hr) Value: 6
  misc_feature: MA Experiment 20000111 PARAMETER Experiment Name: At_42deg_Heat_cDNA_P Parameter: Tissue Value: Aerial
  misc_feature: MA Experiment ID: 20000113 Result: Down-regulated in Transcription
  misc_feature: MA Experiment 20000113 PARAMETER Experiment Name: At_42deg_Heat_cDNA_P Parameter: Temperature (deg C) Value: 42 vs. 22
  misc_feature: MA Experiment 20000113 PARAMETER Experiment Name: At_42deg_Heat_cDNA_P Parameter: Timepoint (hr) Value: 8
  misc_feature: MA Experiment 20000113 PARAMETER Experiment Name: At_42deg_Heat_cDNA_P Parameter: Tissue Value: Aerial
  misc_feature: MA Experiment ID: 20000144 Result: Down-regulated in Transcription
  misc_feature: MA Experiment 20000144 PARAMETER Experiment Name: At_42deg_Heat_cDNA_P Parameter: Temperature (deg C) Value: 42 vs. 22
  misc_feature: MA Experiment 20000144 PARAMETER Experiment Name: At_42deg_Heat_cDNA_P Parameter: Timepoint (hr) Value: 1
  misc_feature: MA Experiment 20000144 PARAMETER Experiment Name: At_42deg_Heat_cDNA_P Parameter: Tissue Value: Aerial
  misc_feature: MA Experiment ID: 20000171 Result: Down-regulated in Transcription
  misc_feature: MA Experiment 20000171 PARAMETER Experiment Name: At_42deg_Heat_P Parameter: Age (day) Value: 14
  misc_feature: MA Experiment 20000171 PARAMETER Experiment Name: At_42deg_Heat_P Parameter: Organism Value: A. thaliana
  misc_feature: MA Experiment 20000171 PARAMETER Experiment Name: At_42deg_Heat_P Parameter: Plant Line Value: WS
  misc_feature: MA Experiment 20000171 PARAMETER Experiment Name: At_42deg_Heat_P Parameter: Temperature (deg C) Value: 42 vs. 22
  misc_feature: MA Experiment 20000171 PARAMETER Experiment Name: At_42deg_Heat_P Parameter: Timepoint (hr) Value: 1
  misc_feature: MA Experiment 20000171 PARAMETER Experiment Name: At_42deg_Heat_P Parameter: Tissue Value: Aerial
  misc_feature: MA Experiment ID: 20000173 Result: Down-regulated in Transcription
  misc_feature: MA Experiment 20000173 PARAMETER Experiment Name: At_42deg_Heat_P Parameter: Age (day) Value: 14
  misc_feature: MA Experiment 20000173 PARAMETER Experiment Name: At_42deg_Heat_P Parameter: Organism Value: A. thaliana
  misc_feature: MA Experiment 20000173 PARAMETER Experiment Name: At_42deg_Heat_P Parameter: Plant Line Value: WS
  misc_feature: MA Experiment 20000173 PARAMETER Experiment Name: At_42deg_Heat_P Parameter: Temperature (deg C) Value: 42 vs. 22
  misc_feature: MA Experiment 20000173 PARAMETER Experiment Name: At_42deg_Heat_P Parameter: Timepoint (hr) Value: 6
  misc_feature: MA Experiment 20000173 PARAMETER Experiment Name: At_42deg_Heat_P Parameter: Tissue Value: Aerial
  misc_feature: MA Experiment ID: 20000179 Result: Up-regulated in Transcription
  misc_feature: MA Experiment 20000179 PARAMETER Experiment Name: At_Germinating_Seeds_P Parameter: Age (hr) Value: 6 vs. 0
  misc_feature: MA Experiment 20000179 PARAMETER Experiment Name: At_Germinating_Seeds_P Parameter: Tissue Value: Germinating Seeds
  misc_feature: MA Experiment ID: 20000180 Result: Up-regulated in Transcription
  misc_feature: MA Experiment 20000180 PARAMETER Experiment Name: At_Germinating_Seeds_P Parameter: Age (hr) Value: 24 vs. 0
  misc_feature: MA Experiment 20000180 PARAMETER Experiment Name: At_Germinating_Seeds_P Parameter: Tissue Value: Germinating Seeds
  misc_feature: MA Experiment ID: 20000185 Result: Up-regulated in Transcription
  misc_feature: MA Experiment 20000185 PARAMETER Experiment Name: At_Roots__P Parameter: Age (day) Value: 7 vs. 21
  misc_feature: MA Experiment 20000185 PARAMETER Experiment Name: At_Roots__P Parameter: Organism Value: A. thaliana
  misc_feature: MA Experiment 20000185 PARAMETER Experiment Name: At_Roots__P Parameter: Tissue Value: Roots vs. Whole Plant
  misc_feature: MA Experiment ID: 20000234 Result: Up-regulated in Transcription
  misc_feature: MA Experiment 20000234 PARAMETER Experiment Name: At_Siliques_P Parameter: Age (day) Value: 21
  misc_feature: MA Experiment 20000234 PARAMETER Experiment Name: At_Siliques_P Parameter: Organism Value: A. thaliana
  misc_feature: MA Experiment 20000234 PARAMETER Experiment Name: At_Siliques_P Parameter: Plant Line Value: WS
  misc_feature: MA Experiment 20000234 PARAMETER Experiment Name: At_Siliques_P Parameter: Tissue Value: Less Than 5mm Siliques vs. Whole Plant
  misc_feature: MA Experiment ID: 20000264 Result: Up-regulated in Transcription
  misc_feature: MA Experiment 20000264 PARAMETER Experiment Name: At_Open_Flower_P Parameter: Age (day) Value: 21
  misc_feature: MA Experiment 20000264 PARAMETER Experiment Name: At_Open_Flower_P Parameter: Plant Line Value: WS
  misc_feature: MA Experiment 20000264 PARAMETER Experiment Name: At_Open_Flower_P Parameter: Tissue Value: Open Flower vs. Whole Plant
  misc_feature: MA Experiment ID: 20000265 Result: Up-regulated in Transcription
  misc_feature: MA Experiment 20000265 PARAMETER Experiment Name: At_Open_Flower_P Parameter: Age (day) Value: 21
  misc_feature: MA Experiment 20000265 PARAMETER Experiment Name: At_Open_Flower_P Parameter: Plant Line Value: WS
  misc_feature: MA Experiment 20000265 PARAMETER Experiment Name: At_Open_Flower_P Parameter: Tissue Value: Closed Flower vs. Whole Plant
  misc_feature: MA Experiment ID: 20000437 Result: Down-regulated in Transcription
  misc_feature: MA Experiment 20000437 PARAMETER Experiment Name: At_Drought_P Parameter: Age (day) Value: 8
  misc_feature: MA Experiment 20000437 PARAMETER Experiment Name: At_Drought_P Parameter: Organism Value: A. thaliana
  misc_feature: MA Experiment 20000437 PARAMETER Experiment Name: At_Drought_P Parameter: Plant Line Value: WS
  misc_feature: MA Experiment 20000437 PARAMETER Experiment Name: At_Drought_P Parameter: Timepoint (hr) Value: 24
  misc_feature: MA Experiment 20000437 PARAMETER Experiment Name: At_Drought_P Parameter: Tissue Value: Whole Plant
  misc_feature: MA Experiment 20000437 PARAMETER Experiment Name: At_Drought_P Parameter: Treatment Value: Drought vs. No Drought
  misc_feature: MA Experiment ID: 20000439 Result: Up-regulated in Transcription
  misc_feature: MA Experiment 20000439 PARAMETER Experiment Name: At_Roots__P Parameter: Age (day) Value: 14 vs. 21
  misc_feature: MA Experiment 20000439 PARAMETER Experiment Name: At_Roots__P Parameter: Organism Value: A. thaliana
  misc_feature: MA Experiment 20000439 PARAMETER Experiment Name: At_Roots__P Parameter: Tissue Value: Roots vs. Whole Plant
  misc_feature: MA Experiment ID: 20000445 Result: Down-regulated in Transcription
  misc_feature: MA Experiment 20000445 PARAMETER Experiment Name: At_100uM_NAA__P Parameter: Age (day) Value: 14
  misc_feature: MA Experiment 20000445 PARAMETER Experiment Name: At_100uM_NAA__P Parameter: Organism Value: A. thaliana
  misc_feature: MA Experiment 20000445 PARAMETER Experiment Name: At_100uM_NAA__P Parameter: Plant Line Value: WS
  misc_feature: MA Experiment 20000445 PARAMETER Experiment Name: At_100uM_NAA__P Parameter: Timepoint (hr) Value: 6
  misc_feature: MA Experiment 20000445 PARAMETER Experiment Name: At_100uM_NAA__P Parameter: Tissue Value: Aerial
  misc_feature: MA Experiment 20000445 PARAMETER Experiment Name: At_100uM_NAA__P Parameter: Treatment Value: 100uM NAA vs. No Treatment
  misc_feature: MA Experiment ID: 20001248 Result: Down-regulated in Transcription
  misc_feature: MA Experiment 20001248 PARAMETER Experiment Name: At_Far-red-induction_P Parameter: Age (day) Value: 7
  misc_feature: MA Experiment 20001248 PARAMETER Experiment Name: At_Far-red-induction_P Parameter: Light Value: Far-red vs. White
  misc_feature: MA Experiment 20001248 PARAMETER Experiment Name: At_Far-red-induction_P Parameter: Organism Value: A. thaliana
  misc_feature: MA Experiment 20001248 PARAMETER Experiment Name: At_Far-red-induction_P Parameter: Plant Line Value: Columbia
  misc_feature: MA Experiment 20001248 PARAMETER Experiment Name: At_Far-red-induction_P Parameter: Timepoint (hr) Value: 4
  misc_feature: MA Experiment 20001248 PARAMETER Experiment Name: At_Far-red-induction_P Parameter: Tissue Value: Whole Plant
  misc_feature: MA Experiment ID: 20001450 Result: Down-regulated in Transcription
  misc_feature: MA Experiment 20001450 PARAMETER Experiment Name: At_Far-red-induction_P Parameter: Age (day) Value: 7
  misc_feature: MA Experiment 20001450 PARAMETER Experiment Name: At_Far-red-induction_P Parameter: Light Value: Far-red vs. White
  misc_feature: MA Experiment 20001450 PARAMETER Experiment Name: At_Far-red-induction_P Parameter: Organism Value: A. thaliana
  misc_feature: MA Experiment 20001450 PARAMETER Experiment Name: At_Far-red-induction_P Parameter: Plant Line Value: Columbia
  misc_feature: MA Experiment 20001450 PARAMETER Experiment Name: At_Far-red-induction_P Parameter: Timepoint (hr) Value: 8
  misc_feature: MA Experiment 20001450 PARAMETER Experiment Name: At_Far-red-induction_P Parameter: Tissue Value: Whole Plant
  misc_feature: MA Experiment ID: 20001757 Result: Up-regulated in Transcription
  misc_feature: MA Experiment 20001757 PARAMETER Experiment Name: At_50mM_NH4NO3_L-to-H_P Parameter: Timepoint (hr) Value: 6
  misc_feature: MA Experiment 20001757 PARAMETER Experiment Name: At_50mM_NH4NO3_L-to-H_P Parameter: Tissue Value: Leaf
  misc_feature: MA Experiment 20001757 PARAMETER Experiment Name: At_50mM_NH4NO3_L-to-H_P Parameter: Treatment Value: 50mM NH4NO3 vs 100mM Mannitol
  misc_feature: MA Experiment ID: 20001911 Result: Down-regulated in Transcription
  misc_feature: MA Experiment 20001911 PARAMETER Experiment Name: At_Drought_Reproduction_P Parameter: Age (day) Value: 40
  misc_feature: MA Experiment 20001911 PARAMETER Experiment Name: At_Drought_Reproduction_P Parameter: Organism Value: A. thaliana
  misc_feature: MA Experiment 20001911 PARAMETER Experiment Name: At_Drought_Reproduction_P Parameter: Plant Line Value: WS
  misc_feature: MA Experiment 20001911 PARAMETER Experiment Name: At_Drought_Reproduction_P Parameter: Timepoint (day) Value: 10
  misc_feature: MA Experiment 20001911 PARAMETER Experiment Name: At_Drought_Reproduction_P Parameter: Tissue Value: Flowers
  misc_feature: MA Experiment 20001911 PARAMETER Experiment Name: At_Drought_Reproduction_P Parameter: Treatment Value: Drought vs. No Drought
aacaacaaattcgattcttataactgtttccctctcatctttacacaaaagtattctaatcgatttcaatggcgggtcgtggtaaaacactcggatctgggtctgcgaagaaggcaacaacaagaagcagcaaagccggtctccaattccctgtgggtcgtatcgctcgtttcttgaagaaaggcaaatacgccgaacgtgttggtgccggagctccggtttacttagccgccgttctcgaatacctcgccgctgaggtattggaattggctggaaacgcagcgagggataacaagaagacgaggattgttccaaggcatattcaattggcggtgaggaacgatgaagaattgagcaaattgcttggagatgtgactattgctaatggaggtgtgatgcctaacattcacaatcttcttcttcctaagaagaccggtgcttccaagccatctgctgaagacgattgattaatcaaccaaatccactctcttgtgttttttgagtttttaaggctttttaagagtaatttagattagatctatggtgaagaaagaatctatcttctgtgttttttgaattgaattgaatgttcatatgctttcaatttcttatggaatcaagattttaacttttctt

SEQ ID NO: 30154 - protein, 132 aa, Arabidopsis thaliana
  peptide (1)..(132): Ceres Seq. ID no. 12337351
  misc_feature (4)..(121): Pfam Name: Core histone H2A/H2B/H3/H4 Pfam Description: Core histone H2A/H2B/H3/H4
  misc_feature (1)..(132): Homolog of NCBI NO: 7439702 NR Description: histone H2A (clone TH254) - wheat
  misc_feature (1)..(132): Homolog of NCBI NO: 34393263 NR Description: histone H2A [Oryza sativa (japonica
  misc_feature (1)..(132): Homolog of NCBI NO: 34393264 NR Description: putative histone H2A [Oryza sativa (japonica
  misc_feature (1)..(132): Homolog of NCBI NO: 2130105 NR Description: histone H2A.4 - wheat
  misc_feature (1)..(132): Homolog of NCBI NO: 29837243 NR Description: putative histone H2A [Oryza sativa (japonica
  misc_feature (1)..(131): Homolog of NCBI NO: 21617982 NR Description: histone H2A-like protein [Arabidopsis thaliana]
  misc_feature (1)..(131): Homolog of NCBI NO: 15237024 NR Description: histone H2A- like protein
  misc_feature (1)..(131): Homolog of NCBI NO: 15239697 NR Description: histone H2A (gb|AAF64418.1)
  misc_feature (1)..(132): Homolog of NCBI NO: 15232330 NR Description: histone H2A, putative
  misc_feature (1)..(132): Homolog of NCBI NO: 15223708 NR Description: histone H2A, putative
MAGRGKTLGSGSAKKATTRSSKAGLQFPVGRIARFLKKGKYAERVGAGAPVYLAAVLEYLAAEVLELAGNAARDNKKTRIVPRHIQLAVRNDEELSKLLGDVTIANGGVMPNIHNLLLPKKTGASKPSAEDD

SEQ ID NO: 30155 - DNA, 1105 bp, Arabidopsis thaliana
  misc_feature (1)..(1105): Ceres Seq. ID no. 12343433
  misc_feature: MA Experiment ID: 108434 Result: Up-regulated in Transcription
  misc_feature: MA Experiment 108434 PARAMETER Experiment Name: At_Root_Tips_cDNA_P Parameter: Tissue Value: Root Tips
  misc_feature: MA Experiment ID: 108462 Result: Down-regulated in Transcription
  misc_feature: MA Experiment 108462 PARAMETER Experiment Name: At_Germinating_Seeds_cDNA_P Parameter: Age (day) Value: 2 vs. 0
  misc_feature: MA Experiment 108462 PARAMETER Experiment Name: At_Germinating_Seeds_cDNA_P Parameter: Tissue Value: Germinating Seeds
  misc_feature: MA Experiment ID: 108463 Result: Down-regulated in Transcription
  misc_feature: MA Experiment 108463 PARAMETER Experiment Name: At_Germinating_Seeds_cDNA_P Parameter: Age (day) Value: 3 vs. 0
  misc_feature: MA Experiment 108463 PARAMETER Experiment Name: At_Germinating_Seeds_cDNA_P Parameter: Tissue Value: Germinating Seeds
  misc_feature: MA Experiment ID: 108464 Result: Down-regulated in Transcription
  misc_feature: MA Experiment 108464 PARAMETER Experiment Name: At_Germinating_Seeds_cDNA_P Parameter: Age (day) Value: 4 vs. 0
  misc_feature: MA Experiment 108464 PARAMETER Experiment Name: At_Germinating_Seeds_cDNA_P Parameter: Tissue Value: Germinating Seeds
  misc_feature: MA Experiment ID: 108569 Result: Up-regulated in Transcription
  misc_feature: MA Experiment 108569 PARAMETER Experiment Name: At_0.001%_MeJA__cDNA_P Parameter: Timepoint (hr) Value: 6
  misc_feature: MA Experiment 108569 PARAMETER Experiment Name: At_0.001%_MeJA__cDNA_P Parameter: Tissue Value: Aerial
  misc_feature: MA Experiment 108569 PARAMETER Experiment Name: At_0.001%_MeJA__cDNA_P Parameter: Treatment Value: 0.001% MeJA vs. No Treatment
  misc_feature: MA Experiment ID: 108573 Result: Up-regulated in Transcription
  misc_feature: MA Experiment 108573 PARAMETER Experiment Name: At_Drought_cDNA_P Parameter: Timepoint (hr) Value: 6
  misc_feature: MA Experiment 108573 PARAMETER Experiment Name: At_Drought_cDNA_P Parameter: Tissue Value: Aerial
  misc_feature: MA Experiment 108573 PARAMETER Experiment Name: At_Drought_cDNA_P Parameter: Treatment Value: Drought vs. No Drought
  misc_feature: MA Experiment ID: 108585 Result: Up-regulated in Transcription
  misc_feature: MA Experiment 108585 PARAMETER Experiment Name: At_5mM_NaNP_cDNA_P Parameter: Timepoint (hr) Value: 6
  misc_feature: MA Experiment 108585 PARAMETER Experiment Name: At_5mM_NaNP_cDNA_P Parameter: Tissue Value: Aerial
  misc_feature: MA Experiment 108585 PARAMETER Experiment Name: At_5mM_NaNP_cDNA_P Parameter: Treatment Value: null
  misc_feature: MA Experiment ID: 20000179 Result: Down-regulated in Transcription
  misc_feature: MA Experiment 20000179 PARAMETER Experiment Name: At_Germinating_Seeds_P Parameter: Age (hr) Value: 6 vs. 0
  misc_feature: MA Experiment 20000179 PARAMETER Experiment Name: At_Germinating_Seeds_P Parameter: Tissue Value: Germinating Seeds
  misc_feature: MA Experiment ID: 20000180 Result: Down-regulated in Transcription
  misc_feature: MA Experiment 20000180 PARAMETER Experiment Name: At_Germinating_Seeds_P Parameter: Age (hr) Value: 24 vs. 0
  misc_feature: MA Experiment 20000180 PARAMETER Experiment Name: At_Germinating_Seeds_P Parameter: Tissue Value: Germinating Seeds
  misc_feature: MA Experiment ID: 20000227 Result: Up-regulated in Transcription
  misc_feature: MA Experiment 20000227 PARAMETER Experiment Name: At_Root-Tips-vs-Tops_P Parameter: Tissue Value: Root Tips vs. Root Tops
  misc_feature: MA Experiment ID: 20000265 Result: Up-regulated in Transcription
  misc_feature: MA Experiment 20000265 PARAMETER Experiment Name: At_Open_Flower_P Parameter: Age (day) Value: 21
  misc_feature: MA Experiment 20000265 PARAMETER Experiment Name: At_Open_Flower_P Parameter: Plant Line Value: WS
  misc_feature: MA Experiment 20000265 PARAMETER Experiment Name: At_Open_Flower_P Parameter: Tissue Value: Closed Flower vs. Whole Plant
  misc_feature: MA Experiment ID: 20001451 Result: Down-regulated in Transcription
  misc_feature: MA Experiment 20001451 PARAMETER Experiment Name: At_Far-red-induction_P Parameter: Age (day) Value: 7
  misc_feature: MA Experiment 20001451 PARAMETER Experiment Name: At_Far-red-induction_P Parameter: Light Value: Far-red vs. White
  misc_feature: MA Experiment 20001451 PARAMETER Experiment Name: At_Far-red-induction_P Parameter: Organism Value: A. thaliana
  misc_feature: MA Experiment 20001451 PARAMETER Experiment Name: At_Far-red-induction_P Parameter: Plant Line Value: Columbia
  misc_feature: MA Experiment 20001451 PARAMETER Experiment Name: At_Far-red-induction_P Parameter: Timepoint (hr) Value: 24
  misc_feature: MA Experiment 20001451 PARAMETER Experiment Name: At_Far-red-induction_P Parameter: Tissue Value: Whole Plant
aagagctcaagaaacatccctccataatttgcttctcttttctccaattctcacacattcttctgcttcgttaattttctactcgatttcgctcttcagaaatttgacaatgaagcttgacactagtggattggagacaactatgcctgtgattggctttggatcaaacagtgagatgcttgatgggttttcgtctgcaccttcgtttgatcttcctcgtaccaccgattttgatgggtttcagaaaaaagctgtggagatggtgaagcctgcaaagggtacaactacacttgcgtttatctttaaggaaggtgttatggtagctgctgattctcgagctagcatgggaggatatatctcgtcgcaatctgtgaagaagattattgaaattaatccttatatgcttggtacaatggctggtggtgctgctgattgtcaattctggcatagaaatctgggaattaagtgccgtctacatgagctggcaaacaaaaggagaatctctgtttcaggagcttcaaagcttcttgctaacatgctctattcatatcgtggaatgggactttctgttggcacaatgattgctggatgggatgaaacaggccctggattgtactatgttgacaacgaaggaggacggcttaagggagacagattctctgtcggttccggttcaccatacgcttatggtgttctggacagcggatacaaattcgatatgtcggttgaagaagcctcagagttagcaaggagatccatctaccatgctacattccgtgatggagctagtggtggagttgctagcgtgtaccacgttgggccgcaaggatggacgaaactctctggagacgacgttggcgagctacattaccattattaccccgtggctccaatcaccgcggaacatgtgatggaagaggctgccgaataagtactgtgattcttgtctatcttactaagagttttattacatcacttatgttttgttcatcaatgaacagaatcatagattcaagtttcttttgtattgcgaatgatgtagacgttagtttggccacaatgatcacgttgcataatagataacataatagataacctgtttctc

SEQ ID NO: 30156 - protein, 309 aa, Arabidopsis thaliana
  peptide (1)..(309): Ceres Seq. ID no. 12343434
  misc_feature (90)..(272): Pfam Name: Proteasome A-type and B-type Pfam Description: Proteasome A-type and B-type
  misc_feature (42)..(296): Homolog of NCBI NO: 6755204 NR Description: proteasome (prosome, macropain) subunit, beta
  misc_feature (113)..(286): Homolog of NCBI NO: 14594931 NR Description: putative beta5 proteasome subunit [Nicotiana
  misc_feature (110)..(308): Homolog of NCBI NO: 16588840 NR Description: putative 20S proteasome beta subunit 5 [Prunus
  misc_feature (37)..(110): Homolog of NCBI NO: 3980264 NR Description: 20S proteasome beta subunit [Cicer arietinum]
  misc_feature (142)..(307): Homolog of NCBI NO: 3980264 NR Description: 20S proteasome beta subunit [Cicer arietinum]
  misc_feature (37)..(307): Homolog of NCBI NO: 8671510 NR Description: beta 5 subunit of 20S proteasome
  misc_feature (37)..(306): Homolog of NCBI NO: 3914430 NR Description: Proteasome subunit beta type 5 precursor (20S
  misc_feature (37)..(307): Homolog of NCBI NO: 15292875 NR Description: putative proteasome epsilon chain precursor
  misc_feature (37)..(307): Homolog of NCBI NO: 15222152 NR Description: 20S proteasome beta subunit E1 (PBE1)
  misc_feature (37)..(309): Homolog of NCBI NO: 15231544 NR Description: 26S proteasome beta subunit, putative
RAQETSLHNLLLFSPILTHSSASLIFYSISLFRNLTMKLDTSGLETTMPVIGFGSNSEMLDGFSSAPSFDLPRTTDFDGFQKKAVEMVKPAKGTTTLAFIFKEGVMVAADSRASMGGYISSQSVKKIIEINPYMLGTMAGGAADCQFWHRNLGIKCRLHELANKRRISVSGASKLLANMLYSYRGMGLSVGTMIAGWDETGPGLYYVDNEGGRLKGDRFSVGSGSPYAYGVLDSGYKFDMSVEEASELARRSIYHATFRDGASGGVASVYHVGPQGWTKLSGDDVGELHYHYYPVAPITAEHVMEEAAE

SEQ ID NO: 30157 - protein, 273 aa, Arabidopsis thaliana
  peptide (1)..(273): Ceres Seq. ID no. 12343435
  misc_feature (54)..(236): Pfam Name: Proteasome A-type and B-type Pfam Description: Proteasome A-type and B-type
  misc_feature (6)..(260): Homolog of NCBI NO: 6755204 NR Description: proteasome (prosome, macropain) subunit, beta
  misc_feature (77)..(250): Homolog of NCBI NO: 14594931 NR Description: putative beta5 proteasome subunit [Nicotiana
  misc_feature (74)..(272): Homolog of NCBI NO: 16588840 NR Description: putative 20S proteasome beta subunit 5 [Prunus
  misc_feature (1)..(74): Homolog of NCBI NO: 3980264 NR Description: 20S proteasome beta subunit [Cicer arietinum]
  misc_feature (106)..(271): Homolog of NCBI NO: 3980264 NR Description: 20S proteasome beta subunit [Cicer arietinum]
  misc_feature (1)..(271): Homolog of NCBI NO: 8671510 NR Description: beta 5 subunit of 20S proteasome
  misc_feature (1)..(270): Homolog of NCBI NO: 3914430 NR Description: Proteasome subunit beta type 5 precursor (20S
  misc_feature (1)..(271): Homolog of NCBI NO: 15292875 NR Description: putative proteasome epsilon chain precursor
  misc_feature (1)..(271): Homolog of NCBI NO: 15222152 NR Description: 20S proteasome beta subunit E1 (PBE1)
  misc_feature (1)..(273): Homolog of NCBI NO: 15231544 NR Description: 26S proteasome beta subunit, putative
MKLDTSGLETTMPVIGFGSNSEMLDGFSSAPSFDLPRTTDFDGFQKKAVEMVKPAKGTTTLAFIFKEGVMVAADSRASMGGYISSQSVKKIIEINPYMLGTMAGGAADCQFWHRNLGIKCRLHELANKRRISVSGASKLLANMLYSYRGMGLSVGTMIAGWDETGPGLYYVDNEGGRLKGDRFSVGSGSPYAYGVLDSGYKFDMSVEEASELARRSIYHATFRDGASGGVASVYHVGPQGWTKLSGDDVGELHYHYYPVAPITAEHVMEEAAE

SEQ ID NO: 30158 - protein, 262 aa, Arabidopsis thaliana
  peptide (1)..(262): Ceres Seq. ID no. 12343436
  misc_feature (43)..(225): Pfam Name: Proteasome A-type and B-type Pfam Description: Proteasome A-type and B-type
  misc_feature (1)..(249): Homolog of NCBI NO: 6755204 NR Description: proteasome (prosome, macropain) subunit, beta
  misc_feature (66)..(239): Homolog of NCBI NO: 14594931 NR Description: putative beta5 proteasome subunit [Nicotiana
  misc_feature (63)..(261): Homolog of NCBI NO: 16588840 NR Description: putative 20S proteasome beta subunit 5 [Prunus
  misc_feature (1)..(63): Homolog of NCBI NO: 3980264 NR Description: 20S proteasome beta subunit [Cicer arietinum]
  misc_feature (95)..(260): Homolog of NCBI NO: 3980264 NR Description: 20S proteasome beta subunit [Cicer arietinum]
  misc_feature (1)..(260): Homolog of NCBI NO: 8671510 NR Description: beta 5 subunit of 20S proteasome
  misc_feature (1)..(259): Homolog of NCBI NO: 3914430 NR Description: Proteasome subunit beta type 5 precursor (20S
  misc_feature (1)..(260): Homolog of NCBI NO: 15292875 NR Description: putative proteasome epsilon chain precursor
  misc_feature (1)..(260): Homolog of NCBI NO: 15222152 NR Description: 20S proteasome beta subunit E1 (PBE1)
  misc_feature (1)..(262): Homolog of NCBI NO: 15231544 NR Description: 26S proteasome beta subunit, putative
MPVIGFGSNSEMLDGFSSAPSFDLPRTTDFDGFQKKAVEMVKPAKGTTTLAFIFKEGVMVAADSRASMGGYISSQSVKKIIEINPYMLGTMAGGAADCQFWHRNLGIKCRLHELANKRRISVSGASKLLANMLYSYRGMGLSVGTMIAGWDETGPGLYYVDNEGGRLKGDRFSVGSGSPYAYGVLDSGYKFDMSVEEASELARRSIYHATFRDGASGGVASVYHVGPQGWTKLSGDDVGELHYHYYPVAPITAEHVMEEAAE

SEQ ID NO: 30159 - DNA, 805 bp, Arabidopsis thaliana
  misc_feature (1)..(805): Ceres Seq. ID no. 12322655
  misc_feature: MA Experiment ID: 108461 Result: Up-regulated in Transcription
  misc_feature: MA Experiment 108461 PARAMETER Experiment Name: At_Germinating_Seeds_cDNA_P Parameter: Age (day) Value: 1 vs. 0
  misc_feature: MA Experiment 108461 PARAMETER Experiment Name: At_Germinating_Seeds_cDNA_P Parameter: Tissue Value: Germinating Seeds
  misc_feature: MA Experiment ID: 108462 Result: Up-regulated in Transcription
  misc_feature: MA Experiment 108462 PARAMETER Experiment Name: At_Germinating_Seeds_cDNA_P Parameter: Age (day) Value: 2 vs. 0
  misc_feature: MA Experiment 108462 PARAMETER Experiment Name: At_Germinating_Seeds_cDNA_P Parameter: Tissue Value: Germinating Seeds
  misc_feature: MA Experiment ID: 108463 Result: Up-regulated in Transcription
  misc_feature: MA Experiment 108463 PARAMETER Experiment Name: At_Germinating_Seeds_cDNA_P Parameter: Age (day) Value: 3 vs. 0
  misc_feature: MA Experiment 108463 PARAMETER Experiment Name: At_Germinating_Seeds_cDNA_P Parameter: Tissue Value: Germinating Seeds
  misc_feature: MA Experiment ID: 108464 Result: Up-regulated in Transcription
  misc_feature: MA Experiment 108464 PARAMETER Experiment Name: At_Germinating_Seeds_cDNA_P Parameter: Age (day) Value: 4 vs. 0
  misc_feature: MA Experiment 108464 PARAMETER Experiment Name: At_Germinating_Seeds_cDNA_P Parameter: Tissue Value: Germinating Seeds
  misc_feature: MA Experiment ID: 108501 Result: Down-regulated in Transcription
  misc_feature: MA Experiment 108501 PARAMETER Experiment Name: At_ap2_floral_buds_cDNA_P Parameter: Plant Line Value: ap2 (Ler.)
  misc_feature: MA Experiment 108501 PARAMETER Experiment Name: At_ap2_floral_buds_cDNA_P Parameter: Tissue Value: Closed Flower
  misc_feature: MA Experiment ID: 108595 Result: Up-regulated in Transcription
  misc_feature: MA Experiment 108595 PARAMETER Experiment Name: At_Ler-pi_Ovule_cDNA_P Parameter: Plant Line Value: null
  misc_feature: MA Experiment ID: 108667 Result: Down-regulated in Transcription
  misc_feature: MA Experiment 108667 PARAMETER Experiment Name: At_2mM_SA_cDNA_P Parameter: Plant Line Value: WS
  misc_feature: MA Experiment 108667 PARAMETER Experiment Name: At_2mM_SA_cDNA_P Parameter: Timepoint (hr) Value: 1
  misc_feature: MA Experiment 108667 PARAMETER Experiment Name: At_2mM_SA_cDNA_P Parameter: Treatment Value: 2mM SA vs. No Treatment
  misc_feature: MA Experiment ID: 108668 Result: Down-regulated in Transcription
  misc_feature: MA Experiment 108668 PARAMETER Experiment Name: At_2mM_SA_cDNA_P Parameter: Plant Line Value: WS
  misc_feature: MA Experiment 108668 PARAMETER Experiment Name: At_2mM_SA_cDNA_P Parameter: Timepoint (hr) Value: 6
  misc_feature: MA Experiment 108668 PARAMETER Experiment Name: At_2mM_SA_cDNA_P Parameter: Treatment Value: 2mM SA vs. No Treatment
  misc_feature: MA Experiment ID: 20000069 Result: Down-regulated in Transcription
  misc_feature: MA Experiment 20000069 PARAMETER Experiment Name: At_100uM_ABA_Mutants_cDNA_P Parameter: Plant Line Value: CS23
  misc_feature: MA Experiment 20000069 PARAMETER Experiment Name: At_100uM_ABA_Mutants_cDNA_P Parameter: Timepoint (hr) Value: 6
  misc_feature: MA Experiment 20000069 PARAMETER Experiment Name: At_100uM_ABA_Mutants_cDNA_P Parameter: Tissue Value: Aerial
  misc_feature: MA Experiment 20000069 PARAMETER Experiment Name: At_100uM_ABA_Mutants_cDNA_P Parameter: Treatment Value: 100uM ABA vs. No Treatment
  misc_feature: MA Experiment ID: 20000072 Result: Down-regulated in Transcription
  misc_feature: MA Experiment 20000072 PARAMETER Experiment Name: At_100uM_ABA_Mutants_cDNA_P Parameter: Plant Line Value: CS8105
  misc_feature: MA Experiment 20000072 PARAMETER Experiment Name: At_100uM_ABA_Mutants_cDNA_P Parameter: Timepoint (hr) Value: 6
  misc_feature: MA Experiment 20000072 PARAMETER Experiment Name: At_100uM_ABA_Mutants_cDNA_P Parameter: Tissue Value: Aerial
  misc_feature: MA Experiment 20000072 PARAMETER Experiment Name: At_100uM_ABA_Mutants_cDNA_P Parameter: Treatment Value: 100uM ABA vs. No Treatment
  misc_feature: MA Experiment ID: 20000089 Result: Down-regulated in Transcription
  misc_feature: MA Experiment ID: 20000111 Result: Down-regulated in Transcription
  misc_feature: MA Experiment 20000111 PARAMETER Experiment Name: At_42deg_Heat_cDNA_P Parameter: Temperature (deg C) Value: 42 vs. 22
  misc_feature: MA Experiment 20000111 PARAMETER Experiment Name: At_42deg_Heat_cDNA_P Parameter: Timepoint (hr) Value: 6
  misc_feature: MA Experiment 20000111 PARAMETER Experiment Name: At_42deg_Heat_cDNA_P Parameter: Tissue Value: Aerial
  misc_feature: MA Experiment ID: 20000182 Result: Down-regulated in Transcription
  misc_feature: MA Experiment 20000182 PARAMETER Experiment Name: At_2mM_SA_P Parameter: Age (day) Value: 14
  misc_feature: MA Experiment 20000182 PARAMETER Experiment Name: At_2mM_SA_P Parameter: Organism Value: A. thaliana
  misc_feature: MA Experiment 20000182 PARAMETER Experiment Name: At_2mM_SA_P Parameter: Plant Line Value: WS
  misc_feature: MA Experiment 20000182 PARAMETER Experiment Name: At_2mM_SA_P Parameter: Timepoint (hr) Value: 6
  misc_feature: MA Experiment 20000182 PARAMETER Experiment Name: At_2mM_SA_P Parameter: Tissue Value: Aerial
  misc_feature: MA Experiment 20000182 PARAMETER Experiment Name: At_2mM_SA_P Parameter: Treatment Value: 2mM SA vs. No Treatment
  misc_feature: MA Experiment ID: 20000264 Result: Down-regulated in Transcription
  misc_feature: MA Experiment 20000264 PARAMETER Experiment Name: At_Open_Flower_P Parameter: Age (day) Value: 21
  misc_feature: MA Experiment 20000264 PARAMETER Experiment Name: At_Open_Flower_P Parameter: Plant Line Value: WS
  misc_feature: MA Experiment 20000264 PARAMETER Experiment Name: At_Open_Flower_P Parameter: Tissue Value: Open Flower vs. Whole Plant
  misc_feature: MA Experiment ID: 20000265 Result: Down-regulated in Transcription
  misc_feature: MA Experiment 20000265 PARAMETER Experiment Name: At_Open_Flower_P Parameter: Age (day) Value: 21
  misc_feature: MA Experiment 20000265 PARAMETER Experiment Name: At_Open_Flower_P Parameter: Plant Line Value: WS
  misc_feature: MA Experiment 20000265 PARAMETER Experiment Name: At_Open_Flower_P Parameter: Tissue Value: Closed Flower vs. Whole Plant
  misc_feature: MA Experiment ID: 20000286 Result: Down-regulated in Transcription
  misc_feature: MA Experiment 20000286 PARAMETER Experiment Name: At_Open_Flower_P Parameter: Age (day) Value: 21
  misc_feature: MA Experiment 20000286 PARAMETER Experiment Name: At_Open_Flower_P Parameter: Plant Line Value: WS
  misc_feature: MA Experiment 20000286 PARAMETER Experiment Name: At_Open_Flower_P Parameter: Tissue Value: Half Open vs. Whole Plant
  misc_feature: MA Experiment ID: 20000438 Result: Down-regulated in Transcription
  misc_feature: MA Experiment 20000438 PARAMETER Experiment Name: At_Shoots__P Parameter: Age (day) Value: 14
  misc_feature: MA Experiment 20000438 PARAMETER Experiment Name: At_Shoots__P Parameter: Tissue Value: Shoots vs. Whole Plant
  misc_feature: MA Experiment ID: 20000439 Result: Down-regulated in Transcription
  misc_feature: MA Experiment 20000439 PARAMETER Experiment Name: At_Roots__P Parameter: Age (day) Value: 14 vs. 21
  misc_feature: MA Experiment 20000439 PARAMETER Experiment Name: At_Roots__P Parameter: Organism Value: A. thaliana
  misc_feature: MA Experiment 20000439 PARAMETER Experiment Name: At_Roots__P Parameter: Tissue Value: Roots vs. Whole Plant
  misc_feature: MA Experiment ID: 20000441 Result: Down-regulated in Transcription
  misc_feature: MA Experiment 20000441 PARAMETER Experiment Name: At_1uM_BR-BRZ__P Parameter: Tissue Value: Shoot Apices
  misc_feature: MA Experiment 20000441 PARAMETER Experiment Name: At_1uM_BR-BRZ__P Parameter: Treatment Value: 1uM BR vs. No Treatment
  misc_feature: MA Experiment ID: 20000495 Result: Up-regulated in Transcription
  misc_feature: MA Experiment 20000495 PARAMETER Experiment Name: At_Guard_Cells_P Parameter: Harvest Date Value: 8/2/2002
  misc_feature: MA Experiment 20000495 PARAMETER Experiment Name: At_Guard_Cells_P Parameter: Organism Value: A. thaliana
  misc_feature: MA Experiment 20000495 PARAMETER Experiment Name: At_Guard_Cells_P Parameter: Tissue Value: Guard Cells vs. Leaves
  misc_feature: MA Experiment ID: 20000794 Result: Down-regulated in Transcription
  misc_feature: MA Experiment 20000794 PARAMETER Experiment Name: At_Petals_P Parameter: Age (day) Value: 23-25 days
  misc_feature: MA Experiment 20000794 PARAMETER Experiment Name: At_Petals_P Parameter: Plant Line Value: WS
  misc_feature: MA Experiment 20000794 PARAMETER Experiment Name: At_Petals_P Parameter: Tissue Value: Petals vs. Whole plant
  misc_feature: MA Experiment ID: 20001556 Result: Down-regulated in Transcription
  misc_feature: MA Experiment 20001556 PARAMETER Experiment Name: At_Drought_Soil_Dry_P Parameter: Age (day) Value: 26
  misc_feature: MA Experiment 20001556 PARAMETER Experiment Name: At_Drought_Soil_Dry_P Parameter: Organism Value: A. thaliana
  misc_feature: MA Experiment 20001556 PARAMETER Experiment Name: At_Drought_Soil_Dry_P Parameter: Plant Line Value: WS
  misc_feature: MA Experiment 20001556 PARAMETER Experiment Name: At_Drought_Soil_Dry_P Parameter: Post Timepoint (hr) Value: None
  misc_feature: MA Experiment 20001556 PARAMETER Experiment Name: At_Drought_Soil_Dry_P Parameter: Post-Treatment Value: None
  misc_feature: MA Experiment 20001556 PARAMETER Experiment Name: At_Drought_Soil_Dry_P Parameter: Timepoint (day) Value: 12
  misc_feature: MA Experiment 20001556 PARAMETER Experiment Name: At_Drought_Soil_Dry_P Parameter: Treatment Value: Drought vs. No Drought
  misc_feature: MA Experiment ID: 20001558 Result: Down-regulated in Transcription
  misc_feature: MA Experiment 20001558 PARAMETER Experiment Name: At_Drought_Soil_Dry_P Parameter: Age (day) Value: 27
  misc_feature: MA Experiment 20001558 PARAMETER Experiment Name: At_Drought_Soil_Dry_P Parameter: Organism Value: A. thaliana
  misc_feature: MA Experiment 20001558 PARAMETER Experiment Name: At_Drought_Soil_Dry_P Parameter: Plant Line Value: WS
  misc_feature: MA Experiment 20001558 PARAMETER Experiment Name: At_Drought_Soil_Dry_P Parameter: Post Timepoint (hr) Value: 6
  misc_feature: MA Experiment 20001558 PARAMETER Experiment Name: At_Drought_Soil_Dry_P Parameter: Post-Treatment Value: Re-Water vs. No Drought
  misc_feature: MA Experiment 20001558 PARAMETER Experiment Name: At_Drought_Soil_Dry_P Parameter: Timepoint (day) Value: 13
  misc_feature: MA Experiment 20001558 PARAMETER Experiment Name: At_Drought_Soil_Dry_P Parameter: Treatment Value: Drought vs. No Drought
  misc_feature: MA Experiment ID: 20001559 Result: Down-regulated in Transcription
  misc_feature: MA Experiment 20001559 PARAMETER Experiment Name: At_Drought_Soil_Dry_P Parameter: Age (day) Value: 28
  misc_feature: MA Experiment 20001559 PARAMETER Experiment Name: At_Drought_Soil_Dry_P Parameter: Organism Value: A. thaliana
  misc_feature: MA Experiment 20001559 PARAMETER Experiment Name: At_Drought_Soil_Dry_P Parameter: Plant Line Value: WS
  misc_feature: MA Experiment 20001559 PARAMETER Experiment Name: At_Drought_Soil_Dry_P Parameter: Post Timepoint (hr) Value: 29
  misc_feature: MA Experiment 20001559 PARAMETER Experiment Name: At_Drought_Soil_Dry_P Parameter: Post-Treatment Value: Re-Water vs. No Drought
  misc_feature: MA Experiment 20001559 PARAMETER Experiment Name: At_Drought_Soil_Dry_P Parameter: Timepoint (day) Value: 14
  misc_feature: MA Experiment 20001559 PARAMETER Experiment Name: At_Drought_Soil_Dry_P Parameter: Treatment Value: Drought vs. No Drought
  misc_feature: MA Experiment ID: 20001768 Result: Up-regulated in Transcription
  misc_feature: MA Experiment 20001768 PARAMETER Experiment Name: At_Far-red-enriched-adult_P Parameter: Age (day) Value: 28
  misc_feature: MA Experiment 20001768 PARAMETER Experiment Name: At_Far-red-enriched-adult_P Parameter: Light Value: Far-red enriched vs. White
  misc_feature: MA Experiment 20001768 PARAMETER Experiment Name: At_Far-red-enriched-adult_P Parameter: Organism Value: A. thaliana
  misc_feature: MA Experiment 20001768 PARAMETER Experiment Name: At_Far-red-enriched-adult_P Parameter: Plant Line Value: Columbia
  misc_feature: MA Experiment 20001768 PARAMETER Experiment Name: At_Far-red-enriched-adult_P Parameter: Timepoint (hr) Value: 1
  misc_feature: MA Experiment 20001768 PARAMETER Experiment Name: At_Far-red-enriched-adult_P Parameter: Tissue Value: Aerial
  misc_feature: MA Experiment ID: 20001911 Result: Down-regulated in Transcription
  misc_feature: MA Experiment 20001911 PARAMETER Experiment Name: At_Drought_Reproduction_P Parameter: Age (day) Value: 40
  misc_feature: MA Experiment 20001911 PARAMETER Experiment Name: At_Drought_Reproduction_P Parameter: Organism Value: A. thaliana
  misc_feature: MA Experiment 20001911 PARAMETER Experiment Name: At_Drought_Reproduction_P Parameter: Plant Line Value: WS
  misc_feature: MA Experiment 20001911 PARAMETER Experiment Name: At_Drought_Reproduction_P Parameter: Timepoint (day) Value: 10
  misc_feature: MA Experiment 20001911 PARAMETER Experiment Name: At_Drought_Reproduction_P Parameter: Tissue Value: Flowers
  misc_feature: MA Experiment 20001911 PARAMETER Experiment Name: At_Drought_Reproduction_P Parameter: Treatment Value: Drought vs. No Drought
cccttagttacacaattttaaaataaatataccgttacacaaaatacacaaaaatggcaaacttgtgtacacttgttggttttcttgtcatcatcttcttcaatgtgtttgcacctgcctcttctgccagtcaccccgtcgaatggtcgctcgggaaagactatagctcgttggctaccggaaagtccttcgcggtcggcgataccatcgtgttcaactacggtgcgggtcacacggtggacgaagtgagcgaaagtgactacaagagttgcacattggggaacgcaatttcttcggacagtagtggaaccacaagtatagctctcaagacacctggtcctcactacttcatctgcggtatccccggccactgcactggcgggatgaagctctctgtcattgttccagcagcttcatcaggcggcagtactggagacggtaccactgacaaaaatacacccgtacaagacggaaaaactacaccctcagaaggtaaaaaggctagtccttctgcttcggccacggccgtgttgaagccgttggatgctttggttgtgacttgtgtagttgcattgatgtacactttggctctcccttaattagttggtttcttttgttttcctgtggtttgactcgtttgaaggaccaggctagaggcagtgctgttatatgcttcttataattaattatctctcatgatttttcctatgttttgtctcgtatttatcaattttttttgttcgctttcttaaaaaaaaaaaaaaaaagtaaattaaaatacgaagcaccatccataatgattaac

SEQ ID NO: 30160 - protein, 181 aa, Arabidopsis thaliana
  peptide (1)..(181): Ceres Seq. ID no. 12322656
  misc_feature (31)..(111): Pfam Name: Plastocyanin-like domain Pfam Description: Plastocyanin-like domain
  misc_feature (1)..(122): Homolog of NCBI NO: 25282796 NR Description: uclacyanin II [imported] - Arabidopsis thaliana
  misc_feature (1)..(162): Homolog of NCBI NO: 25453522 NR Description: blue copper-binding protein II [imported] -
  misc_feature (1)..(162): Homolog of NCBI NO: 25453521 NR Description: blue copper-binding protein II [imported] -
  misc_feature (1)..(165): Homolog of NCBI NO: 38346158 NR Description: OSJNBa0079A21.5 [Oryza sativa (japonica
  misc_feature (1)..(162): Homolog of NCBI NO: 15224960 NR Description: phytocyanin
  misc_feature (1)..(162): Homolog of NCBI NO: 21554060 NR Description: phytocyanin [Arabidopsis thaliana]
  misc_feature (11)..(157): Homolog of NCBI NO: 14140127 NR Description: uclacyanin 3-like protein [Oryza sativa]
  misc_feature (2)..(179): Homolog of NCBI NO: 2493318 NR Description: Blue copper protein precursor
  misc_feature (4)..(180): Homolog of NCBI NO: 15219890 NR Description: uclacyanin II, putative; protein id: At1g22480.1
  misc_feature (1)..(181): Homolog of NCBI NO: 15218396 NR Description: blue copper protein, putative
MANLCTLVGFLVIIFFNVFAPASSASHPVEWSLGKDYSSLATGKSFAVGDTIVFNYGAGHTVDEVSESDYKSCTLGNAISSDSSGTTSIALKTPGPHYFICGIPGHCTGGMKLSVIVPAASSGGSTGDGTTDKNTPVQDGKTTPSEGKKASPSASATAVLKPLDALVVTCVVALMYTLALP

SEQ ID NO: 30161 - DNA, 895 bp, Arabidopsis thaliana
  misc_feature (1)..(895): Ceres Seq. ID no. 12321347
  misc_feature: MA Experiment ID: 108572 Result: Up-regulated in Transcription
  misc_feature: MA Experiment 108572 PARAMETER Experiment Name: At_Drought_cDNA_P Parameter: Timepoint (hr) Value: 1
  misc_feature: MA Experiment 108572 PARAMETER Experiment Name: At_Drought_cDNA_P Parameter: Tissue Value: Aerial
  misc_feature: MA Experiment 108572 PARAMETER Experiment Name: At_Drought_cDNA_P Parameter: Treatment Value: Drought vs. No Drought
  misc_feature: MA Experiment ID: 108573 Result: Up-regulated in Transcription
  misc_feature: MA Experiment 108573 PARAMETER Experiment Name: At_Drought_cDNA_P Parameter: Timepoint (hr) Value: 6
  misc_feature: MA Experiment 108573 PARAMETER Experiment Name: At_Drought_cDNA_P Parameter: Tissue Value: Aerial
  misc_feature: MA Experiment 108573 PARAMETER Experiment Name: At_Drought_cDNA_P Parameter: Treatment Value: Drought vs. No Drought
  misc_feature: MA Experiment ID: 108579 Result: Down-regulated in Transcription
  misc_feature: MA Experiment 108579 PARAMETER Experiment Name: At_4deg_Cold_cDNA_P Parameter: Temperature (deg C) Value: 4 vs. 22
  misc_feature: MA Experiment 108579 PARAMETER Experiment Name: At_4deg_Cold_cDNA_P Parameter: Timepoint (hr) Value: 6
  misc_feature: MA Experiment 108579 PARAMETER Experiment Name: At_4deg_Cold_cDNA_P Parameter: Tissue Value: Aerial
  misc_feature: MA Experiment ID: 108595 Result: Down-regulated in Transcription
  misc_feature: MA Experiment 108595 PARAMETER Experiment Name: At_Ler-pi_Ovule_cDNA_P Parameter: Plant Line Value: null
  misc_feature: MA Experiment ID: 20000071 Result: Down-regulated in Transcription
  misc_feature: MA Experiment 20000071 PARAMETER Experiment Name: At_100uM_ABA_Mutants_cDNA_P Parameter: Plant Line Value: CS8104
  misc_feature: MA Experiment 20000071 PARAMETER Experiment Name: At_100uM_ABA_Mutants_cDNA_P Parameter: Timepoint (hr) Value: 6
  misc_feature: MA Experiment 20000071 PARAMETER Experiment Name: At_100uM_ABA_Mutants_cDNA_P Parameter: Tissue Value: Aerial
  misc_feature: MA Experiment 20000071 PARAMETER Experiment Name: At_100uM_ABA_Mutants_cDNA_P Parameter: Treatment Value: 100uM ABA vs. No Treatment
  misc_feature: MA Experiment ID: 20000086 Result: Down-regulated in Transcription
  misc_feature: MA Experiment 20000086 PARAMETER Experiment Name: At_100uM_ABA_Mutants_cDNA_P Parameter: Plant Line Value: CS22
  misc_feature: MA Experiment 20000086 PARAMETER Experiment Name: At_100uM_ABA_Mutants_cDNA_P Parameter: Timepoint (hr) Value: 6
  misc_feature: MA Experiment 20000086 PARAMETER Experiment Name: At_100uM_ABA_Mutants_cDNA_P Parameter: Tissue Value: Aerial
  misc_feature: MA Experiment 20000086 PARAMETER Experiment Name: At_100uM_ABA_Mutants_cDNA_P Parameter: Treatment Value: 100uM ABA vs. No Treatment
aaagccaaagcctttcttcttcttcttttcttccgattattcccaaacacaaaaatactgctgaggaaaagcaatccacacgattcgattcaaagttttcattttttctctaaaagtttggattttgatttcgttgctgaacggaaaaagaatcagctcctttcagtttagggttttgggtttctgtttggtctctatcagatgatgtgtgaggagattcttcctctgtttgtgtctgtttcagatggaagacaatgataagtctccccctaaggattactataagattctagaagttgattacgacgcaactgaggaattgatcagactcaattatcggaagcttgcattgaagtggcatcctgataagcacaaaggcgatagtgcagctacagaaaaatttcaagagattaatgaagcttataatgtgctgatggaccctgctaaacgttttgagtatgatttcactggtatatatgagatccacaaatacactttacgggaatatctcgccagatttaagggaatgatactcacttgcaatgggctcggtatcagccaatcctcatcaccatggacacatcaattggctgagaccaccaaacaacagacgagcaaggatactgtataaactgaagcagaagttagaagagggctgtaaaactgtacaaaactggagctatagcgcttttatcgcgcattgatgatatagtgaaatgctttgattaggtctgttgtattgtttctttatcaatgtagaattagagaagcttgtattgtctctggcttctattaatacattcacacattggtgatggttcaaatcttttaccactctactattctcatcattcatggttttccagacttgagacaaagtgaataatacaatcta

SEQ ID NO: 30162 - protein, 128 aa, Arabidopsis thaliana
  peptide (1)..(128): Ceres Seq. ID no. 12321348
  misc_feature (11)..(76): Pfam Name: DnaJ domain Pfam Description: DnaJ domain
  misc_feature (10)..(76): Homolog of NCBI NO: 16082112 NR Description: heat shock protein DnaJ related protein
  misc_feature (10)..(76): Homolog of NCBI NO: 15595000 NR Description: heat shock protein (dnaJ-2) [Borrelia
  misc_feature (10)..(76): Homolog of NCBI NO: 13541318 NR Description: Molecular chaperone (DnaJ-related) [Thermoplasma
  misc_feature (10)..(76): Homolog of NCBI NO: 144832 NR Description: dnaJ
  misc_feature (11)..(103): Homolog of NCBI NO: 23054276 NR Description: hypothetical protein [Geobacter metallireducens]
  misc_feature (10)..(78): Homolog of NCBI NO: 16331768 NR Description: DnaJ protein [Synechocystis sp. PCC 6803]
  misc_feature (11)..(91): Homolog of NCBI NO: 39995125 NR Description: phage prohead protease, HK97 family/dnaJ domain
  misc_feature (10)..(104): Homolog of NCBI NO: 21555025 NR Description: unknown [Arabidopsis thaliana]
  misc_feature (10)..(104): Homolog of NCBI NO: 18403358 NR Description: Expressed protein
  misc_feature (1)..(128): Homolog of NCBI NO: 15237385 NR Description: putative protein
MEDNDKSPPKDYYKILEVDYDATEELIRLNYRKLALKWHPDKHKGDSAATEKFQEINEAYNVLMDPAKRFEYDFTGIYEIHKYTLREYLARFKGMILTCNGLGISQSSSPWTHQLAETTKQQTSKDTV

SEQ ID NO: 30163 - protein, 65 aa, Arabidopsis thaliana
  peptide (1)..(65): Ceres Seq. ID no. 12321349
  misc_feature (1)..(13): Homolog of NCBI NO: 16082112 NR Description: heat shock protein DnaJ related protein
  misc_feature (1)..(13): Homolog of NCBI NO: 15595000 NR Description: heat shock protein (dnaJ-2) [Borrelia
  misc_feature (1)..(13): Homolog of NCBI NO: 13541318 NR Description: Molecular chaperone (DnaJ-related) [Thermoplasma
  misc_feature (1)..(13): Homolog of NCBI NO: 144832 NR Description: dnaJ
  misc_feature (1)..(40): Homolog of NCBI NO: 23054276 NR Description: hypothetical protein [Geobacter metallireducens]
  misc_feature (1)..(15): Homolog of NCBI NO: 16331768 NR Description: DnaJ protein [Synechocystis sp. PCC 6803]
  misc_feature (1)..(28): Homolog of NCBI NO: 39995125 NR Description: phage prohead protease, HK97 family/dnaJ domain
  misc_feature (1)..(41): Homolog of NCBI NO: 21555025 NR Description: unknown [Arabidopsis thaliana]
  misc_feature (1)..(41): Homolog of NCBI NO: 18403358 NR Description: Expressed protein
  misc_feature (1)..(65): Homolog of NCBI NO: 15237385 NR Description: putative protein
MDPAKRFEYDFTGIYEIHKYTLREYLARFKGMILTCNGLGISQSSSPWTHQLAETTKQQTSKDTV

SEQ ID NO: 30164 - DNA, 2131 bp, Arabidopsis thaliana
  misc_feature (1)..(2131): Ceres Seq. ID no. 12326066
  misc_feature: MA Experiment ID: 108461 Result: Up-regulated in Transcription
  misc_feature: MA Experiment 108461 PARAMETER Experiment Name: At_Germinating_Seeds_cDNA_P Parameter: Age (day) Value: 1 vs. 0
  misc_feature: MA Experiment 108461 PARAMETER Experiment Name: At_Germinating_Seeds_cDNA_P Parameter: Tissue Value: Germinating Seeds
  misc_feature: MA Experiment ID: 108462 Result: Up-regulated in Transcription
  misc_feature: MA Experiment 108462 PARAMETER Experiment Name: At_Germinating_Seeds_cDNA_P Parameter: Age (day) Value: 2 vs. 0
  misc_feature: MA Experiment 108462 PARAMETER Experiment Name: At_Germinating_Seeds_cDNA_P Parameter: Tissue Value: Germinating Seeds
  misc_feature: MA Experiment ID: 108463 Result: Up-regulated in Transcription
  misc_feature: MA Experiment 108463 PARAMETER Experiment Name: At_Germinating_Seeds_cDNA_P Parameter: Age (day) Value: 3 vs. 0
  misc_feature: MA Experiment 108463 PARAMETER Experiment Name: At_Germinating_Seeds_cDNA_P Parameter: Tissue Value: Germinating Seeds
  misc_feature: MA Experiment ID: 108464 Result: Up-regulated in Transcription
  misc_feature: MA Experiment 108464 PARAMETER Experiment Name: At_Germinating_Seeds_cDNA_P Parameter: Age (day) Value: 4 vs. 0
  misc_feature: MA Experiment 108464 PARAMETER Experiment Name: At_Germinating_Seeds_cDNA_P Parameter: Tissue Value: Germinating Seeds
  misc_feature: MA Experiment ID: 108569 Result: Up-regulated in Transcription
  misc_feature: MA Experiment 108569 PARAMETER Experiment Name: At_0.001%_MeJA__cDNA_P Parameter: Timepoint (hr) Value: 6
  misc_feature: MA Experiment 108569 PARAMETER Experiment Name: At_0.001%_MeJA__cDNA_P Parameter: Tissue Value: Aerial
  misc_feature: MA Experiment 108569 PARAMETER Experiment Name: At_0.001%_MeJA__cDNA_P Parameter: Treatment Value: 0.001% MeJA vs. No Treatment
  misc_feature: MA Experiment ID: 108573 Result: Up-regulated in Transcription
  misc_feature: MA Experiment 108573 PARAMETER Experiment Name: At_Drought_cDNA_P Parameter: Timepoint (hr) Value: 6
  misc_feature: MA Experiment 108573 PARAMETER Experiment Name: At_Drought_cDNA_P Parameter: Tissue Value: Aerial
  misc_feature: MA Experiment 108573 PARAMETER Experiment Name: At_Drought_cDNA_P Parameter: Treatment Value: Drought vs. No Drought
  misc_feature: MA Experiment ID: 108579 Result: Down-regulated in Transcription
  misc_feature: MA Experiment 108579 PARAMETER Experiment Name: At_4deg_Cold_cDNA_P Parameter: Temperature (deg C) Value: 4 vs. 22
  misc_feature: MA Experiment 108579 PARAMETER Experiment Name: At_4deg_Cold_cDNA_P Parameter: Timepoint (hr) Value: 6
  misc_feature: MA Experiment 108579 PARAMETER Experiment Name: At_4deg_Cold_cDNA_P Parameter: Tissue Value: Aerial
  misc_feature: MA Experiment ID: 108585 Result: Up-regulated in Transcription
  misc_feature: MA Experiment 108585 PARAMETER Experiment Name: At_5mM_NaNP_cDNA_P Parameter: Timepoint (hr) Value: 6
  misc_feature: MA Experiment 108585 PARAMETER Experiment Name: At_5mM_NaNP_cDNA_P Parameter: Tissue Value: Aerial
  misc_feature: MA Experiment 108585 PARAMETER Experiment Name: At_5mM_NaNP_cDNA_P Parameter: Treatment Value: null
  misc_feature: MA Experiment ID: 108595 Result: Down-regulated in Transcription
  misc_feature: MA Experiment 108595 PARAMETER Experiment Name: At_Ler-pi_Ovule_cDNA_P Parameter: Plant Line Value: null
  misc_feature: MA Experiment ID: 20000111 Result: Down-regulated in Transcription
  misc_feature: MA Experiment 20000111 PARAMETER Experiment Name: At_42deg_Heat_cDNA_P Parameter: Temperature (deg C) Value: 42 vs. 22
  misc_feature: MA Experiment 20000111 PARAMETER Experiment Name: At_42deg_Heat_cDNA_P Parameter: Timepoint (hr) Value: 6
  misc_feature: MA Experiment 20000111 PARAMETER Experiment Name: At_42deg_Heat_cDNA_P Parameter: Tissue Value: Aerial
  misc_feature: MA Experiment ID: 20000113 Result: Down-regulated in Transcription
  misc_feature: MA Experiment 20000113 PARAMETER Experiment Name: At_42deg_Heat_cDNA_P Parameter: Temperature (deg C) Value: 42 vs. 22
  misc_feature: MA Experiment 20000113 PARAMETER Experiment Name: At_42deg_Heat_cDNA_P Parameter: Timepoint (hr) Value: 8
  misc_feature: MA Experiment 20000113 PARAMETER Experiment Name: At_42deg_Heat_cDNA_P Parameter: Tissue Value: Aerial
  misc_feature: MA Experiment ID: 20000173 Result: Down-regulated in Transcription
  misc_feature: MA Experiment 20000173 PARAMETER Experiment Name: At_42deg_Heat_P Parameter: Age (day) Value: 14
  misc_feature: MA Experiment 20000173 PARAMETER Experiment Name: At_42deg_Heat_P Parameter: Organism Value: A. thaliana
  misc_feature: MA Experiment 20000173 PARAMETER Experiment Name: At_42deg_Heat_P Parameter: Plant Line Value: WS
  misc_feature: MA Experiment 20000173 PARAMETER Experiment Name: At_42deg_Heat_P Parameter: Temperature (deg C) Value: 42 vs. 22
  misc_feature: MA Experiment 20000173 PARAMETER Experiment Name: At_42deg_Heat_P Parameter: Timepoint (hr) Value: 6
  misc_feature: MA Experiment 20000173 PARAMETER Experiment Name: At_42deg_Heat_P Parameter: Tissue Value: Aerial
  misc_feature: MA Experiment ID: 20000179 Result: Up-regulated in Transcription
  misc_feature: MA Experiment 20000179 PARAMETER Experiment Name: At_Germinating_Seeds_P Parameter: Age (hr) Value: 6 vs. 0
  misc_feature: MA Experiment 20000179 PARAMETER Experiment Name: At_Germinating_Seeds_P Parameter: Tissue Value: Germinating Seeds
  misc_feature: MA Experiment ID: 20000180 Result: Up-regulated in Transcription
  misc_feature: MA Experiment 20000180 PARAMETER Experiment Name: At_Germinating_Seeds_P Parameter: Age (hr) Value: 24 vs. 0
  misc_feature: MA Experiment 20000180 PARAMETER Experiment Name: At_Germinating_Seeds_P Parameter: Tissue Value: Germinating Seeds
  misc_feature: MA Experiment ID: 20000439 Result: Down-regulated in Transcription
  misc_feature: MA Experiment 20000439 PARAMETER Experiment Name: At_Roots__P Parameter: Age (day) Value: 14 vs. 21
  misc_feature: MA Experiment 20000439 PARAMETER Experiment Name: At_Roots__P Parameter: Organism Value: A. thaliana
  misc_feature: MA Experiment 20000439 PARAMETER Experiment Name: At_Roots__P Parameter: Tissue Value: Roots vs. Whole Plant
  misc_feature: MA Experiment ID: 20001450 Result: Up-regulated in Transcription
  misc_feature: MA Experiment 20001450 PARAMETER Experiment Name: At_Far-red-induction_P Parameter: Age (day) Value: 7
  misc_feature: MA Experiment 20001450 PARAMETER Experiment Name: At_Far-red-induction_P Parameter: Light Value: Far-red vs. White
  misc_feature: MA Experiment 20001450 PARAMETER Experiment Name: At_Far-red-induction_P Parameter: Organism Value: A. thaliana
  misc_feature: MA Experiment 20001450 PARAMETER Experiment Name: At_Far-red-induction_P Parameter: Plant Line Value: Columbia
  misc_feature: MA Experiment 20001450 PARAMETER Experiment Name: At_Far-red-induction_P Parameter: Timepoint (hr) Value: 8
  misc_feature: MA Experiment 20001450 PARAMETER Experiment Name: At_Far-red-induction_P Parameter: Tissue Value: Whole Plant
  misc_feature: MA Experiment ID: 20001557 Result: Down-regulated in Transcription
  misc_feature: MA Experiment 20001557 PARAMETER Experiment Name: At_Drought_Soil_Dry_P Parameter: Age (day) Value: 27
  misc_feature: MA Experiment 20001557 PARAMETER Experiment Name: At_Drought_Soil_Dry_P Parameter: Organism Value: A. thaliana
  misc_feature: MA Experiment 20001557 PARAMETER Experiment Name: At_Drought_Soil_Dry_P Parameter: Plant Line Value: WS
  misc_feature: MA Experiment 20001557 PARAMETER Experiment Name: At_Drought_Soil_Dry_P Parameter: Post Timepoint (hr) Value: 3
  misc_feature: MA Experiment 20001557 PARAMETER Experiment Name: At_Drought_Soil_Dry_P Parameter: Post-Treatment Value: Re-Water vs. No Drought
  misc_feature: MA Experiment 20001557 PARAMETER Experiment Name: At_Drought_Soil_Dry_P Parameter: Timepoint (day) Value: 13
  misc_feature: MA Experiment 20001557 PARAMETER Experiment Name: At_Drought_Soil_Dry_P Parameter: Treatment Value: Drought vs. No Drought
aaacgacaataagctccacagtgagttcttctcagcaatcacaatctatctggtttaagccctcactatcctctctctcaaatcgcggagtctccgaagtttctctggtaattttcaaatctgaagttttgctttggatatcacgatttttgttaatcagccgcgatcgagaagagcgtttttactctctcgttcgcatcaatgcaacatatttcccaatttcgtgatgttgcgtcttcatcgttccttacttctctctttttgagttctgtttggtataaatgcgatccttttttttccttccttgcctaatatttctcgtttccttgcaattacggttataaaaagtcagacaaaatgcagtcgtcaacgtatgcggttaaaggaaacgctgcgtttgcgtttcagagacggaccttctcttctgacagatcggcgacttctaccggaattcgcttcgctggtactaagagcttagccaccaccggatcactctactgttctgattctaaagccatgggagcgacgcttgctcgtgctgatgacgggatccagagcgttatgagtttctcttctgtcaaagctcgatcggtcagagctcaagcctcctctgatggagatgaagaagaagctatacctctgagatctgaagggaaaagctctggaacagttttgccttttgttggtgttgcttgtcttggtgctatactctttggttatcatctcggggtggttaatggtgctcttgaatatcttgctaaggatcttgggatcgccgaaaatactgttttgcaaggatggattgttagttctctgcttgctggtgctacggtaggttcattcactggaggtgcattagctgacaaatttggacgaacaagaacttttcaattggatgctatcccgcttgccattggagctttcttatgtgcaacagctcagagtgtgcagactatgattgtgggacgtctgctcgctggaattggaattggaatctcatcagcgattgtaccactttacatatctgagatatcaccaactgaaatccgtggagcactcggatctgtgaaccagttgttcatctgtataggaatacttgcagccttgatagctggattaccccttgcagcaaaccctctatggtggaggacgatgtttggtgttgcagttatcccttccgttctattggccataggaatggctttttctccagaaagcccaaggtggctcgttcagcaaggaaaagtctctgaagctgaaaaggcgatcaaaactttgtatggtaaagaaagagtggttgaactagttcgcgacttatcagcctctggccaaggttcttctgagccggaggcaggatggtttgatctattcagcagccgctactggaaagttgtaagcgtaggtgcggctctcttcttgtttcaacagttagccgggataaacgcagttgtgtattactccacatcggtattccgtagtgcgggaatccaatcagatgttgcagccagtgctctcgttggagcatcaaatgtctttggcactgctgttgcttcatcgttgatggataaaatgggaaggaaaagtcttttactgacaagctttggtggaatggctttgtcaatgctgttactctccttgtccttcacatggaaggctcttgctgcctattctggaacccttgccgttgttggaactgttctatatgtcctgtcattctcacttggtgctggcccggtaccggctcttcttcttccagagatatttgcatcccgaatcagagcaaaagccgtcgctctttctctcggcatgcactggatatcaaactttgtgatcggactatacttcttaagcgttgtgactaaattcggaatcagcagtgtctacttgggttttgctggagtctgcgtccttgcggtcctctacattgcaggaaacgtcgtcgagactaaaggtcgatcactggaggaaatagagcttgctcttacatctggagcttgaaattaaacaaaagaaatcagcagaacaaaaaccagtttgtttcatcatttagtttgtgagtctttctctaatctgctactcttaaattgtacaatggacgaagttatcaataacgagaaatcttttcatgacc

SEQ ID NO: 30165 - protein, 546 aa, Arabidopsis thaliana
  peptide (1)..(546): Ceres Seq. ID no. 12326067
  misc_feature (108)..(542): Pfam Name: Sugar (and other) transporter Pfam Description: Sugar (and other) transporter
  misc_feature (77)..(543): Homolog of NCBI NO: 8347246 NR Description: hexose transporter [Solanum tuberosum]
  misc_feature (55)..(543): Homolog of NCBI NO: 8347248 NR Description: hexose transporter [Zea mays]
  misc_feature (50)..(543): Homolog of NCBI NO: 8347244 NR Description: hexose transporter [Nicotiana tabacum]
  misc_feature (1)..(543): Homolog of NCBI NO: 9858106 NR Description: putative glucose translocator [Mesembryanthemum
  misc_feature (72)..(543): Homolog of NCBI NO: 2688830 NR Description: putative sugar transporter [Prunus armeniaca]
  misc_feature (1)..(543): Homolog of NCBI NO: 8347242 NR Description: hexose transporter [Spinacia oleracea]
  misc_feature (1)..(544): Homolog of NCBI NO: 15625046 NR Description: hexose transporter pGlT [Olea europaea]
  misc_feature (34)..(542): Homolog of NCBI NO: 8347250 NR Description: hexose transporter [Arabidopsis thaliana]
  misc_feature (1)..(546): Homolog of NCBI NO: 11278994 NR Description: sugar transporter-like protein - Arabidopsis
  misc_feature (1)..(546): Homolog of NCBI NO: 18417892 NR Description: sugar transporter-like protein
MQSSTYAVKGNAAFAFQRRTFSSDRSATSTGIRFAGTKSLATTGSLYCSDSKAMGATLARADDGIQSVMSFSSVKARSVRAQASSDGDEEEAIPLRSEGKSSGTVLPFVGVACLGAILFGYHLGVVNGALEYLAKDLGIAENTVLQGWIVSSLLAGATVGSFTGGALADKFGRTRTFQLDAIPLAIGAFLCATAQSVQTMIVGRLLAGIGIGISSAIVPLYISEISPTEIRGALGSVNQLFICIGILAALIAGLPLAANPLWWRTMFGVAVIPSVLLAIGMAFSPESPRWLVQQGKVSEAEKAIKTLYGKERVVELVRDLSASGQGSSEPEAGWFDLFSSRYWKVVSVGAALFLFQQLAGINAVVYYSTSVFRSAGIQSDVAASALVGASNVFGTAVASSLMDKMGRKSLLLTSFGGMALSMLLLSLSFTWKALAAYSGTLAVVGTVLYVLSFSLGAGPVPALLLPEIFASRIRAKAVALSLGMHWISNFVIGLYFLSVVTKFGISSVYLGFAGVCVLAVLYIAGNVVETKGRSLEEIELALTSGA

SEQ ID NO: 30166 - protein, 493 aa, Arabidopsis thaliana
  peptide (1)..(493): Ceres Seq. ID no. 12326068
  misc_feature (55)..(489): Pfam Name: Sugar (and other) transporter Pfam Description: Sugar (and other) transporter
  misc_feature (24)..(490): Homolog of NCBI NO: 8347246 NR Description: hexose transporter [Solanum tuberosum]
  misc_feature (2)..(490): Homolog of NCBI NO: 8347248 NR Description: hexose transporter [Zea mays]
  misc_feature (1)..(490): Homolog of NCBI NO: 8347244 NR Description: hexose transporter [Nicotiana tabacum]
  misc_feature (1)..(490): Homolog of NCBI NO: 9858106 NR Description: putative glucose translocator [Mesembryanthemum
  misc_feature (19)..(490): Homolog of NCBI NO: 2688830 NR Description: putative sugar transporter [Prunus armeniaca]
  misc_feature (1)..(490): Homolog of NCBI NO: 8347242 NR Description: hexose transporter [Spinacia oleracea]
  misc_feature (1)..(491): Homolog of NCBI NO: 15625046 NR Description: hexose transporter pGlT [Olea europaea]
  misc_feature (1)..(489): Homolog of NCBI NO: 8347250 NR Description: hexose transporter [Arabidopsis thaliana]
  misc_feature (1)..(493): Homolog of NCBI NO: 11278994 NR Description: sugar transporter-like protein - Arabidopsis
  misc_feature (1)..(493): Homolog of NCBI NO: 18417892 NR Description: sugar transporter-like protein
MGATLARADDGIQSVMSFSSVKARSVRAQASSDGDEEEAIPLRSEGKSSGTVLPFVGVACLGAILFGYHLGVVNGALEYLAKDLGIAENTVLQGWIVSSLLAGATVGSFTGGALADKFGRTRTFQLDAIPLAIGAFLCATAQSVQTMIVGRLLAGIGIGISSAIVPLYISEISPTEIRGALGSVNQLFICIGILAALIAGLPLAANPLWWRTMFGVAVIPSVLLAIGMAFSPESPRWLVQQGKVSEAEKAIKTLYGKERVVELVRDLSASGQGSSEPEAGWFDLFSSRYWKVVSVGAALFLFQQLAGINAVVYYSTSVFRSAGIQSDVAASALVGASNVFGTAVASSLMDKMGRKSLLLTSFGGMALSMLLLSLSFTWKALAAYSGTLAVVGTVLYVLSFSLGAGPVPALLLPEIFASRIRAKAVALSLGMHWISNFVIGLYFLSVVTKFGISSVYLGFAGVCVLAVLYIAGNVVETKGRSLEEIELALTSGA

SEQ ID NO: 30167 - protein, 478 aa, Arabidopsis thaliana
  peptide (1)..(478): Ceres Seq. ID no. 12326069
  misc_feature (40)..(474): Pfam Name: Sugar (and other) transporter Pfam Description: Sugar (and other) transporter
  misc_feature (9)..(475): Homolog of NCBI NO: 8347246 NR Description: hexose transporter [Solanum tuberosum]
  misc_feature (1)..(475): Homolog of NCBI NO: 8347248 NR Description: hexose transporter [Zea mays]
  misc_feature (1)..(475): Homolog of NCBI NO: 8347244 NR Description: hexose transporter [Nicotiana tabacum]
  misc_feature (1)..(475): Homolog of NCBI NO: 9858106 NR Description: putative glucose translocator [Mesembryanthemum
  misc_feature (4)..(475): Homolog of NCBI NO: 2688830 NR Description: putative sugar transporter [Prunus armeniaca]
  misc_feature (1)..(475): Homolog of NCBI NO: 8347242 NR Description: hexose transporter [Spinacia oleracea]
  misc_feature (1)..(476): Homolog of NCBI NO: 15625046 NR Description: hexose transporter pGlT [Olea europaea]
  misc_feature (1)..(474): Homolog of NCBI NO: 8347250 NR Description: hexose transporter [Arabidopsis thaliana]
  misc_feature (1)..(478): Homolog of NCBI NO: 11278994 NR Description: sugar transporter-like protein - Arabidopsis
  misc_feature (1)..(478): Homolog of NCBI NO: 18417892 NR Description: sugar transporter-like protein
MSFSSVKARSVRAQASSDGDEEEAIPLRSEGKSSGTVLPFVGVACLGAILFGYHLGVVNGALEYLAKDLGIAENTVLQGWIVSSLLAGATVGSFTGGALADKFGRTRTFQLDAIPLAIGAFLCATAQSVQTMIVGRLLAGIGIGISSAIVPLYISEISPTEIRGALGSVNQLFICIGILAALIAGLPLAANPLWWRTMFGVAVIPSVLLAIGMAFSPESPRWLVQQGKVSEAEKAIKTLYGKERVVELVRDLSASGQGSSEPEAGWFDLFSSRYWKVVSVGAALFLFQQLAGINAVVYYSTSVFRSAGIQSDVAASALVGASNVFGTAVASSLMDKMGRKSLLLTSFGGMALSMLLLSLSFTWKALAAYSGTLAVVGTVLYVLSFSLGAGPVPALLLPEIFASRIRAKAVALSLGMHWISNFVIGLYFLSVVTKFGISSVYLGFAGVCVLAVLYIAGNVVETKGRSLEEIELALTSGA

SEQ ID NO: 30168 - DNA, 1075 bp, Arabidopsis thaliana
  misc_feature (1)..(1075): Ceres Seq. ID no. 12605070
  misc_feature: MA Experiment ID: 20000166 Result: Up-regulated in Transcription
  misc_feature: MA Experiment 20000166 PARAMETER Experiment Name: At_100uM_ABA_P Parameter: Age (day) Value: 14
  misc_feature: MA Experiment 20000166 PARAMETER Experiment Name: At_100uM_ABA_P Parameter: Organism Value: A. thaliana
  misc_feature: MA Experiment 20000166 PARAMETER Experiment Name: At_100uM_ABA_P Parameter: Plant Line Value: WS
  misc_feature: MA Experiment 20000166 PARAMETER Experiment Name: At_100uM_ABA_P Parameter: Timepoint (hr) Value: 1
  misc_feature: MA Experiment 20000166 PARAMETER Experiment Name: At_100uM_ABA_P Parameter: Tissue Value: Aerial
  misc_feature: MA Experiment 20000166 PARAMETER Experiment Name: At_100uM_ABA_P Parameter: Treatment Value: 100uM ABA vs. No Treatment
  misc_feature: MA Experiment ID: 20000171 Result: Up-regulated in Transcription
  misc_feature: MA Experiment 20000171 PARAMETER Experiment Name: At_42deg_Heat_P Parameter: Age (day) Value: 14
  misc_feature: MA Experiment 20000171 PARAMETER Experiment Name: At_42deg_Heat_P Parameter: Organism Value: A. thaliana
  misc_feature: MA Experiment 20000171 PARAMETER Experiment Name: At_42deg_Heat_P Parameter: Plant Line Value: WS
  misc_feature: MA Experiment 20000171 PARAMETER Experiment Name: At_42deg_Heat_P Parameter: Temperature (deg C) Value: 42 vs. 22
  misc_feature: MA Experiment 20000171 PARAMETER Experiment Name: At_42deg_Heat_P Parameter: Timepoint (hr) Value: 1
  misc_feature: MA Experiment 20000171 PARAMETER Experiment Name: At_42deg_Heat_P Parameter: Tissue Value: Aerial
  misc_feature: MA Experiment ID: 20000173 Result: Up-regulated in Transcription
  misc_feature: MA Experiment 20000173 PARAMETER Experiment Name: At_42deg_Heat_P Parameter: Age (day) Value: 14
  misc_feature: MA Experiment 20000173 PARAMETER Experiment Name: At_42deg_Heat_P Parameter: Organism Value: A. thaliana
  misc_feature: MA Experiment 20000173 PARAMETER Experiment Name: At_42deg_Heat_P Parameter: Plant Line Value: WS
  misc_feature: MA Experiment 20000173 PARAMETER Experiment Name: At_42deg_Heat_P Parameter: Temperature (deg C) Value: 42 vs. 22
  misc_feature: MA Experiment 20000173 PARAMETER Experiment Name: At_42deg_Heat_P Parameter: Timepoint (hr) Value: 6
  misc_feature: MA Experiment 20000173 PARAMETER Experiment Name: At_42deg_Heat_P Parameter: Tissue Value: Aerial
  misc_feature: MA Experiment ID: 20000182 Result: Up-regulated in Transcription
  misc_feature: MA Experiment 20000182 PARAMETER Experiment Name: At_2mM_SA_P Parameter: Age (day) Value: 14
  misc_feature: MA Experiment 20000182 PARAMETER Experiment Name: At_2mM_SA_P Parameter: Organism Value: A. thaliana
  misc_feature: MA Experiment 20000182 PARAMETER Experiment Name: At_2mM_SA_P Parameter: Plant Line Value: WS
  misc_feature: MA Experiment 20000182 PARAMETER Experiment Name: At_2mM_SA_P Parameter: Timepoint (hr) Value: 6
  misc_feature: MA Experiment 20000182 PARAMETER Experiment Name: At_2mM_SA_P Parameter: Tissue Value: Aerial
  misc_feature: MA Experiment 20000182 PARAMETER Experiment Name: At_2mM_SA_P Parameter: Treatment Value: 2mM SA vs. No Treatment
  misc_feature: MA Experiment ID: 20000213 Result: Up-regulated in Transcription
  misc_feature: MA Experiment 20000213 PARAMETER Experiment Name: At_4deg_Cold_P Parameter: Timepoint (hr) Value: 2
  misc_feature: MA Experiment ID: 20000214 Result: Up-regulated in Transcription
  misc_feature: MA Experiment 20000214 PARAMETER Experiment Name: At_4deg_Cold_P Parameter: Timepoint (hr) Value: 6
  misc_feature: MA Experiment ID: 20000234 Result: Down-regulated in Transcription
  misc_feature: MA Experiment 20000234 PARAMETER Experiment Name: At_Siliques_P Parameter: Age (day) Value: 21
  misc_feature: MA Experiment 20000234 PARAMETER Experiment Name: At_Siliques_P Parameter: Organism Value: A. thaliana
  misc_feature: MA Experiment 20000234 PARAMETER Experiment Name: At_Siliques_P Parameter: Plant Line Value: WS
  misc_feature: MA Experiment 20000234 PARAMETER Experiment Name: At_Siliques_P Parameter: Tissue Value: Less Than 5mm Siliques vs. Whole Plant
  misc_feature: MA Experiment ID: 20000265 Result: Down-regulated in Transcription
  misc_feature: MA Experiment 20000265 PARAMETER Experiment Name: At_Open_Flower_P Parameter: Age (day) Value: 21
  misc_feature: MA Experiment 20000265 PARAMETER Experiment Name: At_Open_Flower_P Parameter: Plant Line Value: WS
  misc_feature: MA Experiment 20000265 PARAMETER Experiment Name: At_Open_Flower_P Parameter: Tissue Value: Closed Flower vs. Whole Plant
  misc_feature: MA Experiment ID: 20000267 Result: Up-regulated in Transcription
  misc_feature: MA Experiment 20000267 PARAMETER Experiment Name: At_Drought_P Parameter: Age (day) Value: 7
  misc_feature: MA Experiment 20000267 PARAMETER Experiment Name: At_Drought_P Parameter: Organism Value: A. thaliana
  misc_feature: MA Experiment 20000267 PARAMETER Experiment Name: At_Drought_P Parameter: Plant Line Value: WS
  misc_feature: MA Experiment 20000267 PARAMETER Experiment Name: At_Drought_P Parameter: Timepoint (hr) Value: 6
  misc_feature: MA Experiment 20000267 PARAMETER Experiment Name: At_Drought_P Parameter: Tissue Value: Whole Plant
  misc_feature: MA Experiment 20000267 PARAMETER Experiment Name: At_Drought_P Parameter: Treatment Value: Drought vs. No Drought
  misc_feature: MA Experiment ID: 20000268 Result: Up-regulated in Transcription
  misc_feature: MA Experiment 20000268 PARAMETER Experiment Name: At_100mM_NaCl__P Parameter: Age (day) Value: 14
  misc_feature: MA Experiment 20000268 PARAMETER Experiment Name: At_100mM_NaCl__P Parameter: Organism Value: A. thaliana
  misc_feature: MA Experiment 20000268 PARAMETER Experiment Name: At_100mM_NaCl__P Parameter: Plant Line Value: WS
  misc_feature: MA Experiment 20000268 PARAMETER Experiment Name: At_100mM_NaCl__P Parameter: Timepoint (hr) Value: 6
  misc_feature: MA Experiment 20000268 PARAMETER Experiment Name: At_100mM_NaCl__P Parameter: Tissue Value: Whole Plant
  misc_feature: MA Experiment 20000268 PARAMETER Experiment Name: At_100mM_NaCl__P Parameter: Treatment Value: 100mM NaCl vs. No Treatment
  misc_feature: MA Experiment ID: 20000436 Result: Up-regulated in Transcription
  misc_feature: MA Experiment 20000436 PARAMETER Experiment Name: At_Drought_P Parameter: Age (day) Value: 7
  misc_feature: MA Experiment 20000436 PARAMETER Experiment Name: At_Drought_P Parameter: Organism Value: A. thaliana
  misc_feature: MA Experiment 20000436 PARAMETER Experiment Name: At_Drought_P Parameter: Plant Line Value: WS
  misc_feature: MA Experiment 20000436 PARAMETER Experiment Name: At_Drought_P Parameter: Timepoint (hr) Value: 12
  misc_feature: MA Experiment 20000436 PARAMETER Experiment Name: At_Drought_P Parameter: Tissue Value: Whole Plant
  misc_feature: MA Experiment 20000436 PARAMETER Experiment Name: At_Drought_P Parameter: Treatment Value: Drought vs. No Drought
  misc_feature: MA Experiment ID: 20000437 Result: Up-regulated in Transcription
  misc_feature: MA Experiment 20000437 PARAMETER Experiment Name: At_Drought_P Parameter: Age (day) Value: 8
  misc_feature: MA Experiment 20000437 PARAMETER Experiment Name: At_Drought_P Parameter: Organism Value: A. thaliana
  misc_feature: MA Experiment 20000437 PARAMETER Experiment Name: At_Drought_P Parameter: Plant Line Value: WS
  misc_feature: MA Experiment 20000437 PARAMETER Experiment Name: At_Drought_P Parameter: Timepoint (hr) Value: 24
  misc_feature: MA Experiment 20000437 PARAMETER Experiment Name: At_Drought_P Parameter: Tissue Value: Whole Plant
  misc_feature: MA Experiment 20000437 PARAMETER Experiment Name: At_Drought_P Parameter: Treatment Value: Drought vs. No Drought
  misc_feature: MA Experiment ID: 20000438 Result: Down-regulated in Transcription
  misc_feature: MA Experiment 20000438 PARAMETER Experiment Name: At_Shoots__P Parameter: Age (day) Value: 14
  misc_feature: MA Experiment 20000438 PARAMETER Experiment Name: At_Shoots__P Parameter: Tissue Value: Shoots vs. Whole Plant
  misc_feature: MA Experiment ID: 20000453 Result: Up-regulated in Transcription
  misc_feature: MA Experiment 20000453 PARAMETER Experiment Name: At_100uM_ABA_P Parameter: Age (day) Value: 15
  misc_feature: MA Experiment 20000453 PARAMETER Experiment Name: At_100uM_ABA_P Parameter: Organism Value: A. thaliana
  misc_feature: MA Experiment 20000453 PARAMETER Experiment Name: At_100uM_ABA_P Parameter: Plant Line Value: WS
  misc_feature: MA Experiment 20000453 PARAMETER Experiment Name: At_100uM_ABA_P Parameter: Timepoint (hr) Value: 24
  misc_feature: MA Experiment 20000453 PARAMETER Experiment Name: At_100uM_ABA_P Parameter: Tissue Value: Aerial
  misc_feature: MA Experiment 20000453 PARAMETER Experiment Name: At_100uM_ABA_P Parameter: Treatment Value: 100uM ABA vs. No Treatment
  misc_feature: MA Experiment ID: 20000495 Result: Down-regulated in Transcription
  misc_feature: MA Experiment 20000495 PARAMETER Experiment Name: At_Guard_Cells_P Parameter: Harvest Date Value: 8/2/2002
  misc_feature: MA Experiment 20000495 PARAMETER Experiment Name: At_Guard_Cells_P Parameter: Organism Value: A. thaliana
  misc_feature: MA Experiment 20000495 PARAMETER Experiment Name: At_Guard_Cells_P Parameter: Tissue Value: Guard Cells vs. Leaves
  misc_feature: MA Experiment ID: 20000794 Result: Up-regulated in Transcription
  misc_feature: MA Experiment 20000794 PARAMETER Experiment Name: At_Petals_P Parameter: Age (day) Value: 23-25 days
  misc_feature: MA Experiment 20000794 PARAMETER Experiment Name: At_Petals_P Parameter: Plant Line Value: WS
  misc_feature: MA Experiment 20000794 PARAMETER Experiment Name: At_Petals_P Parameter: Tissue Value: Petals vs. Whole plant
  misc_feature: MA Experiment ID: 20001248 Result: Up-regulated in Transcription
  misc_feature: MA Experiment 20001248 PARAMETER Experiment Name: At_Far-red-induction_P Parameter: Age (day) Value: 7
  misc_feature: MA Experiment 20001248 PARAMETER Experiment Name: At_Far-red-induction_P Parameter: Light Value: Far-red vs. White
  misc_feature: MA Experiment 20001248 PARAMETER Experiment Name: At_Far-red-induction_P Parameter: Organism Value: A. thaliana
  misc_feature: MA Experiment 20001248 PARAMETER Experiment Name: At_Far-red-induction_P Parameter: Plant Line Value: Columbia
  misc_feature: MA Experiment 20001248 PARAMETER Experiment Name: At_Far-red-induction_P Parameter: Timepoint (hr) Value: 4
  misc_feature: MA Experiment 20001248 PARAMETER Experiment Name: At_Far-red-induction_P Parameter: Tissue Value: Whole Plant
  misc_feature: MA Experiment ID: 20001450 Result: Up-regulated in Transcription
  misc_feature: MA Experiment 20001450 PARAMETER Experiment Name: At_Far-red-induction_P Parameter: Age (day) Value: 7
  misc_feature: MA Experiment 20001450 PARAMETER Experiment Name: At_Far-red-induction_P Parameter: Light Value: Far-red vs. White
  misc_feature: MA Experiment 20001450 PARAMETER Experiment Name: At_Far-red-induction_P Parameter: Organism Value: A. thaliana
  misc_feature: MA Experiment 20001450 PARAMETER Experiment Name: At_Far-red-induction_P Parameter: Plant Line Value: Columbia
  misc_feature: MA Experiment 20001450 PARAMETER Experiment Name: At_Far-red-induction_P Parameter: Timepoint (hr) Value: 8
  misc_feature: MA Experiment 20001450 PARAMETER Experiment Name: At_Far-red-induction_P Parameter: Tissue Value: Whole Plant
  misc_feature: MA Experiment ID: 20001451 Result: Up-regulated in Transcription
  misc_feature: MA Experiment 20001451 PARAMETER Experiment Name: At_Far-red-induction_P Parameter: Age (day) Value: 7
  misc_feature: MA Experiment 20001451 PARAMETER Experiment Name: At_Far-red-induction_P Parameter: Light Value: Far-red vs. White
  misc_feature: MA Experiment 20001451 PARAMETER Experiment Name: At_Far-red-induction_P Parameter: Organism Value: A. thaliana
  misc_feature: MA Experiment 20001451 PARAMETER Experiment Name: At_Far-red-induction_P Parameter: Plant Line Value: Columbia
  misc_feature: MA Experiment 20001451 PARAMETER Experiment Name: At_Far-red-induction_P Parameter: Timepoint (hr) Value: 24
  misc_feature: MA Experiment 20001451 PARAMETER Experiment Name: At_Far-red-induction_P Parameter: Tissue Value: Whole Plant
  misc_feature: MA Experiment ID: 20001556 Result: Down-regulated in Transcription
  misc_feature: MA Experiment 20001556 PARAMETER Experiment Name: At_Drought_Soil_Dry_P Parameter: Age (day) Value: 26
  misc_feature: MA Experiment 20001556 PARAMETER Experiment Name: At_Drought_Soil_Dry_P Parameter: Organism Value: A. thaliana
  misc_feature: MA Experiment 20001556 PARAMETER Experiment Name: At_Drought_Soil_Dry_P Parameter: Plant Line Value: WS
  misc_feature: MA Experiment 20001556 PARAMETER Experiment Name: At_Drought_Soil_Dry_P Parameter: Post Timepoint (hr) Value: None
  misc_feature: MA Experiment 20001556 PARAMETER Experiment Name: At_Drought_Soil_Dry_P Parameter: Post-Treatment Value: None
  misc_feature: MA Experiment 20001556 PARAMETER Experiment Name: At_Drought_Soil_Dry_P Parameter: Timepoint (day) Value: 12
  misc_feature: MA Experiment 20001556 PARAMETER Experiment Name: At_Drought_Soil_Dry_P Parameter: Treatment Value: Drought vs. No Drought
  misc_feature: MA Experiment ID: 20001558 Result: Down-regulated in Transcription
  misc_feature: MA Experiment 20001558 PARAMETER Experiment Name: At_Drought_Soil_Dry_P Parameter: Age (day) Value: 27
  misc_feature: MA Experiment 20001558 PARAMETER Experiment Name: At_Drought_Soil_Dry_P Parameter: Organism Value: A. thaliana
  misc_feature: MA Experiment 20001558 PARAMETER Experiment Name: At_Drought_Soil_Dry_P Parameter: Plant Line Value: WS
  misc_feature: MA Experiment 20001558 PARAMETER Experiment Name: At_Drought_Soil_Dry_P Parameter: Post Timepoint (hr) Value: 6
  misc_feature: MA Experiment 20001558 PARAMETER Experiment Name: At_Drought_Soil_Dry_P Parameter: Post-Treatment Value: Re-Water vs. No Drought
  misc_feature: MA Experiment 20001558 PARAMETER Experiment Name: At_Drought_Soil_Dry_P Parameter: Timepoint (day) Value: 13
  misc_feature: MA Experiment 20001558 PARAMETER Experiment Name: At_Drought_Soil_Dry_P Parameter: Treatment Value: Drought vs. No Drought
  misc_feature: MA Experiment ID: 20001560 Result: Down-regulated in Transcription
  misc_feature: MA Experiment 20001560 PARAMETER Experiment Name: At_Drought_Soil_Dry_P Parameter: Age (day) Value: 28
  misc_feature: MA Experiment 20001560 PARAMETER Experiment Name: At_Drought_Soil_Dry_P Parameter: Organism Value: A. thaliana
  misc_feature: MA Experiment 20001560 PARAMETER Experiment Name: At_Drought_Soil_Dry_P Parameter: Plant Line Value: WS
  misc_feature: MA Experiment 20001560 PARAMETER Experiment Name: At_Drought_Soil_Dry_P Parameter: Post Timepoint (hr) Value: None
  misc_feature: MA Experiment 20001560 PARAMETER Experiment Name: At_Drought_Soil_Dry_P Parameter: Post-Treatment Value: None
  misc_feature: MA Experiment 20001560 PARAMETER Experiment Name: At_Drought_Soil_Dry_P Parameter: Timepoint (day) Value: 14
  misc_feature: MA Experiment 20001560 PARAMETER Experiment Name: At_Drought_Soil_Dry_P Parameter: Treatment Value: Drought vs. No Drought
aaacattactcattcacaaaaccatcttaaagcaactacacaagtcttgaaattttctcatattttctatttactatataaacttttaatcaaatcaagattaactatggctgaggagtacaagaacaacgttcccgagcacgagacaccaacggtcgcaacagaggaatcaccagcgacgacaacagaggttacggatcgtggattgtttgatttcttggggaagaaggaagaggaagtgaaacctcaagagacaacgacgctcgagtctgagttcgatcataaggctcagatctctgaaccggagttagctgcggagcacgaggaagtgaaggagaacaagattactctgctagaggagcttcaagaaaagaccgaggaagatgaggagaacaagcctagtgtcatcgaaaagcttcaccgatccaacagctcttcttcctcttcgagcgatgaagaaggtgaggaaaagaaggagaagaagaagaagatcgttgaaggagaggaagataagaaaggactagtggagaagatcaaggagaagctcccaggacaccacgacaagacagcagaggatgatgtaccagtttccactaccatcccggtaccagtgtcggagagtgtggtggagcatgaccatcccgaggaagagaagaaaggattagttgagaagatcaaggagaagcttcctggtcaccacgacgagaaagcagaggattcaccagctgtcacgtccacgccgttggttgtaacggagcatccggtggagcctacgacggagcttccagtggaacatccggaggagaagaaggggattttggaaaagatcaaagagaagcttccaggttatcatgccaagaccactgaagaggaagtgaagaaagaaaaagagtctgatgattaagcaaaatggttaaagaatgaataatgatgtgggagtgggacattcgctgtgttttgtgatcattatctttctcttttaagttgttattgtggctttcgttgattgcatttgatcctttattttgtaatttcattctatcttttatataaagtttgcatatggtttatactt

SEQ ID NO: 30169 - protein, 300 aa, Arabidopsis thaliana
  peptide (1)..(300): Ceres Seq. ID no. 12605071
  misc_feature (76)..(295): Pfam Name: Dehydrin Pfam Description: Dehydrin
  misc_feature (76)..(295): Pfam Name: Dehydrin Pfam Description: Dehydrin
  misc_feature (63)..(298): Homolog of NCBI NO: 26418686 NR Description: dehydrin [Citrus x paradisi]
  misc_feature (36)..(215): Homolog of NCBI NO: 24417358 NR Description: unknown [Arabidopsis thaliana]
  misc_feature (95)..(299): Homolog of NCBI NO: 509262 NR Description: lti45 [Arabidopsis thaliana]
  misc_feature (36)..(239): Homolog of NCBI NO: 33410861 NR Description: cold-regulated protein Cor25 [Brassica rapa
  misc_feature (36)..(299): Homolog of NCBI NO: 30686836 NR Description: dehydrin (ERD10) [Arabidopsis thaliana]
  misc_feature (63)..(298): Homolog of NCBI NO: 26418686 NR Description: dehydrin [Citrus x paradisi]
  misc_feature (95)..(299): Homolog of NCBI NO: 509262 NR Description: lti45 [Arabidopsis thaliana]
  misc_feature (36)..(299): Homolog of NCBI NO: 30686836 NR Description: dehydrin (ERD10) [Arabidopsis thaliana]
  misc_feature (7)..(300): Homolog of NCBI NO: 99681 NR Description: cold-regulated protein cor47 - Arabidopsis
  misc_feature (36)..(300): Homolog of NCBI NO: 15217937 NR Description: hypothetical protein
  misc_feature (36)..(300): Homolog of NCBI NO: 975646 NR Description: dehydrin [Arabidopsis thaliana]
  misc_feature (36)..(299): Homolog of NCBI NO: 30686832 NR Description: dehydrin (ERD10) [Arabidopsis thaliana]
  misc_feature (36)..(298): Homolog of NCBI NO: 13751875 NR Description: unknown protein [Arabidopsis thaliana]
  misc_feature (36)..(239): Homolog of NCBI NO: 33410861 NR Description: cold-regulated protein Cor25 [Brassica rapa
  misc_feature (36)..(215): Homolog of NCBI NO: 24417358 NR Description: unknown [Arabidopsis thaliana]
  misc_feature (36)..(298): Homolog of NCBI NO: 13751875 NR Description: unknown protein [Arabidopsis thaliana]
  misc_feature (36)..(299): Homolog of NCBI NO: 30686832 NR Description: dehydrin (ERD10) [Arabidopsis thaliana]
  misc_feature (36)..(300): Homolog of NCBI NO: 975646 NR Description: dehydrin [Arabidopsis thaliana]
  misc_feature (36)..(300): Homolog of NCBI NO: 15217937 NR Description: hypothetical protein
  misc_feature (7)..(300): Homolog of NCBI NO: 99681 NR Description: cold-regulated protein cor47 - Arabidopsis
NITHSQNHLKATTQVLKFSHIFYLLYKLLIKSRLTMAEEYKNNVPEHETPTVATEESPATTTEVTDRGLFDFLGKKEEEVKPQETTTLESEFDHKAQISEPELAAEHEEVKENKITLLEELQEKTEEDEENKPSVIEKLHRSNSSSSSSSDEEGEEKKEKKKKIVEGEEDKKGLVEKIKEKLPGHHDKTAEDDVPVSTTIPVPVSESVVEHDHPEEEKKGLVEKIKEKLPGHHDEKAEDSPAVTSTPLVVTEHPVEPTTELPVEHPEEKKGILEKIKEKLPGYHAKTTEEEVKKEKESDD

SEQ ID NO: 30170 - protein, 265 aa, Arabidopsis thaliana
  peptide (1)..(265): Ceres Seq. ID no. 12605072
  misc_feature (41)..(260): Pfam Name: Dehydrin Pfam Description: Dehydrin
  misc_feature (41)..(260): Pfam Name: Dehydrin Pfam Description: Dehydrin
  misc_feature (28)..(263): Homolog of NCBI NO: 26418686 NR Description: dehydrin [Citrus x paradisi]
  misc_feature (1)..(180): Homolog of NCBI NO: 24417358 NR Description: unknown [Arabidopsis thaliana]
  misc_feature (60)..(264): Homolog of NCBI NO: 509262 NR Description: lti45 [Arabidopsis thaliana]
  misc_feature (1)..(204): Homolog of NCBI NO: 33410861 NR Description: cold-regulated protein Cor25 [Brassica rapa
  misc_feature (1)..(264): Homolog of NCBI NO: 30686836 NR Description: dehydrin (ERD10) [Arabidopsis thaliana]
  misc_feature (28)..(263): Homolog of NCBI NO: 26418686 NR Description: dehydrin [Citrus x paradisi]
  misc_feature (60)..(264): Homolog of NCBI NO: 509262 NR Description: lti45 [Arabidopsis thaliana]
  misc_feature (1)..(264): Homolog of NCBI NO: 30686836 NR Description: dehydrin (ERD10) [Arabidopsis thaliana]
  misc_feature (1)..(265): Homolog of NCBI NO: 99681 NR Description: cold-regulated protein cor47 - Arabidopsis
  misc_feature (1)..(265): Homolog of NCBI NO: 15217937 NR Description: hypothetical protein
  misc_feature (1)..(265): Homolog of NCBI NO: 975646 NR Description: dehydrin [Arabidopsis thaliana]
  misc_feature (1)..(264): Homolog of NCBI NO: 30686832 NR Description: dehydrin (ERD10) [Arabidopsis thaliana]
  misc_feature (1)..(263): Homolog of NCBI NO: 13751875 NR Description: unknown protein [Arabidopsis thaliana]
  misc_feature (1)..(204): Homolog of NCBI NO: 33410861 NR Description: cold-regulated protein Cor25 [Brassica rapa
  misc_feature (1)..(180): Homolog of NCBI NO: 24417358 NR Description: unknown [Arabidopsis thaliana]
  misc_feature (1)..(263): Homolog of NCBI NO: 13751875 NR Description: unknown protein [Arabidopsis thaliana]
  misc_feature (1)..(264): Homolog of NCBI NO: 30686832 NR Description: dehydrin (ERD10) [Arabidopsis thaliana]
  misc_feature (1)..(265): Homolog of NCBI NO: 975646 NR Description: dehydrin [Arabidopsis thaliana]
  misc_feature (1)..(265): Homolog of NCBI NO: 15217937 NR Description: hypothetical protein
  misc_feature (1)..(265): Homolog of NCBI NO: 99681 NR Description: cold-regulated protein cor47 - Arabidopsis
MAEEYKNNVPEHETPTVATEESPATTTEVTDRGLFDFLGKKEEEVKPQETTTLESEFDHKAQISEPELAAEHEEVKENKITLLEELQEKTEEDEENKPSVIEKLHRSNSSSSSSSDEEGEEKKEKKKKIVEGEEDKKGLVEKIKEKLPGHHDKTAEDDVPVSTTIPVPVSESVVEHDHPEEEKKGLVEKIKEKLPGHHDEKAEDSPAVTSTPLVVTEHPVEPTTELPVEHPEEKKGILEKIKEKLPGYHAKTTEEEVKKEKESDD

SEQ ID NO: 30171 - DNA, 1139 bp, Arabidopsis thaliana; identical to SEQ ID NO: 22245
  misc_feature (1)..(1139): Ceres Seq. ID no. 12323678
  misc_feature: MA Experiment ID: 20000171 Result: Up-regulated in Transcription
  misc_feature: MA Experiment 20000171 PARAMETER Experiment Name: At_42deg_Heat_P Parameter: Age (day) Value: 14
  misc_feature: MA Experiment 20000171 PARAMETER Experiment Name: At_42deg_Heat_P Parameter: Organism Value: A. thaliana
  misc_feature: MA Experiment 20000171 PARAMETER Experiment Name: At_42deg_Heat_P Parameter: Plant Line Value: WS
  misc_feature: MA Experiment 20000171 PARAMETER Experiment Name: At_42deg_Heat_P Parameter: Temperature (deg C) Value: 42 vs. 22
  misc_feature: MA Experiment 20000171 PARAMETER Experiment Name: At_42deg_Heat_P Parameter: Timepoint (hr) Value: 1
  misc_feature: MA Experiment 20000171 PARAMETER Experiment Name: At_42deg_Heat_P Parameter: Tissue Value: Aerial
  misc_feature: MA Experiment ID: 20000173 Result: Up-regulated in Transcription
  misc_feature: MA Experiment 20000173 PARAMETER Experiment Name: At_42deg_Heat_P Parameter: Age (day) Value: 14
  misc_feature: MA Experiment 20000173 PARAMETER Experiment Name: At_42deg_Heat_P Parameter: Organism Value: A. thaliana
  misc_feature: MA Experiment 20000173 PARAMETER Experiment Name: At_42deg_Heat_P Parameter: Plant Line Value: WS
  misc_feature: MA Experiment 20000173 PARAMETER Experiment Name: At_42deg_Heat_P Parameter: Temperature (deg C) Value: 42 vs. 22
  misc_feature: MA Experiment 20000173 PARAMETER Experiment Name: At_42deg_Heat_P Parameter: Timepoint (hr) Value: 6
  misc_feature: MA Experiment 20000173 PARAMETER Experiment Name: At_42deg_Heat_P Parameter: Tissue Value: Aerial
  misc_feature: MA Experiment ID: 20000179 Result: Up-regulated in Transcription
  misc_feature: MA Experiment 20000179 PARAMETER Experiment Name: At_Germinating_Seeds_P Parameter: Age (hr) Value: 6 vs. 0
  misc_feature: MA Experiment 20000179 PARAMETER Experiment Name: At_Germinating_Seeds_P Parameter: Tissue Value: Germinating Seeds
  misc_feature: MA Experiment ID: 20000227 Result: Down-regulated in Transcription
  misc_feature: MA Experiment 20000227 PARAMETER Experiment Name: At_Root-Tips-vs-Tops_P Parameter: Tissue Value: Root Tips vs. Root Tops
  misc_feature: MA Experiment ID: 20000265 Result: Down-regulated in Transcription
  misc_feature: MA Experiment 20000265 PARAMETER Experiment Name: At_Open_Flower_P Parameter: Age (day) Value: 21
  misc_feature: MA Experiment 20000265 PARAMETER Experiment Name: At_Open_Flower_P Parameter: Plant Line Value: WS
  misc_feature: MA Experiment 20000265 PARAMETER Experiment Name: At_Open_Flower_P Parameter: Tissue Value: Closed Flower vs. Whole Plant
  misc_feature: MA Experiment ID: 20000436 Result: Up-regulated in Transcription
  misc_feature: MA Experiment 20000436 PARAMETER Experiment Name: At_Drought_P Parameter: Age (day) Value: 7
  misc_feature: MA Experiment 20000436 PARAMETER Experiment Name: At_Drought_P Parameter: Organism Value: A. thaliana
  misc_feature: MA Experiment 20000436 PARAMETER Experiment Name: At_Drought_P Parameter: Plant Line Value: WS
  misc_feature: MA Experiment 20000436 PARAMETER Experiment Name: At_Drought_P Parameter: Timepoint (hr) Value: 12
  misc_feature: MA Experiment 20000436 PARAMETER Experiment Name: At_Drought_P Parameter: Tissue Value: Whole Plant
  misc_feature: MA Experiment 20000436 PARAMETER Experiment Name: At_Drought_P Parameter: Treatment Value: Drought vs. No Drought
  misc_feature: MA Experiment ID: 20000437 Result: Up-regulated in Transcription
  misc_feature: MA Experiment 20000437 PARAMETER Experiment Name: At_Drought_P Parameter: Age (day) Value: 8
  misc_feature: MA Experiment 20000437 PARAMETER Experiment Name: At_Drought_P Parameter: Organism Value: A. thaliana
  misc_feature: MA Experiment 20000437 PARAMETER Experiment Name: At_Drought_P Parameter: Plant Line Value: WS
  misc_feature: MA Experiment 20000437 PARAMETER Experiment Name: At_Drought_P Parameter: Timepoint (hr) Value: 24
  misc_feature: MA Experiment 20000437 PARAMETER Experiment Name: At_Drought_P Parameter: Tissue Value: Whole Plant
  misc_feature: MA Experiment 20000437 PARAMETER Experiment Name: At_Drought_P Parameter: Treatment Value: Drought vs. No Drought
  misc_feature: MA Experiment ID: 20000794 Result: Up-regulated in Transcription
  misc_feature: MA Experiment 20000794 PARAMETER Experiment Name: At_Petals_P Parameter: Age (day) Value: 23-25 days
  misc_feature: MA Experiment 20000794 PARAMETER Experiment Name: At_Petals_P Parameter: Plant Line Value: WS
  misc_feature: MA Experiment 20000794 PARAMETER Experiment Name: At_Petals_P Parameter: Tissue Value: Petals vs. Whole plant
  misc_feature: MA Experiment ID: 20001451 Result: Up-regulated in Transcription
  misc_feature: MA Experiment 20001451 PARAMETER Experiment Name: At_Far-red-induction_P Parameter: Age (day) Value: 7
  misc_feature: MA Experiment 20001451 PARAMETER Experiment Name: At_Far-red-induction_P Parameter: Light Value: Far-red vs. White
  misc_feature: MA Experiment 20001451 PARAMETER Experiment Name: At_Far-red-induction_P Parameter: Organism Value: A. thaliana
  misc_feature: MA Experiment 20001451 PARAMETER Experiment Name: At_Far-red-induction_P Parameter: Plant Line Value: Columbia
  misc_feature: MA Experiment 20001451 PARAMETER Experiment Name: At_Far-red-induction_P Parameter: Timepoint (hr) Value: 24
  misc_feature: MA Experiment 20001451 PARAMETER Experiment Name: At_Far-red-induction_P Parameter: Tissue Value: Whole Plant
  misc_feature: MA Experiment ID: 20001554 Result: Up-regulated in Transcription
  misc_feature: MA Experiment 20001554 PARAMETER Experiment Name: At_Drought_Soil_Dry_P Parameter: Age (day) Value: 21
  misc_feature: MA Experiment 20001554 PARAMETER Experiment Name: At_Drought_Soil_Dry_P Parameter: Organism Value: A. thaliana
  misc_feature: MA Experiment 20001554 PARAMETER Experiment Name: At_Drought_Soil_Dry_P Parameter: Plant Line Value: WS
  misc_feature: MA Experiment 20001554 PARAMETER Experiment Name: At_Drought_Soil_Dry_P Parameter: Post Timepoint (hr) Value: None
  misc_feature: MA Experiment 20001554 PARAMETER Experiment Name: At_Drought_Soil_Dry_P Parameter: Post-Treatment Value: None
  misc_feature: MA Experiment 20001554 PARAMETER Experiment Name: At_Drought_Soil_Dry_P Parameter: Timepoint (day) Value: 7
  misc_feature: MA Experiment 20001554 PARAMETER Experiment Name: At_Drought_Soil_Dry_P Parameter: Treatment Value: Drought vs. No Drought
  misc_feature: MA Experiment ID: 20001908 Result: Up-regulated in Transcription
  misc_feature: MA Experiment 20001908 PARAMETER Experiment Name: At_Drought_Reproduction_P Parameter: Age (day) Value: 40
  misc_feature: MA Experiment 20001908 PARAMETER Experiment Name: At_Drought_Reproduction_P Parameter: Organism Value: A. thaliana
  misc_feature: MA Experiment 20001908 PARAMETER Experiment Name: At_Drought_Reproduction_P Parameter: Plant Line Value: WS
  misc_feature: MA Experiment 20001908 PARAMETER Experiment Name: At_Drought_Reproduction_P Parameter: Timepoint (day) Value: 10
  misc_feature: MA Experiment 20001908 PARAMETER Experiment Name: At_Drought_Reproduction_P Parameter: Tissue Value: Siliques
  misc_feature: MA Experiment 20001908 PARAMETER Experiment Name: At_Drought_Reproduction_P Parameter: Treatment Value: Drought vs. No Drought
  misc_feature: MA Experiment ID: 20001911 Result: Up-regulated in Transcription
  misc_feature: MA Experiment 20001911 PARAMETER Experiment Name: At_Drought_Reproduction_P Parameter: Age (day) Value: 40
  misc_feature: MA Experiment 20001911 PARAMETER Experiment Name: At_Drought_Reproduction_P Parameter: Organism Value: A. thaliana
  misc_feature: MA Experiment 20001911 PARAMETER Experiment Name: At_Drought_Reproduction_P Parameter: Plant Line Value: WS
  misc_feature: MA Experiment 20001911 PARAMETER Experiment Name: At_Drought_Reproduction_P Parameter: Timepoint (day) Value: 10
  misc_feature: MA Experiment 20001911 PARAMETER Experiment Name: At_Drought_Reproduction_P Parameter: Tissue Value: Flowers
  misc_feature: MA Experiment 20001911 PARAMETER Experiment Name: At_Drought_Reproduction_P Parameter: Treatment Value: Drought vs. No Drought

SEQ ID NO: 30172 - protein, 217 aa, Arabidopsis thaliana; identical to SEQ ID NO: 22246
  peptide (1)..(217): Ceres Seq. ID no. 12323679
  misc_feature (135)..(214): Homolog of NCBI NO: 30017516 NR Description: hypothetical protein [Oryza sativa (japonica
  misc_feature (42)..(207): Homolog of NCBI NO: 15241329 NR Description: putative protein; protein id: At5g20370.1
  misc_feature (2)..(216): Homolog of NCBI NO: 24461857 NR Description: CTV.15 [Poncirus trifoliata]
  misc_feature (1)..(216): Homolog of NCBI NO: 21618161 NR Description: serine-rich protein [Arabidopsis thaliana]
  misc_feature (1)..(216): Homolog of NCBI NO: 15238753 NR Description: serine-rich protein; protein id: At5g25280.1
  misc_feature (1)..(217): Homolog of NCBI NO: 15238947 NR Description: putative protein
  misc_feature (135)..(214): Homolog of NCBI NO: 30017516 NR Description: hypothetical protein [Oryza sativa (japonica
  misc_feature (42)..(207): Homolog of NCBI NO: 15241329 NR Description: putative protein; protein id: At5g20370.1
  misc_feature (2)..(216): Homolog of NCBI NO: 24461857 NR Description: CTV.15 [Poncirus trifoliata]
  misc_feature (1)..(216): Homolog of NCBI NO: 21618161 NR Description: serine-rich protein [Arabidopsis thaliana]
  misc_feature (1)..(216): Homolog of NCBI NO: 15238753 NR Description: serine-rich protein; protein id: At5g25280.1
  misc_feature (1)..(217): Homolog of NCBI NO: 15238947 NR Description: putative protein

SEQ ID NO: 30173 - protein, 133 aa, Arabidopsis thaliana; identical to SEQ ID NO: 22247
  peptide (1)..(133): Ceres Seq. ID no. 12323680
  misc_feature (51)..(130): Homolog of NCBI NO: 30017516 NR Description: hypothetical protein [Oryza sativa (japonica
  misc_feature (1)..(123): Homolog of NCBI NO: 15241329 NR Description: putative protein; protein id: At5g20370.1
  misc_feature (1)..(132): Homolog of NCBI NO: 24461857 NR Description: CTV.15 [Poncirus trifoliata]
  misc_feature (1)..(132): Homolog of NCBI NO: 21618161 NR Description: serine-rich protein [Arabidopsis thaliana]
  misc_feature (1)..(132): Homolog of NCBI NO: 15238753 NR Description: serine-rich protein; protein id: At5g25280.1
  misc_feature (1)..(133): Homolog of NCBI NO: 15238947 NR Description: putative protein
  misc_feature (51)..(130): Homolog of NCBI NO: 30017516 NR Description: hypothetical protein [Oryza sativa (japonica
  misc_feature (1)..(123): Homolog of NCBI NO: 15241329 NR Description: putative protein; protein id: At5g20370.1
  misc_feature (1)..(132): Homolog of NCBI NO: 24461857 NR Description: CTV.15 [Poncirus trifoliata]
  misc_feature (1)..(132): Homolog of NCBI NO: 21618161 NR Description: serine-rich protein [Arabidopsis thaliana]
  misc_feature (1)..(132): Homolog of NCBI NO: 15238753 NR Description: serine-rich protein; protein id: At5g25280.1
  misc_feature (1)..(133): Homolog of NCBI NO: 15238947 NR Description: putative protein

SEQ ID NO: 30174 - DNA, 787 bp, Arabidopsis thaliana
  misc_feature (1)..(787): Ceres Seq. ID no. 12332031
gtctaaactctaaactctaaagactttgtcatttcgtgaaccgtcgtcataactgatccttccaaagaatctccaaaatccctaaacttcgaaaatggcagaaaccgccgagacaatcaacaccacgatctcatcgccgccaccggaatccgaaagctccaccactatttctgcaatgacagatccaacatctcaagaagcagcctcaaaagacacagatctgacgaaagaagccgaatcagagaagaaaccaggaggaatctctctccgaatctggccaccgactcagaaaactcgcgacgccgttctgaatcgcctgatcgagaccttatccaccgaatcaatcctctctaagagatacggtactcttaaatctgacgatgcaaccaccgtcgcgaaacttatcgaagaagaggcttatggtgttgcttcgaatgctgtgtcgagtgatgatgatgggattaagattcttgagctttattctaaagagattagtaagaggatgcttgaatctgttaaggctagatctaatgctagtgttggaaatggaagtgtggaggatgctaatactgatgctagtgaggtttctaaagatgatgctggtcctgcttcagaggaggagaagagtgaggcttgagaaatttggttttacttccttattataatctcttgtctcttagggttttgctgttcttgtaatgatgatgatgacttgtggatttggtattatgcatatttgaagatgtttcttcttccttaatatgagtgcaagtgtcttcattttgtt

SEQ ID NO: 30175 - protein, 180 aa, Arabidopsis thaliana
  peptide (1)..(180): Ceres Seq. ID no. 12332032
  misc_feature (35)..(165): Homolog of NCBI NO: 7546725 NR Description: MFP1 attachment factor 1 [Lycopersicon esculentum]
  misc_feature (1)..(155): Homolog of NCBI NO: 21553983 NR Description: unknown [Arabidopsis thaliana]
  misc_feature (1)..(155): Homolog of NCBI NO: 18421176 NR Description: Expressed protein
  misc_feature (1)..(163): Homolog of NCBI NO: 21618109 NR Description: MFP1 attachment factor 1 [Arabidopsis thaliana]
  misc_feature (1)..(163): Homolog of NCBI NO: 15239170 NR Description: putative protein
  misc_feature (1)..(180): Homolog of NCBI NO: 21553809 NR Description: unknown [Arabidopsis thaliana]
  misc_feature (1)..(180): Homolog of NCBI NO: 18401618 NR Description: expressed protein
MAETAETINTTISSPPPESESSTTISAMTDPTSQEAASKDTDLTKEAESEKKPGGISLRIWPPTQKTRDAVLNRLIETLSTESILSKRYGTLKSDDATTVAKLIEEEAYGVASNAVSSDDDGIKILELYSKEISKRMLESVKARSNASVGNGSVEDANTDASEVSKDDAGPASEEEKSEA

SEQ ID NO: 30176 - protein, 153 aa, Arabidopsis thaliana
  peptide (1)..(153): Ceres Seq. ID no. 12332033
  misc_feature (8)..(138): Homolog of NCBI NO: 7546725 NR Description: MFP1 attachment factor 1 [Lycopersicon esculentum]
  misc_feature (1)..(128): Homolog of NCBI NO: 21553983 NR Description: unknown [Arabidopsis thaliana]
  misc_feature (1)..(128): Homolog of NCBI NO: 18421176 NR Description: Expressed protein
  misc_feature (1)..(136): Homolog of NCBI NO: 21618109 NR Description: MFP1 attachment factor 1 [Arabidopsis thaliana]
  misc_feature (1)..(136): Homolog of NCBI NO: 15239170 NR Description: putative protein
  misc_feature (1)..(153): Homolog of NCBI NO: 21553809 NR Description: unknown [Arabidopsis thaliana]
  misc_feature (1)..(153): Homolog of NCBI NO: 18401618 NR Description: expressed protein
MTDPTSQEAASKDTDLTKEAESEKKPGGISLRIWPPTQKTRDAVLNRLIETLSTESILSKRYGTLKSDDATTVAKLIEEEAYGVASNAVSSDDDGIKILELYSKEISKRMLESVKARSNASVGNGSVEDANTDASEVSKDDAGPASEEEKSEA

SEQ ID NO: 30177 - protein, 94 aa, Arabidopsis thaliana
  peptide (1)..(94): Ceres Seq. ID no. 12332034
MQPPSRNLSKKRLMVLLRMLCRVMMMGLRFLSFILKRLVRGCLNLLRLDLMLVLEMEVWRMLILMLVRFLKMMLVLLQRRRRVRLEKFGFTSLL

SEQ ID NO: 30178 - DNA, 897 bp, Arabidopsis thaliana
  misc_feature (1)..(897): Ceres Seq. ID no. 13490026
  misc_feature: MA Experiment ID: 108461 Result: Up-regulated in Transcription
  misc_feature: MA Experiment 108461 PARAMETER Experiment Name: At_Germinating_Seeds_cDNA_P Parameter: Age (day) Value: 1 vs. 0
  misc_feature: MA Experiment 108461 PARAMETER Experiment Name: At_Germinating_Seeds_cDNA_P Parameter: Tissue Value: Germinating Seeds
  misc_feature: MA Experiment ID: 108573 Result: Down-regulated in Transcription
  misc_feature: MA Experiment 108573 PARAMETER Experiment Name: At_Drought_cDNA_P Parameter: Timepoint (hr) Value: 6
  misc_feature: MA Experiment 108573 PARAMETER Experiment Name: At_Drought_cDNA_P Parameter: Tissue Value: Aerial
  misc_feature: MA Experiment 108573 PARAMETER Experiment Name: At_Drought_cDNA_P Parameter: Treatment Value: Drought vs. No Drought
  misc_feature: MA Experiment ID: 108577 Result: Down-regulated in Transcription
  misc_feature: MA Experiment 108577 PARAMETER Experiment Name: At_42deg_Heat_cDNA_P Parameter: Temperature (deg C) Value: 42 vs. 22
  misc_feature: MA Experiment 108577 PARAMETER Experiment Name: At_42deg_Heat_cDNA_P Parameter: Timepoint (hr) Value: 6
  misc_feature: MA Experiment 108577 PARAMETER Experiment Name: At_42deg_Heat_cDNA_P Parameter: Tissue Value: Aerial
  misc_feature: MA Experiment ID: 20000112 Result: Down-regulated in Transcription
  misc_feature: MA Experiment 20000112 PARAMETER Experiment Name: At_42deg_Heat_cDNA_P Parameter: Temperature (deg C) Value: 42 vs. 22
  misc_feature: MA Experiment 20000112 PARAMETER Experiment Name: At_42deg_Heat_cDNA_P Parameter: Timepoint (hr) Value: 2
  misc_feature: MA Experiment 20000112 PARAMETER Experiment Name: At_42deg_Heat_cDNA_P Parameter: Tissue Value: Aerial
  misc_feature: MA Experiment ID: 20000113 Result: Down-regulated in Transcription
  misc_feature: MA Experiment 20000113 PARAMETER Experiment Name: At_42deg_Heat_cDNA_P Parameter: Temperature (deg C) Value: 42 vs. 22
  misc_feature: MA Experiment 20000113 PARAMETER Experiment Name: At_42deg_Heat_cDNA_P Parameter: Timepoint (hr) Value: 8
  misc_feature: MA Experiment 20000113 PARAMETER Experiment Name: At_42deg_Heat_cDNA_P Parameter: Tissue Value: Aerial
  misc_feature: MA Experiment ID: 20000173 Result: Down-regulated in Transcription
  misc_feature: MA Experiment 20000173 PARAMETER Experiment Name: At_42deg_Heat_P Parameter: Age (day) Value: 14
  misc_feature: MA Experiment 20000173 PARAMETER Experiment Name: At_42deg_Heat_P Parameter: Organism Value: A. thaliana
  misc_feature: MA Experiment 20000173 PARAMETER Experiment Name: At_42deg_Heat_P Parameter: Plant Line Value: WS
  misc_feature: MA Experiment 20000173 PARAMETER Experiment Name: At_42deg_Heat_P Parameter: Temperature (deg C) Value: 42 vs. 22
  misc_feature: MA Experiment 20000173 PARAMETER Experiment Name: At_42deg_Heat_P Parameter: Timepoint (hr) Value: 6
  misc_feature: MA Experiment 20000173 PARAMETER Experiment Name: At_42deg_Heat_P Parameter: Tissue Value: Aerial
  misc_feature: MA Experiment ID: 20000179 Result: Up-regulated in Transcription
  misc_feature: MA Experiment 20000179 PARAMETER Experiment Name: At_Germinating_Seeds_P Parameter: Age (hr) Value: 6 vs. 0
  misc_feature: MA Experiment 20000179 PARAMETER Experiment Name: At_Germinating_Seeds_P Parameter: Tissue Value: Germinating Seeds
  misc_feature: MA Experiment ID: 20000180 Result: Up-regulated in Transcription
  misc_feature: MA Experiment 20000180 PARAMETER Experiment Name: At_Germinating_Seeds_P Parameter: Age (hr) Value: 24 vs. 0
  misc_feature: MA Experiment 20000180 PARAMETER Experiment Name: At_Germinating_Seeds_P Parameter: Tissue Value: Germinating Seeds
  misc_feature: MA Experiment ID: 20000437 Result: Down-regulated in Transcription
  misc_feature: MA Experiment 20000437 PARAMETER Experiment Name: At_Drought_P Parameter: Age (day) Value: 8
  misc_feature: MA Experiment 20000437 PARAMETER Experiment Name: At_Drought_P Parameter: Organism Value: A. thaliana
  misc_feature: MA Experiment 20000437 PARAMETER Experiment Name: At_Drought_P Parameter: Plant Line Value: WS
  misc_feature: MA Experiment 20000437 PARAMETER Experiment Name: At_Drought_P Parameter: Timepoint (hr) Value: 24
  misc_feature: MA Experiment 20000437 PARAMETER Experiment Name: At_Drought_P Parameter: Tissue Value: Whole Plant
  misc_feature: MA Experiment 20000437 PARAMETER Experiment Name: At_Drought_P Parameter: Treatment Value: Drought vs. No Drought
  misc_feature: MA Experiment ID: 20000794 Result: Down-regulated in Transcription
  misc_feature: MA Experiment 20000794 PARAMETER Experiment Name: At_Petals_P Parameter: Age (day) Value: 23-25 days
  misc_feature: MA Experiment 20000794 PARAMETER Experiment Name: At_Petals_P Parameter: Plant Line Value: WS
  misc_feature: MA Experiment 20000794 PARAMETER Experiment Name: At_Petals_P Parameter: Tissue Value: Petals vs. Whole plant
  misc_feature: MA Experiment ID: 20001911 Result: Down-regulated in Transcription
  misc_feature: MA Experiment 20001911 PARAMETER Experiment Name: At_Drought_Reproduction_P Parameter: Age (day) Value: 40
  misc_feature: MA Experiment 20001911 PARAMETER Experiment Name: At_Drought_Reproduction_P Parameter: Organism Value: A. thaliana
  misc_feature: MA Experiment 20001911 PARAMETER Experiment Name: At_Drought_Reproduction_P Parameter: Plant Line Value: WS
  misc_feature: MA Experiment 20001911 PARAMETER Experiment Name: At_Drought_Reproduction_P Parameter: Timepoint (day) Value: 10
  misc_feature: MA Experiment 20001911 PARAMETER Experiment Name: At_Drought_Reproduction_P Parameter: Tissue Value: Flowers
  misc_feature: MA Experiment 20001911 PARAMETER Experiment Name: At_Drought_Reproduction_P Parameter: Treatment Value: Drought vs. No Drought
aaggggaaagagaaattaaattatttatttatttctgtcatcttctccttttctatttcaaaatcccaaatctaaagcactcctcgagaaaagtgtaacaatggcgagaagaccggacgaagaatacgactacttgtttaaagtggttttgatcggagactccggtgtcggcaagtctaatctcctctctagattcactcgcaacgagttctgcttagaatccaaatccaccattggtgtcgaattcgctactcgtactctccaagtggaaggaaggactgtgaaagctcagatatgggacacggctgggcaagaacgatacagagccataactagcgcctattacagaggtgcacttggagctcttttggtctatgatgtcaccaagccaacaacgtttgagaatgtaagcaggtggttaaaagaactaagagaccatgcagattccaatatagtgatcatgttgattgggaacaagacagatctgaagcatctcagagcagttgccacagaggatgctcagagctatgcagagaaagaaggcttatctttcatcgagacatcggctctcgaggcattaaacgtagaaaaggcttttcagacgattctctcggaggtttataggatcatcagcaagaagtcgatatcttcagaccagacaactgcaaatgccaacatcaaggaaggccaaacaattgatgtggctgctacttctgaatcaaacgctaagaagccttgttgctcatcgtcttgaaaggctttgtttgtgttgcacttaaaaaaagccaaatatctatgagactttatttcaaggcttgcgttgtatttgttttctttcttttttctgttgttgataatataactcaaagataattttttatatcaattgtggagttc

SEQ ID NO: 30179 - protein, 217 aa, Arabidopsis thaliana
  peptide (1)..(217): Ceres Seq. ID no. 13490027
  misc_feature (14)..(175): Pfam Name: Ras family Pfam Description: Ras family
  misc_feature (58)..(216): Homolog of NCBI NO: 25294121 NR Description: protein F22G5.24 [imported] - Arabidopsis
  misc_feature (1)..(216): Homolog of NCBI NO: 15237828 NR Description: GTP binding protein, putative [Arabidopsis
  misc_feature (1)..(216): Homolog of NCBI NO: 3024506 NR Description: RAS-RELATED PROTEIN RAB11A
  misc_feature (1)..(216): Homolog of NCBI NO: 15222396 NR Description: GTP-binding protein, putative [Arabidopsis
  misc_feature (1)..(216): Homolog of NCBI NO: 15232652 NR Description: GTP-binding protein, putative [Arabidopsis
  misc_feature (1)..(216): Homolog of NCBI NO: 34897394 NR Description: Ras-related GTP-binding protein
  misc_feature (1)..(216): Homolog of NCBI NO: 1405561 NR Description: FSGTP1 [Fagus sylvatica]
  misc_feature (1)..(216): Homolog of NCBI NO: 3024528 NR Description: RAS-RELATED PROTEIN RAB2BV
  misc_feature (1)..(216): Homolog of NCBI NO: 3024501 NR Description: RAS-RELATED PROTEIN RAB11C
  misc_feature (1)..(217): Homolog of NCBI NO: 15217568 NR Description: GTP-binding protein, putative [Arabidopsis
MARRPDEEYDYLFKVVLIGDSGVGKSNLLSRFTRNEFCLESKSTIGVEFATRTLQVEGRTVKAQIWDTAGQERYRAITSAYYRGALGALLVYDVTKPTTFENVSRWLKELRDHADSNIVIMLIGNKTDLKHLRAVATEDAQSYAEKEGLSFIETSALEALNVEKAFQTILSEVYRIISKKSISSDQTTANANIKEGQTIDVAATSESNAKKPCCSSS

SEQ ID NO: 30180 - DNA, 1307 bp, Arabidopsis thaliana
  misc_feature (1)..(1307): Ceres Seq. ID no. 12335859
  misc_feature: MA Experiment ID: 108434 Result: Up-regulated in Transcription
  misc_feature: MA Experiment 108434 PARAMETER Experiment Name: At_Root_Tips_cDNA_P Parameter: Tissue Value: Root Tips
  misc_feature: MA Experiment ID: 108462 Result: Down-regulated in Transcription
  misc_feature: MA Experiment 108462 PARAMETER Experiment Name: At_Germinating_Seeds_cDNA_P Parameter: Age (day) Value: 2 vs. 0
  misc_feature: MA Experiment 108462 PARAMETER Experiment Name: At_Germinating_Seeds_cDNA_P Parameter: Tissue Value: Germinating Seeds
  misc_feature: MA Experiment ID: 108463 Result: Down-regulated in Transcription
  misc_feature: MA Experiment 108463 PARAMETER Experiment Name: At_Germinating_Seeds_cDNA_P Parameter: Age (day) Value: 3 vs. 0
  misc_feature: MA Experiment 108463 PARAMETER Experiment Name: At_Germinating_Seeds_cDNA_P Parameter: Tissue Value: Germinating Seeds
  misc_feature: MA Experiment ID: 108464 Result: Down-regulated in Transcription
  misc_feature: MA Experiment 108464 PARAMETER Experiment Name: At_Germinating_Seeds_cDNA_P Parameter: Age (day) Value: 4 vs. 0
  misc_feature: MA Experiment 108464 PARAMETER Experiment Name: At_Germinating_Seeds_cDNA_P Parameter: Tissue Value: Germinating Seeds
  misc_feature: MA Experiment ID: 108609 Result: Down-regulated in Transcription
  misc_feature: MA Experiment 108609 PARAMETER Experiment Name: At_100uM_ABA_cDNA_P Parameter: Timepoint (hr) Value: 24
  misc_feature: MA Experiment 108609 PARAMETER Experiment Name: At_100uM_ABA_cDNA_P Parameter: Tissue Value: Aerial
  misc_feature: MA Experiment 108609 PARAMETER Experiment Name: At_100uM_ABA_cDNA_P Parameter: Treatment Value: 100uM ABA vs. No Treatment
  misc_feature: MA Experiment ID: 20000093 Result: Up-regulated in Transcription
  misc_feature: MA Experiment 20000093 PARAMETER Experiment Name: At_42deg_Heat_cDNA_P Parameter: Temperature (deg C) Value: 42 vs. 22
  misc_feature: MA Experiment 20000093 PARAMETER Experiment Name: At_42deg_Heat_cDNA_P Parameter: Timepoint (hr) Value: 0.5
  misc_feature: MA Experiment 20000093 PARAMETER Experiment Name: At_42deg_Heat_cDNA_P Parameter: Tissue Value: Aerial
  misc_feature: MA Experiment ID: 20000112 Result: Up-regulated in Transcription
  misc_feature: MA Experiment 20000112 PARAMETER Experiment Name: At_42deg_Heat_cDNA_P Parameter: Temperature (deg C) Value: 42 vs. 22
  misc_feature: MA Experiment 20000112 PARAMETER Experiment Name: At_42deg_Heat_cDNA_P Parameter: Timepoint (hr) Value: 2
  misc_feature: MA Experiment 20000112 PARAMETER Experiment Name: At_42deg_Heat_cDNA_P Parameter: Tissue Value: Aerial
  misc_feature: MA Experiment ID: 20000436 Result: Down-regulated in Transcription
  misc_feature: MA Experiment 20000436 PARAMETER Experiment Name: At_Drought_P Parameter: Age (day) Value: 7
  misc_feature: MA Experiment 20000436 PARAMETER Experiment Name: At_Drought_P Parameter: Organism Value: A. thaliana
  misc_feature: MA Experiment 20000436 PARAMETER Experiment Name: At_Drought_P Parameter: Plant Line Value: WS
  misc_feature: MA Experiment 20000436 PARAMETER Experiment Name: At_Drought_P Parameter: Timepoint (hr) Value: 12
  misc_feature: MA Experiment 20000436 PARAMETER Experiment Name: At_Drought_P Parameter: Tissue Value: Whole Plant
  misc_feature: MA Experiment 20000436 PARAMETER Experiment Name: At_Drought_P Parameter: Treatment Value: Drought vs. No Drought
  misc_feature: MA Experiment ID: 20000437 Result: Down-regulated in Transcription
  misc_feature: MA Experiment 20000437 PARAMETER Experiment Name: At_Drought_P Parameter: Age (day) Value: 8
  misc_feature: MA Experiment 20000437 PARAMETER Experiment Name: At_Drought_P Parameter: Organism Value: A. thaliana
  misc_feature: MA Experiment 20000437 PARAMETER Experiment Name: At_Drought_P Parameter: Plant Line Value: WS
  misc_feature: MA Experiment 20000437 PARAMETER Experiment Name: At_Drought_P Parameter: Timepoint (hr) Value: 24
  misc_feature: MA Experiment 20000437 PARAMETER Experiment Name: At_Drought_P Parameter: Tissue Value: Whole Plant
  misc_feature: MA Experiment 20000437 PARAMETER Experiment Name: At_Drought_P Parameter: Treatment Value: Drought vs. No Drought
  misc_feature: MA Experiment ID: 20000794 Result: Down-regulated in Transcription
  misc_feature: MA Experiment 20000794 PARAMETER Experiment Name: At_Petals_P Parameter: Age (day) Value: 23-25 days
  misc_feature: MA Experiment 20000794 PARAMETER Experiment Name: At_Petals_P Parameter: Plant Line Value: WS
  misc_feature: MA Experiment 20000794 PARAMETER Experiment Name: At_Petals_P Parameter: Tissue Value: Petals vs. Whole plant
  misc_feature: MA Experiment ID: 20001247 Result: Down-regulated in Transcription
  misc_feature: MA Experiment 20001247 PARAMETER Experiment Name: At_Far-red-induction_P Parameter: Age (day) Value: 7
  misc_feature: MA Experiment 20001247 PARAMETER Experiment Name: At_Far-red-induction_P Parameter: Light Value: Far-red vs. White
  misc_feature: MA Experiment 20001247 PARAMETER Experiment Name: At_Far-red-induction_P Parameter: Organism Value: A. thaliana
  misc_feature: MA Experiment 20001247 PARAMETER Experiment Name: At_Far-red-induction_P Parameter: Plant Line Value: Columbia
  misc_feature: MA Experiment 20001247 PARAMETER Experiment Name: At_Far-red-induction_P Parameter: Timepoint (hr) Value: 1
  misc_feature: MA Experiment 20001247 PARAMETER Experiment Name: At_Far-red-induction_P Parameter: Tissue Value: Whole Plant
  misc_feature: MA Experiment ID: 20001450 Result: Down-regulated in Transcription
  misc_feature: MA Experiment 20001450 PARAMETER Experiment Name: At_Far-red-induction_P Parameter: Age (day) Value: 7
  misc_feature: MA Experiment 20001450 PARAMETER Experiment Name: At_Far-red-induction_P Parameter: Light Value: Far-red vs. White
  misc_feature: MA Experiment 20001450 PARAMETER Experiment Name: At_Far-red-induction_P Parameter: Organism Value: A. thaliana
  misc_feature: MA Experiment 20001450 PARAMETER Experiment Name: At_Far-red-induction_P Parameter: Plant Line Value: Columbia
  misc_feature: MA Experiment 20001450 PARAMETER Experiment Name: At_Far-red-induction_P Parameter: Timepoint (hr) Value: 8
  misc_feature: MA Experiment 20001450 PARAMETER Experiment Name: At_Far-red-induction_P Parameter: Tissue Value: Whole Plant
  misc_feature: MA Experiment ID: 20001451 Result: Down-regulated in Transcription
  misc_feature: MA Experiment 20001451 PARAMETER Experiment Name: At_Far-red-induction_P Parameter: Age (day) Value: 7
  misc_feature: MA Experiment 20001451 PARAMETER Experiment Name: At_Far-red-induction_P Parameter: Light Value: Far-red vs. White
  misc_feature: MA Experiment 20001451 PARAMETER Experiment Name: At_Far-red-induction_P Parameter: Organism Value: A. thaliana
  misc_feature: MA Experiment 20001451 PARAMETER Experiment Name: At_Far-red-induction_P Parameter: Plant Line Value: Columbia
  misc_feature: MA Experiment 20001451 PARAMETER Experiment Name: At_Far-red-induction_P Parameter: Timepoint (hr) Value: 24
  misc_feature: MA Experiment 20001451 PARAMETER Experiment Name: At_Far-red-induction_P Parameter: Tissue Value: Whole Plant
  misc_feature: MA Experiment ID: 20001558 Result: Up-regulated in Transcription
  misc_feature: MA Experiment 20001558 PARAMETER Experiment Name: At_Drought_Soil_Dry_P Parameter: Age (day) Value: 27
  misc_feature: MA Experiment 20001558 PARAMETER Experiment Name: At_Drought_Soil_Dry_P Parameter: Organism Value: A. thaliana
  misc_feature: MA Experiment 20001558 PARAMETER Experiment Name: At_Drought_Soil_Dry_P Parameter: Plant Line Value: WS
  misc_feature: MA Experiment 20001558 PARAMETER Experiment Name: At_Drought_Soil_Dry_P Parameter: Post Timepoint (hr) Value: 6
  misc_feature: MA Experiment 20001558 PARAMETER Experiment Name: At_Drought_Soil_Dry_P Parameter: Post-Treatment Value: Re-Water vs. No Drought
  misc_feature: MA Experiment 20001558 PARAMETER Experiment Name: At_Drought_Soil_Dry_P Parameter: Timepoint (day) Value: 13
  misc_feature: MA Experiment 20001558 PARAMETER Experiment Name: At_Drought_Soil_Dry_P Parameter: Treatment Value: Drought vs. No Drought
aaaggaagcttcgaaaccattgaagcagcagcaatgatactacgtcgtttcatctgctacaacgcttcttcaactgtttcatctatagctccatctccgaagaagaagcctctcatcttcttaggctctcctcaggtctccgtgactgtgcttgaagctcttttcaatgcatctaatgctccaaactcttccttcgaggttgcaggtattgttacacagcctccatcaaggagagataggggtaaaaaagtgttgccttcaccagtagcgcaatacgctcttgataaaggcttaccttctgatctcattttctcccctgagaaggcaggagatgaagcattcttatcggctttaagagagttgcaacctgagctttgtattacagcagcttatgggaatattttgcctactaagttccttaagattccggtacatgggacagtgaacatacacccaagtttgttgccgctgtaccgtggtgcagctccagttcaaagagcattacaggacggtgtcccagaaacaggagtatcattagcatttacggtgcgtaagttagatgcaggaccagtgattgcctctaaaaggttccaagtggatgatctaataaaggcaccagaactgctctcgttcctattttctgaaggctctaatcttcttatccgtgaacttccctcaatattcgatgggtctgcaaaatcaaaagcagttcctcaagatgattccaaagctaccttagctccaaagatagctccagatgaggcttggctctcttttgaccaggaagcttttgttctacataacaaggttcgtgcattcgcaggatggccaggaacacgagccaaagttgtagtccttgatgacaaaagcggccagcaaaatgtgctagagcttaaaattatgtccactcgagtttgcaaagatctggaaatccagggtggtgaacaagattatgtaactttcaagaaaggttcattggtgtttccttgtagaggcggtacagctttggaggtactagaagtccagcttcctggtaagaaagcgatcaacgcagctgctttttggaatggcttgagaggtcaaaagctgaagaagctatgaagacagagactggaacagaattaagctttggtcaggaagttagaatcagcaaattagtcatatcaggtctagccactttcaaattgtttctgaatgaaaggtgcctactgatttttggtttcaatttgattttgttcttcaaaatttgattttgtataactcaaatatattccacattcgttggtataatatgattcttctctact

SEQ ID NO: 30181 - protein, 366 aa, Arabidopsis thaliana
  peptide (1)..(366): Ceres Seq. ID no. 12335860
  misc_feature (36)..(224): Pfam Name: Formyl transferase Pfam Description: Formyl transferase
  misc_feature (38)..(357): Homolog of NCBI NO: 15643294 NR Description: methionyl-tRNA formyltransferase [Thermotoga
  misc_feature (38)..(366): Homolog of NCBI NO: 21282828 NR Description: methionyl-tRNA formyltransferase
  misc_feature (38)..(366): Homolog of NCBI NO: 15924206 NR Description: methionyl-tRNA formyltransferase
  misc_feature (38)..(366): Homolog of NCBI NO: 27467809 NR Description: methionyl-tRNA formyltransferase
  misc_feature (156)..(349): Homolog of NCBI NO: 15864563 NR Description: fmt putative protein [Brassica napus]
  misc_feature (170)..(366): Homolog of NCBI NO: 6069504 NR Description: S-locus protein 8 [Brassica rapa]
  misc_feature (13)..(319): Homolog of NCBI NO: 34911294 NR Description: similar to formyl transferase
  misc_feature (13)..(366): Homolog of NCBI NO: 7657875 NR Description: Fmt protein [Brassica napus var. napus]
  misc_feature (12)..(366): Homolog of NCBI NO: 29824361 NR Description: putative formyl transferase [Arabidopsis thaliana]
  misc_feature (12)..(366): Homolog of NCBI NO: 15219681 NR Description: formyl transferase, putative; protein id:
KGSFETIEAAAMILRRFICYNASSTVSSIAPSPKKKPLIFLGSPQVSVTVLEALFNASNAPNSSFEVAGIVTQPPSRRDRGKKVLPSPVAQYALDKGLPSDLIFSPEKAGDEAFLSALRELQPELCITAAYGNILPTKFLKIPVHGTVNIHPSLLPLYRGAAPVQRALQDGVPETGVSLAFTVRKLDAGPVIASKRFQVDDLIKAPELLSFLFSEGSNLLIRELPSIFDGSAKSKAVPQDDSKATLAPKIAPDEAWLSFDQEAFVLHNKVRAFAGWPGTRAKVVVLDDKSGQQNVLELKIMSTRVCKDLEIQGGEQDYVTFKKGSLVFPCRGGTALEVLEVQLPGKKAINAAAFWNGLRGQKLKKL

SEQ ID NO: 30182 - protein, 355 aa, Arabidopsis thaliana
  peptide (1)..(355): Ceres Seq. ID no. 12335861
  misc_feature (25)..(213): Pfam Name: Formyl transferase Pfam Description: Formyl transferase
  misc_feature (27)..(346): Homolog of NCBI NO: 15643294 NR Description: methionyl-tRNA formyltransferase [Thermotoga
  misc_feature (27)..(355): Homolog of NCBI NO: 21282828 NR Description: methionyl-tRNA formyltransferase
  misc_feature (27)..(355): Homolog of NCBI NO: 15924206 NR Description: methionyl-tRNA formyltransferase
  misc_feature (27)..(355): Homolog of NCBI NO: 27467809 NR Description: methionyl-tRNA formyltransferase
  misc_feature (145)..(338): Homolog of NCBI NO: 15864563 NR Description: fmt putative protein [Brassica napus]
  misc_feature (159)..(355): Homolog of NCBI NO: 6069504 NR Description: S-locus protein 8 [Brassica rapa]
  misc_feature (2)..(308): Homolog of NCBI NO: 34911294 NR Description: similar to formyl transferase
  misc_feature (2)..(355): Homolog of NCBI NO: 7657875 NR Description: Fmt protein [Brassica napus var. napus]
  misc_feature (1)..(355): Homolog of NCBI NO: 29824361 NR Description: putative formyl transferase [Arabidopsis thaliana]
  misc_feature (1)..(355): Homolog of NCBI NO: 15219681 NR Description: formyl transferase, putative; protein id:
MILRRFICYNASSTVSSIAPSPKKKPLIFLGSPQVSVTVLEALFNASNAPNSSFEVAGIVTQPPSRRDRGKKVLPSPVAQYALDKGLPSDLIFSPEKAGDEAFLSALRELQPELCITAAYGNILPTKFLKIPVHGTVNIHPSLLPLYRGAAPVQRALQDGVPETGVSLAFTVRKLDAGPVIASKRFQVDDLIKAPELLSFLFSEGSNLLIRELPSIFDGSAKSKAVPQDDSKATLAPKIAPDEAWLSFDQEAFVLHNKVRAFAGWPGTRAKVVVLDDKSGQQNVLELKIMSTRVCKDLEIQGGEQDYVTFKKGSLVFPCRGGTALEVLEVQLPGKKAINAAAFWNGLRGQKLKKL

SEQ ID NO: 30183 - DNA, 1213 bp, Arabidopsis thaliana
  misc_feature (1)..(1213): Ceres Seq. ID no. 12339711
  misc_feature: MA Experiment ID: 20000111 Result: Down-regulated in Transcription
  misc_feature: MA Experiment 20000111 PARAMETER Experiment Name: At_42deg_Heat_cDNA_P Parameter: Temperature (deg C) Value: 42 vs. 22
  misc_feature: MA Experiment 20000111 PARAMETER Experiment Name: At_42deg_Heat_cDNA_P Parameter: Timepoint (hr) Value: 6
  misc_feature: MA Experiment 20000111 PARAMETER Experiment Name: At_42deg_Heat_cDNA_P Parameter: Tissue Value: Aerial
  misc_feature: MA Experiment ID: 20000184 Result: Down-regulated in Transcription
  misc_feature: MA Experiment 20000184 PARAMETER Experiment Name: At_Shoots__P Parameter: Age (day) Value: 7
  misc_feature: MA Experiment 20000184 PARAMETER Experiment Name: At_Shoots__P Parameter: Tissue Value: Shoots vs. Whole Plant
aaagcaaacgcaactcatatccaatcgcttttaaacgccaataatcgcgttacagtaacaactcgaaaaatggtaacactaatcgtggccaccaccgccgatccagcgtcgatcaaccctgcggcggcgcttctcgccatgcccggttggaccgccggacctatcttaccgccggacataaagagttttagtaacaagcaaacgagagtgattcaacacgatagatctatagtaaaagaagacgatctcgatttacgttgggaagaagctaccggtgaagttgttgatgaagtcatcttcctcagccgtcacaccgccgtctcaaatcgtcctgctttaactgttcatccgattggagtgcttcatctaaaggatggagaatcaccgccgcaaggaggaaagcctggatgggcggcgttgcaagcactagaattggtccatggtttcgtcttttgaagaaaatggctgaagctcatggtttagttcctgagtttgagataacataggaagctactcatcatggaccaataactaacaagccaacgatgtttttggagattggtagtaccgaggaatactggaagaggcaagacgcagctcaagtcatggctcttttaatgtgggaaggtcttgggctaggaggcagtgaagaagtagggaagtggaaaagtgaaaccggaaagaggaaagttcttttaggcattggaggtggacattatgctcctcgtcacatggatatagctttgaaagatgatatttgggtaggccatttgctttctggatactcattaccgatggaagatccaactcaaaccaaaacaacgcctggagagaattacattggtggaaattggagacaatcaattaaggcagcatttgaagctactaaagcatcattccccggaggcgagatcttggctcatcttgaccacaagagcttcaaaggatggcaaaagaaggccattacagagtttttagcagaagagagcatcaatgttgggaagccaaacgatttcacatgaactgtgagagacccccttaaaacatatcttgagatctgagtttttggtttattggttcagaatctatcattgatgatgatgggtttagattattttcagctgttacaagtaagtagagattgaaattcatctgtaagctgccctttttaaagttcacattcagatttaagatagaagaagaataaaacatg

SEQ ID NO: 30184 - protein, 158 aa, Arabidopsis thaliana
  peptide (1)..(158): Ceres Seq. ID no. 12339712
  misc_feature (1)..(154): Pfam Name: Protein of unknown function (DUF516) Pfam Description: Protein of unknown function (DUF516)
  misc_feature (1)..(82): Homolog of NCBI NO: 20094375 NR Description: Uncharacterized protein conserved in archaea
  misc_feature (1)..(84): Homolog of NCBI NO: 14520224 NR Description: hypothetical protein [Pyrococcus abyssi]
  misc_feature (1)..(81): Homolog of NCBI NO: 11498233 NR Description: conserved hypothetical protein [Archaeoglobus
  misc_feature (1)..(81): Homolog of NCBI NO: 14601434 NR Description: hypothetical protein [Aeropyrum pernix]
  misc_feature (1)..(91): Homolog of NCBI NO: 14589968 NR Description: hypothetical protein [Pyrococcus horikoshii]
  misc_feature (1)..(86): Homolog of NCBI NO: 15668338 NR Description: conserved hypothetical protein [Methanococcus
  misc_feature (1)..(85): Homolog of NCBI NO: 18978354 NR Description: hypothetical protein [Pyrococcus furiosus DSM
  misc_feature (1)..(80): Homolog of NCBI NO: 22406443 NR Description: hypothetical protein [Ferroplasma acidarmanus]
  misc_feature (1)..(157): Homolog of NCBI NO: 38636945 NR Description: putative GEKO1 [Oryza sativa (japonica
  misc_feature (1)..(158): Homolog of NCBI NO: 15227708 NR Description: unknown protein; protein id: At2g03800.1
MFLEIGSTEEYWKRQDAAQVMALLMWEGLGLGGSEEVGKWKSETGKRKVLLGIGGGHYAPRHMDIALKDDIWVGHLLSGYSLPMEDPTQTKTTPGENYIGGNWRQSIKAAFEATKASFPGGEILAHLDHKSFKGWQKKAITEFLAEESINVGKPNDFT

SEQ ID NO: 30185 - protein, 151 aa, Arabidopsis thaliana
  peptide (1)..(151): Ceres Seq. ID no. 12339713
  misc_feature (72)..(145): Pfam Name: Protein of unknown function (DUF516) Pfam Description: Protein of unknown function (DUF516)
  misc_feature (27)..(119): Homolog of NCBI NO: 14589968 NR Description: hypothetical protein [Pyrococcus horikoshii]
  misc_feature (93)..(135): Homolog of NCBI NO: 15668338 NR Description: conserved hypothetical protein [Methanococcus
  misc_feature (27)..(119): Homolog of NCBI NO: 18978354 NR Description: hypothetical protein [Pyrococcus furiosus DSM
  misc_feature (27)..(119): Homolog of NCBI NO: 22406443 NR Description: hypothetical protein [Ferroplasma acidarmanus]
  misc_feature (24)..(139): Homolog of NCBI NO: 38636945 NR Description: putative GEKO1 [Oryza sativa (japonica
  misc_feature (1)..(145): Homolog of NCBI NO: 15227708 NR Description: unknown protein; protein id: At2g03800.1
KANATHIQSLLNANNRVTVTTRKMVTLIVATTADPASINPAAALLAMPGWTAGPILPPDIKSFSNKQTRVIQHDRSIVKEDDLDLRWEEATGEVVDEVIFLSRHTAVSNRPALTVHPIGVLHLKDGESPPQGGKPGWAALQALELVHGFVF

SEQ ID NO: 30186 - protein, 138 aa, Arabidopsis thaliana
  peptide (1)..(138): Ceres Seq. ID no. 12339714
  misc_feature (1)..(134): Pfam Name: Protein of unknown function (DUF516) Pfam Description: Protein of unknown function (DUF516)
  misc_feature (1)..(62): Homolog of NCBI NO: 20094375 NR Description: Uncharacterized protein conserved in archaea
  misc_feature (1)..(64): Homolog of NCBI NO: 14520224 NR Description: hypothetical protein [Pyrococcus abyssi]
  misc_feature (1)..(61): Homolog of NCBI NO: 11498233 NR Description: conserved hypothetical protein [Archaeoglobus
  misc_feature (1)..(61): Homolog of NCBI NO: 14601434 NR Description: hypothetical protein [Aeropyrum pernix]
  misc_feature (1)..(71): Homolog of NCBI NO: 14589968 NR Description: hypothetical protein [Pyrococcus horikoshii]
  misc_feature (1)..(66): Homolog of NCBI NO: 15668338 NR Description: conserved hypothetical protein [Methanococcus
  misc_feature (1)..(65): Homolog of NCBI NO: 18978354 NR Description: hypothetical protein [Pyrococcus furiosus DSM
  misc_feature (1)..(60): Homolog of NCBI NO: 22406443 NR Description: hypothetical protein [Ferroplasma acidarmanus]
  misc_feature (1)..(137): Homolog of NCBI NO: 38636945 NR Description: putative GEKO1 [Oryza sativa (japonica
  misc_feature (1)..(138): Homolog of NCBI NO: 15227708 NR Description: unknown protein; protein id: At2g03800.1
MALLMWEGLGLGGSEEVGKWKSETGKRKVLLGIGGGHYAPRHMDIALKDDIWVGHLLSGYSLPMEDPTQTKTTPGENYIGGNWRQSIKAAFEATKASFPGGEILAHLDHKSFKGWQKKAITEFLAEESINVGKPNDFT

SEQ ID NO: 30187 - DNA, 1224 bp, Arabidopsis thaliana
  misc_feature (1)..(1224): Ceres Seq. ID no. 12333622
  misc_feature: MA Experiment ID: 108435 Result: Down-regulated in Transcription
  misc_feature: MA Experiment 108435 PARAMETER Experiment Name: At_stm_Mutants_cDNA_P Parameter: Plant Line Value: wt Landsburg vs stm
  misc_feature: MA Experiment 108435 PARAMETER Experiment Name: At_stm_Mutants_cDNA_P Parameter: Tissue Value: Shoot Apical Meristem Region
  misc_feature: MA Experiment ID: 108501 Result: Down-regulated in Transcription
  misc_feature: MA Experiment 108501 PARAMETER Experiment Name: At_ap2_floral_buds_cDNA_P Parameter: Plant Line Value: ap2 (Ler.)
  misc_feature: MA Experiment 108501 PARAMETER Experiment Name: At_ap2_floral_buds_cDNA_P Parameter: Tissue Value: Closed Flower
  misc_feature: MA Experiment ID: 108577 Result: Down-regulated in Transcription
  misc_feature: MA Experiment 108577 PARAMETER Experiment Name: At_42deg_Heat_cDNA_P Parameter: Temperature (deg C) Value: 42 vs. 22
  misc_feature: MA Experiment 108577 PARAMETER Experiment Name: At_42deg_Heat_cDNA_P Parameter: Timepoint (hr) Value: 6
  misc_feature: MA Experiment 108577 PARAMETER Experiment Name: At_42deg_Heat_cDNA_P Parameter: Tissue Value: Aerial
  misc_feature: MA Experiment ID: 108594 Result: Up-regulated in Transcription
  misc_feature: MA Experiment 108594 PARAMETER Experiment Name: At_Ler-rhl_Root_cDNA_P Parameter: Plant Line Value: null
  misc_feature: MA Experiment ID: 108595 Result: Down-regulated in Transcription
  misc_feature: MA Experiment 108595 PARAMETER Experiment Name: At_Ler-pi_Ovule_cDNA_P Parameter: Plant Line Value: null
  misc_feature: MA Experiment ID: 20000087 Result: Down-regulated in Transcription
  misc_feature: MA Experiment 20000087 PARAMETER Experiment Name: At_100uM_ABA_Mutants_cDNA_P Parameter: Plant Line Value: WS
  misc_feature: MA Experiment 20000087 PARAMETER Experiment Name: At_100uM_ABA_Mutants_cDNA_P Parameter: Timepoint (hr) Value: 6
  misc_feature: MA Experiment 20000087 PARAMETER Experiment Name: At_100uM_ABA_Mutants_cDNA_P Parameter: Tissue Value: Aerial
  misc_feature: MA Experiment 20000087 PARAMETER Experiment Name: At_100uM_ABA_Mutants_cDNA_P Parameter: Treatment Value: 100uM ABA vs. No Treatment
  misc_feature: MA Experiment ID: 20000111 Result: Down-regulated in Transcription
  misc_feature: MA Experiment 20000111 PARAMETER Experiment Name: At_42deg_Heat_cDNA_P Parameter: Temperature (deg C) Value: 42 vs. 22
  misc_feature: MA Experiment 20000111 PARAMETER Experiment Name: At_42deg_Heat_cDNA_P Parameter: Timepoint (hr) Value: 6
  misc_feature: MA Experiment 20000111 PARAMETER Experiment Name: At_42deg_Heat_cDNA_P Parameter: Tissue Value: Aerial
  misc_feature: MA Experiment ID: 20000113 Result: Down-regulated in Transcription
  misc_feature: MA Experiment 20000113 PARAMETER Experiment Name: At_42deg_Heat_cDNA_P Parameter: Temperature (deg C) Value: 42 vs. 22
  misc_feature: MA Experiment 20000113 PARAMETER Experiment Name: At_42deg_Heat_cDNA_P Parameter: Timepoint (hr) Value: 8
  misc_feature: MA Experiment 20000113 PARAMETER Experiment Name: At_42deg_Heat_cDNA_P Parameter: Tissue Value: Aerial
  misc_feature: MA Experiment ID: 20000173 Result: Down-regulated in Transcription
  misc_feature: MA Experiment 20000173 PARAMETER Experiment Name: At_42deg_Heat_P Parameter: Age (day) Value: 14
  misc_feature: MA Experiment 20000173 PARAMETER Experiment Name: At_42deg_Heat_P Parameter: Organism Value: A. thaliana
  misc_feature: MA Experiment 20000173 PARAMETER Experiment Name: At_42deg_Heat_P Parameter: Plant Line Value: WS
  misc_feature: MA Experiment 20000173 PARAMETER Experiment Name: At_42deg_Heat_P Parameter: Temperature (deg C) Value: 42 vs. 22
  misc_feature: MA Experiment 20000173 PARAMETER Experiment Name: At_42deg_Heat_P Parameter: Timepoint (hr) Value: 6
  misc_feature: MA Experiment 20000173 PARAMETER Experiment Name: At_42deg_Heat_P Parameter: Tissue Value: Aerial
  misc_feature: MA Experiment ID: 20000185 Result: Down-regulated in Transcription
  misc_feature: MA Experiment 20000185 PARAMETER Experiment Name: At_Roots__P Parameter: Age (day) Value: 7 vs. 21
  misc_feature: MA Experiment 20000185 PARAMETER Experiment Name: At_Roots__P Parameter: Organism Value: A. thaliana
  misc_feature: MA Experiment 20000185 PARAMETER Experiment Name: At_Roots__P Parameter: Tissue Value: Roots vs. Whole Plant
  misc_feature: MA Experiment ID: 20000437 Result: Down-regulated in Transcription
  misc_feature: MA Experiment 20000437 PARAMETER Experiment Name: At_Drought_P Parameter: Age (day) Value: 8
  misc_feature: MA Experiment 20000437 PARAMETER Experiment Name: At_Drought_P Parameter: Organism Value: A. thaliana
  misc_feature: MA Experiment 20000437 PARAMETER Experiment Name: At_Drought_P Parameter: Plant Line Value: WS
  misc_feature: MA Experiment 20000437 PARAMETER Experiment Name: At_Drought_P Parameter: Timepoint (hr) Value: 24
  misc_feature: MA Experiment 20000437 PARAMETER Experiment Name: At_Drought_P Parameter: Tissue Value: Whole Plant
  misc_feature: MA Experiment 20000437 PARAMETER Experiment Name: At_Drought_P Parameter: Treatment Value: Drought vs. No Drought
  misc_feature: MA Experiment ID: 20000439 Result: Down-regulated in Transcription
  misc_feature: MA Experiment 20000439 PARAMETER Experiment Name: At_Roots__P Parameter: Age (day) Value: 14 vs. 21
  misc_feature: MA Experiment 20000439 PARAMETER Experiment Name: At_Roots__P Parameter: Organism Value: A. thaliana
  misc_feature: MA Experiment 20000439 PARAMETER Experiment Name: At_Roots__P Parameter: Tissue Value: Roots vs. Whole Plant
  misc_feature: MA Experiment ID: 20001555 Result: Down-regulated in Transcription
  misc_feature: MA Experiment 20001555 PARAMETER Experiment Name: At_Drought_Soil_Dry_P Parameter: Age (day) Value: 24
  misc_feature: MA Experiment 20001555 PARAMETER Experiment Name: At_Drought_Soil_Dry_P Parameter: Organism Value: A. thaliana
  misc_feature: MA Experiment 20001555 PARAMETER Experiment Name: At_Drought_Soil_Dry_P Parameter: Plant Line Value: WS
  misc_feature: MA Experiment 20001555 PARAMETER Experiment Name: At_Drought_Soil_Dry_P Parameter: Post Timepoint (hr) Value: None
  misc_feature: MA Experiment 20001555 PARAMETER Experiment Name: At_Drought_Soil_Dry_P Parameter: Post-Treatment Value: None
  misc_feature: MA Experiment 20001555 PARAMETER Experiment Name: At_Drought_Soil_Dry_P Parameter: Timepoint (day) Value: 10
  misc_feature: MA Experiment 20001555 PARAMETER Experiment Name: At_Drought_Soil_Dry_P Parameter: Treatment Value: Drought vs. No Drought
  misc_feature: MA Experiment ID: 20001557 Result: Down-regulated in Transcription
  misc_feature: MA Experiment 20001557 PARAMETER Experiment Name: At_Drought_Soil_Dry_P Parameter: Age (day) Value: 27
  misc_feature: MA Experiment 20001557 PARAMETER Experiment Name: At_Drought_Soil_Dry_P Parameter: Organism Value: A. thaliana
  misc_feature: MA Experiment 20001557 PARAMETER Experiment Name: At_Drought_Soil_Dry_P Parameter: Plant Line Value: WS
  misc_feature: MA Experiment 20001557 PARAMETER Experiment Name: At_Drought_Soil_Dry_P Parameter: Post Timepoint (hr) Value: 3
  misc_feature: MA Experiment 20001557 PARAMETER Experiment Name: At_Drought_Soil_Dry_P Parameter: Post-Treatment Value: Re-Water vs. No Drought
  misc_feature: MA Experiment 20001557 PARAMETER Experiment Name: At_Drought_Soil_Dry_P Parameter: Timepoint (day) Value: 13
  misc_feature: MA Experiment 20001557 PARAMETER Experiment Name: At_Drought_Soil_Dry_P Parameter: Treatment Value: Drought vs. No Drought
  misc_feature: MA Experiment ID: 20001904 Result: Down-regulated in Transcription
  misc_feature: MA Experiment 20001904 PARAMETER Experiment Name: At_Drought_Reproduction_P Parameter: Age (day) Value: 37
  misc_feature: MA Experiment 20001904 PARAMETER Experiment Name: At_Drought_Reproduction_P Parameter: Organism Value: A. thaliana
  misc_feature: MA Experiment 20001904 PARAMETER Experiment Name: At_Drought_Reproduction_P Parameter: Plant Line Value: WS
  misc_feature: MA Experiment 20001904 PARAMETER Experiment Name: At_Drought_Reproduction_P Parameter: Timepoint (day) Value: 7
  misc_feature: MA Experiment 20001904 PARAMETER Experiment Name: At_Drought_Reproduction_P Parameter: Tissue Value: Rosettes
  misc_feature: MA Experiment 20001904 PARAMETER Experiment Name: At_Drought_Reproduction_P Parameter: Treatment Value: Drought vs. No Drought
  misc_feature: MA Experiment ID: 20001905 Result: Down-regulated in Transcription
  misc_feature: MA Experiment 20001905 PARAMETER Experiment Name: At_Drought_Reproduction_P Parameter: Age (day) Value: 40
  misc_feature: MA Experiment 20001905 PARAMETER Experiment Name: At_Drought_Reproduction_P Parameter: Organism Value: A. thaliana
  misc_feature: MA Experiment 20001905 PARAMETER Experiment Name: At_Drought_Reproduction_P Parameter: Plant Line Value: WS
  misc_feature: MA Experiment 20001905 PARAMETER Experiment Name: At_Drought_Reproduction_P Parameter: Timepoint (day) Value: 10
  misc_feature: MA Experiment 20001905 PARAMETER Experiment Name: At_Drought_Reproduction_P Parameter: Tissue Value: Rosettes
  misc_feature: MA Experiment 20001905 PARAMETER Experiment Name: At_Drought_Reproduction_P Parameter: Treatment Value: Drought vs. No Drought
atctgattcaaacgcatttggtaggctgagagaaagaaagaaaaagataaagatggatcacgcagcagatgctcaccgtacggatttgatgaccattacaagattcgtgttgaatgaacaatcaaagtatccagaatctcgtggtgatttcaccattttgcttagtcacatcgttttgggttgcaaattcgtttgcagtgctgttaataaggctggtttggctaagttaattggacttgcaggggaaacaaacattcagggtgaagagcaaaagaaacttgatgtgctctctaatgatgtctttgtcaacgctttggttagcagtggtagaacttctgttcttgtctcggaggaagatgaggaagctacgtttgtggagccatccaagcgtggaaagtactgtgttgtttttgatccgcttgatggatcttcaaacattgactgtggtgtttccattggcacaatttttggaatttacacgttggaccacactgatgagccaaccactgcagatgttctgaaacctgggaatgaaatggtggctgcaggttattgtatgtacggaagctcctgcatgcttgtgttgagcactggaaccggtgtccacggatttacactggacccatctctaggagagttcattctaactcacccggacattaagattccaaataagggaaacatttattcggtgaatgaaggcaatgcgcagaactgggatggtccaactacaaagtatgtagagaaatgcaagtttcctaaagatggttctcctgcaaagtctctgagatacgtaggaagtatggtagctgatgttcatcgtacactactttatggaggaatcttcttgtacccggctgacaagaaaagccccaatggaaaattgcgtgtcttgtatgaagttttcccgatgtcgtttttgatggagcaagccggaggtcaggcctttacgggaaagaaaagggcgctagaccttgtcccggagaagatccatgagcgttctccgatatttcttggtagctacgatgatgtagaagagattaaagctctctatgctgaggaggaaaagaagaactaagcttctcattcttcttttattctcttactgtctctgtctctcttatttctatatacagtatcttcttctgatgagaagaacaatataactcatttacaaaaggaagatctttctttatcattaaatgcacataaaaatcttctttc

SEQ ID NO: 30188 - protein, 358 aa, Arabidopsis thaliana
  peptide (1)..(358): Ceres Seq. ID no. 12333623
  misc_feature (30)..(354): Pfam Name: Fructose-1-6-bisphosphatase Pfam Description: Fructose-1-6-bisphosphatase
  misc_feature (18)..(356): Homolog of NCBI NO: 3913640 NR Description: FRUCTOSE-1,6-BISPHOSPHATASE, CYTOSOLIC
  misc_feature (18)..(356): Homolog of NCBI NO: 6684169 NR Description: fructose-1,6-bisphosphatase [Porteresia coarctata]
  misc_feature (30)..(356): Homolog of NCBI NO: 5305145 NR Description: fructose-1,6-bisphosphatase [Pisum sativum]
  misc_feature (18)..(355): Homolog of NCBI NO: 4741918 NR Description: cytosolic fructose-1,6-bisphosphatase [Musa
  misc_feature (18)..(356): Homolog of NCBI NO: 1169586 NR Description: FRUCTOSE-1,6-BISPHOSPHATASE, CYTOSOLIC
  misc_feature (18)..(356): Homolog of NCBI NO: 20278691 NR Description: cytoplasmic fructose-1,6-bisphosphatase [Pisum
  misc_feature (18)..(356): Homolog of NCBI NO: 11139718 NR Description: cytosolic fructose-1,6-bisphosphatase [Beta
  misc_feature (18)..(356): Homolog of NCBI NO: 119748 NR Description: FRUCTOSE-1,6-BISPHOSPHATASE, CYTOSOLIC
  misc_feature (18)..(356): Homolog of NCBI NO: 1169585 NR Description: FRUCTOSE-1,6-BISPHOSPHATASE, CYTOSOLIC
  misc_feature (18)..(358): Homolog of NCBI NO: 15218438 NR Description: fructose 1,6-bisphosphatase, putative; protein
SDSNAFGRLRERKKKIKMDHAADAHRTDLMTITRFVLNEQSKYPESRGDFTILLSHIVLGCKFVCSAVNKAGLAKLIGLAGETNIQGEEQKKLDVLSNDVFVNALVSSGRTSVLVSEEDEEATFVEPSKRGKYCVVFDPLDGSSNIDCGVSIGTIFGIYTLDHTDEPTTADVLKPGNEMVAAGYCMYGSSCMLVLSTGTGVHGFTLDPSLGEFILTHPDIKIPNKGNIYSVNEGNAQNWDGPTTKYVEKCKFPKDGSPAKSLRYVGSMVADVHRTLLYGGIFLYPADKKSPNGKLRVLYEVFPMSFLMEQAGGQAFTGKKRALDLVPEKIHERSPIFLGSYDDVEEIKALYAEEEKKN

SEQ ID NO: 30189 - protein, 341 aa, Arabidopsis thaliana
  peptide (1)..(341): Ceres Seq. ID no. 12333624
  misc_feature (13)..(337): Pfam Name: Fructose-1-6-bisphosphatase Pfam Description: Fructose-1-6-bisphosphatase
  misc_feature (1)..(339): Homolog of NCBI NO: 3913640 NR Description: FRUCTOSE-1,6-BISPHOSPHATASE, CYTOSOLIC
  misc_feature (1)..(339): Homolog of NCBI NO: 6684169 NR Description: fructose-1,6-bisphosphatase [Porteresia coarctata]
  misc_feature (13)..(339): Homolog of NCBI NO: 5305145 NR Description: fructose-1,6-bisphosphatase [Pisum sativum]
  misc_feature (1)..(338): Homolog of NCBI NO: 4741918 NR Description: cytosolic fructose-1,6-bisphosphatase [Musa
  misc_feature (1)..(339): Homolog of NCBI NO: 1169586 NR Description: FRUCTOSE-1,6-BISPHOSPHATASE, CYTOSOLIC
  misc_feature (1)..(339): Homolog of NCBI NO: 20278691 NR Description: cytoplasmic fructose-1,6-bisphosphatase [Pisum
  misc_feature (1)..(339): Homolog of NCBI NO: 11139718 NR Description: cytosolic fructose-1,6-bisphosphatase [Beta
  misc_feature (1)..(339): Homolog of NCBI NO: 119748 NR Description: FRUCTOSE-1,6-BISPHOSPHATASE, CYTOSOLIC
  misc_feature (1)..(339): Homolog of NCBI NO: 1169585 NR Description: FRUCTOSE-1,6-BISPHOSPHATASE, CYTOSOLIC
  misc_feature (1)..(341): Homolog of NCBI NO: 15218438 NR Description: fructose 1,6-bisphosphatase, putative; protein
MDHAADAHRTDLMTITRFVLNEQSKYPESRGDFTILLSHIVLGCKFVCSAVNKAGLAKLIGLAGETNIQGEEQKKLDVLSNDVFVNALVSSGRTSVLVSEEDEEATFVEPSKRGKYCVVFDPLDGSSNIDCGVSIGTIFGIYTLDHTDEPTTADVLKPGNEMVAAGYCMYGSSCMLVLSTGTGVHGFTLDPSLGEFILTHPDIKIPNKGNIYSVNEGNAQNWDGPTTKYVEKCKFPKDGSPAKSLRYVGSMVADVHRTLLYGGIFLYPADKKSPNGKLRVLYEVFPMSFLMEQAGGQAFTGKKRALDLVPEKIHERSPIFLGSYDDVEEIKALYAEEEKKN

SEQ ID NO: 30190 - protein, 329 aa, Arabidopsis thaliana
  peptide (1)..(329): Ceres Seq. ID no. 12333625
  misc_feature (1)..(325): Pfam Name: Fructose-1-6-bisphosphatase Pfam Description: Fructose-1-6-bisphosphatase
  misc_feature (1)..(327): Homolog of NCBI NO: 3913640 NR Description: FRUCTOSE-1,6-BISPHOSPHATASE, CYTOSOLIC
  misc_feature (1)..(327): Homolog of NCBI NO: 6684169 NR Description: fructose-1,6-bisphosphatase [Porteresia coarctata]
  misc_feature (1)..(327): Homolog of NCBI NO: 5305145 NR Description: fructose-1,6-bisphosphatase [Pisum sativum]
  misc_feature (1)..(326): Homolog of NCBI NO: 4741918 NR Description: cytosolic fructose-1,6-bisphosphatase [Musa
  misc_feature (1)..(327): Homolog of NCBI NO: 1169586 NR Description: FRUCTOSE-1,6-BISPHOSPHATASE, CYTOSOLIC
  misc_feature (1)..(327): Homolog of NCBI NO: 20278691 NR Description: cytoplasmic fructose-1,6-bisphosphatase [Pisum
  misc_feature (1)..(327): Homolog of NCBI NO: 11139718 NR Description: cytosolic fructose-1,6-bisphosphatase [Beta
  misc_feature (1)..(327): Homolog of NCBI NO: 119748 NR Description: FRUCTOSE-1,6-BISPHOSPHATASE, CYTOSOLIC
  misc_feature (1)..(327): Homolog of NCBI NO: 1169585 NR Description: FRUCTOSE-1,6-BISPHOSPHATASE, CYTOSOLIC
  misc_feature (1)..(329): Homolog of NCBI NO: 15218438 NR Description: fructose 1,6-bisphosphatase, putative; protein
MTITRFVLNEQSKYPESRGDFTILLSHIVLGCKFVCSAVNKAGLAKLIGLAGETNIQGEEQKKLDVLSNDVFVNALVSSGRTSVLVSEEDEEATFVEPSKRGKYCVVFDPLDGSSNIDCGVSIGTIFGIYTLDHTDEPTTADVLKPGNEMVAAGYCMYGSSCMLVLSTGTGVHGFTLDPSLGEFILTHPDIKIPNKGNIYSVNEGNAQNWDGPTTKYVEKCKFPKDGSPAKSLRYVGSMVADVHRTLLYGGIFLYPADKKSPNGKLRVLYEVFPMSFLMEQAGGQAFTGKKRALDLVPEKIHERSPIFLGSYDDVEEIKALYAEEEKKN

SEQ ID NO: 30191 - DNA, 765 bp, Arabidopsis thaliana
  misc_feature (1)..(765): Ceres Seq. ID no. 12333665
  misc_feature: MA Experiment ID: 108434 Result: Down-regulated in Transcription
  misc_feature: MA Experiment 108434 PARAMETER Experiment Name: At_Root_Tips_cDNA_P Parameter: Tissue Value: Root Tips
  misc_feature: MA Experiment ID: 108573 Result: Up-regulated in Transcription
  misc_feature: MA Experiment 108573 PARAMETER Experiment Name: At_Drought_cDNA_P Parameter: Timepoint (hr) Value: 6
  misc_feature: MA Experiment 108573 PARAMETER Experiment Name: At_Drought_cDNA_P Parameter: Tissue Value: Aerial
  misc_feature: MA Experiment 108573 PARAMETER Experiment Name: At_Drought_cDNA_P Parameter: Treatment Value: Drought vs. No Drought
  misc_feature: MA Experiment ID: 108574 Result: Up-regulated in Transcription
  misc_feature: MA Experiment 108574 PARAMETER Experiment Name: At_Wounding__cDNA_P Parameter: Timepoint (hr) Value: 1
  misc_feature: MA Experiment 108574 PARAMETER Experiment Name: At_Wounding__cDNA_P Parameter: Tissue Value: Aerial
  misc_feature: MA Experiment 108574 PARAMETER Experiment Name: At_Wounding__cDNA_P Parameter: Treatment Value: Wounding vs. No Wounding
  misc_feature: MA Experiment ID: 108576 Result: Up-regulated in Transcription
  misc_feature: MA Experiment 108576 PARAMETER Experiment Name: At_42deg_Heat_cDNA_P Parameter: Temperature (deg C) Value: 42 vs. 22
  misc_feature: MA Experiment 108576 PARAMETER Experiment Name: At_42deg_Heat_cDNA_P Parameter: Timepoint (hr) Value: 1
  misc_feature: MA Experiment 108576 PARAMETER Experiment Name: At_42deg_Heat_cDNA_P Parameter: Tissue Value: Aerial
  misc_feature: MA Experiment ID: 108577 Result: Up-regulated in Transcription
  misc_feature: MA Experiment 108577 PARAMETER Experiment Name: At_42deg_Heat_cDNA_P Parameter: Temperature (deg C) Value: 42 vs. 22
  misc_feature: MA Experiment 108577 PARAMETER Experiment Name: At_42deg_Heat_cDNA_P Parameter: Timepoint (hr) Value: 6
  misc_feature: MA Experiment 108577 PARAMETER Experiment Name: At_42deg_Heat_cDNA_P Parameter: Tissue Value: Aerial
  misc_feature: MA Experiment ID: 108579 Result: Up-regulated in Transcription
  misc_feature: MA Experiment 108579 PARAMETER Experiment Name: At_4deg_Cold_cDNA_P Parameter: Temperature (deg C) Value: 4 vs. 22
  misc_feature: MA Experiment 108579 PARAMETER Experiment Name: At_4deg_Cold_cDNA_P Parameter: Timepoint (hr) Value: 6
  misc_feature: MA Experiment 108579 PARAMETER Experiment Name: At_4deg_Cold_cDNA_P Parameter: Tissue Value: Aerial
  misc_feature: MA Experiment ID: 108595 Result: Up-regulated in Transcription
  misc_feature: MA Experiment 108595 PARAMETER Experiment Name: At_Ler-pi_Ovule_cDNA_P Parameter: Plant Line Value: null
  misc_feature: MA Experiment ID: 20000069 Result: Up-regulated in Transcription
  misc_feature: MA Experiment 20000069 PARAMETER Experiment Name: At_100uM_ABA_Mutants_cDNA_P Parameter: Plant Line Value: CS23
  misc_feature: MA Experiment 20000069 PARAMETER Experiment Name: At_100uM_ABA_Mutants_cDNA_P Parameter: Timepoint (hr) Value: 6
  misc_feature: MA Experiment 20000069 PARAMETER Experiment Name: At_100uM_ABA_Mutants_cDNA_P Parameter: Tissue Value: Aerial
  misc_feature: MA Experiment 20000069 PARAMETER Experiment Name: At_100uM_ABA_Mutants_cDNA_P Parameter: Treatment Value: 100uM ABA vs. No Treatment
  misc_feature: MA Experiment ID: 20000070 Result: Up-regulated in Transcription
  misc_feature: MA Experiment 20000070 PARAMETER Experiment Name: At_100uM_ABA_Mutants_cDNA_P Parameter: Plant Line Value: CS24
  misc_feature: MA Experiment 20000070 PARAMETER Experiment Name: At_100uM_ABA_Mutants_cDNA_P Parameter: Timepoint (hr) Value: 6
  misc_feature: MA Experiment 20000070 PARAMETER Experiment Name: At_100uM_ABA_Mutants_cDNA_P Parameter: Tissue Value: Aerial
  misc_feature: MA Experiment 20000070 PARAMETER Experiment Name: At_100uM_ABA_Mutants_cDNA_P Parameter: Treatment Value: 100uM ABA vs. No Treatment
  misc_feature: MA Experiment ID: 20000071 Result: Up-regulated in Transcription
  misc_feature: MA Experiment 20000071 PARAMETER Experiment Name: At_100uM_ABA_Mutants_cDNA_P Parameter: Plant Line Value: CS8104
  misc_feature: MA Experiment 20000071 PARAMETER Experiment Name: At_100uM_ABA_Mutants_cDNA_P Parameter: Timepoint (hr) Value: 6
  misc_feature: MA Experiment 20000071 PARAMETER Experiment Name: At_100uM_ABA_Mutants_cDNA_P Parameter: Tissue Value: Aerial
  misc_feature: MA Experiment 20000071 PARAMETER Experiment Name: At_100uM_ABA_Mutants_cDNA_P Parameter: Treatment Value: 100uM ABA vs. No Treatment
  misc_feature: MA Experiment ID: 20000072 Result: Up-regulated in Transcription
  misc_feature: MA Experiment 20000072 PARAMETER Experiment Name: At_100uM_ABA_Mutants_cDNA_P Parameter: Plant Line Value: CS8105
  misc_feature: MA Experiment 20000072 PARAMETER Experiment Name: At_100uM_ABA_Mutants_cDNA_P Parameter: Timepoint (hr) Value: 6
  misc_feature: MA Experiment 20000072 PARAMETER Experiment Name: At_100uM_ABA_Mutants_cDNA_P Parameter: Tissue Value: Aerial
  misc_feature: MA Experiment 20000072 PARAMETER Experiment Name: At_100uM_ABA_Mutants_cDNA_P Parameter: Treatment Value: 100uM ABA vs. No Treatment
  misc_feature: MA Experiment ID: 20000086 Result: Up-regulated in Transcription
  misc_feature: MA Experiment 20000086 PARAMETER Experiment Name: At_100uM_ABA_Mutants_cDNA_P Parameter: Plant Line Value: CS22
  misc_feature: MA Experiment 20000086 PARAMETER Experiment Name: At_100uM_ABA_Mutants_cDNA_P Parameter: Timepoint (hr) Value: 6
  misc_feature: MA Experiment 20000086 PARAMETER Experiment Name: At_100uM_ABA_Mutants_cDNA_P Parameter: Tissue Value: Aerial
  misc_feature: MA Experiment 20000086 PARAMETER Experiment Name: At_100uM_ABA_Mutants_cDNA_P Parameter: Treatment Value: 100uM ABA vs. No Treatment
  misc_feature: MA Experiment ID: 20000087 Result: Up-regulated in Transcription
  misc_feature: MA Experiment 20000087 PARAMETER Experiment Name: At_100uM_ABA_Mutants_cDNA_P Parameter: Plant Line Value: WS
  misc_feature: MA Experiment 20000087 PARAMETER Experiment Name: At_100uM_ABA_Mutants_cDNA_P Parameter: Timepoint (hr) Value: 6
  misc_feature: MA Experiment 20000087 PARAMETER Experiment Name: At_100uM_ABA_Mutants_cDNA_P Parameter: Tissue Value: Aerial
  misc_feature: MA Experiment 20000087 PARAMETER Experiment Name: At_100uM_ABA_Mutants_cDNA_P Parameter: Treatment Value: 100uM ABA vs. No Treatment
  misc_feature: MA Experiment ID: 20000089 Result: Up-regulated in Transcription
  misc_feature: MA Experiment ID: 20000093 Result: Up-regulated in Transcription
  misc_feature: MA Experiment 20000093 PARAMETER Experiment Name: At_42deg_Heat_cDNA_P Parameter: Temperature (deg C) Value: 42 vs. 22
  misc_feature: MA Experiment 20000093 PARAMETER Experiment Name: At_42deg_Heat_cDNA_P Parameter: Timepoint (hr) Value: 0.5
  misc_feature: MA Experiment 20000093 PARAMETER Experiment Name: At_42deg_Heat_cDNA_P Parameter: Tissue Value: Aerial
  misc_feature: MA Experiment ID: 20000112 Result: Up-regulated in Transcription
  misc_feature: MA Experiment 20000112 PARAMETER Experiment Name: At_42deg_Heat_cDNA_P Parameter: Temperature (deg C) Value: 42 vs. 22
  misc_feature: MA Experiment 20000112 PARAMETER Experiment Name: At_42deg_Heat_cDNA_P Parameter: Timepoint (hr) Value: 2
  misc_feature: MA Experiment 20000112 PARAMETER Experiment Name: At_42deg_Heat_cDNA_P Parameter: Tissue Value: Aerial
  misc_feature: MA Experiment ID: 20000113 Result: Up-regulated in Transcription
  misc_feature: MA Experiment 20000113 PARAMETER Experiment Name: At_42deg_Heat_cDNA_P Parameter: Temperature (deg C) Value: 42 vs. 22
  misc_feature: MA Experiment 20000113 PARAMETER Experiment Name: At_42deg_Heat_cDNA_P Parameter: Timepoint (hr) Value: 8
  misc_feature: MA Experiment 20000113 PARAMETER Experiment Name: At_42deg_Heat_cDNA_P Parameter: Tissue Value: Aerial
  misc_feature: MA Experiment ID: 20000117 Result: Up-regulated in Transcription
  misc_feature: MA Experiment 20000117 PARAMETER Experiment Name: At_100uM_ABA_Mutants_cDNA_P Parameter: Plant Line Value: Columbia
  misc_feature: MA Experiment 20000117 PARAMETER Experiment Name: At_100uM_ABA_Mutants_cDNA_P Parameter: Timepoint (hr) Value: 6
  misc_feature: MA Experiment 20000117 PARAMETER Experiment Name: At_100uM_ABA_Mutants_cDNA_P Parameter: Tissue Value: Aerial
  misc_feature: MA Experiment 20000117 PARAMETER Experiment Name: At_100uM_ABA_Mutants_cDNA_P Parameter: Treatment Value: 100uM ABA vs. No Treatment
  misc_feature: MA Experiment ID: 20000144 Result: Up-regulated in Transcription
  misc_feature: MA Experiment 20000144 PARAMETER Experiment Name: At_42deg_Heat_cDNA_P Parameter: Temperature (deg C) Value: 42 vs. 22
  misc_feature: MA Experiment 20000144 PARAMETER Experiment Name: At_42deg_Heat_cDNA_P Parameter: Timepoint (hr) Value: 1
  misc_feature: MA Experiment 20000144 PARAMETER Experiment Name: At_42deg_Heat_cDNA_P Parameter: Tissue Value: Aerial
  misc_feature: MA Experiment ID: 20000171 Result: Up-regulated in Transcription
  misc_feature: MA Experiment 20000171 PARAMETER Experiment Name: At_42deg_Heat_P Parameter: Age (day) Value: 14
  misc_feature: MA Experiment 20000171 PARAMETER Experiment Name: At_42deg_Heat_P Parameter: Organism Value: A. thaliana
  misc_feature: MA Experiment 20000171 PARAMETER Experiment Name: At_42deg_Heat_P Parameter: Plant Line Value: WS
  misc_feature: MA Experiment 20000171 PARAMETER Experiment Name: At_42deg_Heat_P Parameter: Temperature (deg C) Value: 42 vs. 22
  misc_feature: MA Experiment 20000171 PARAMETER Experiment Name: At_42deg_Heat_P Parameter: Timepoint (hr) Value: 1
  misc_feature: MA Experiment 20000171 PARAMETER Experiment Name: At_42deg_Heat_P Parameter: Tissue Value: Aerial
  misc_feature: MA Experiment ID: 20000173 Result: Up-regulated in Transcription
  misc_feature: MA Experiment 20000173 PARAMETER Experiment Name: At_42deg_Heat_P Parameter: Age (day) Value: 14
  misc_feature: MA Experiment 20000173 PARAMETER Experiment Name: At_42deg_Heat_P Parameter: Organism Value: A. thaliana
  misc_feature: MA Experiment 20000173 PARAMETER Experiment Name: At_42deg_Heat_P Parameter: Plant Line Value: WS
  misc_feature: MA Experiment 20000173 PARAMETER Experiment Name: At_42deg_Heat_P Parameter: Temperature (deg C) Value: 42 vs. 22
  misc_feature: MA Experiment 20000173 PARAMETER Experiment Name: At_42deg_Heat_P Parameter: Timepoint (hr) Value: 6
  misc_feature: MA Experiment 20000173 PARAMETER Experiment Name: At_42deg_Heat_P Parameter: Tissue Value: Aerial
  misc_feature: MA Experiment ID: 20001248 Result: Down-regulated in Transcription
  misc_feature: MA Experiment 20001248 PARAMETER Experiment Name: At_Far-red-induction_P Parameter: Age (day) Value: 7
  misc_feature: MA Experiment 20001248 PARAMETER Experiment Name: At_Far-red-induction_P Parameter: Light Value: Far-red vs. White
  misc_feature: MA Experiment 20001248 PARAMETER Experiment Name: At_Far-red-induction_P Parameter: Organism Value: A. thaliana
  misc_feature: MA Experiment 20001248 PARAMETER Experiment Name: At_Far-red-induction_P Parameter: Plant Line Value: Columbia
  misc_feature: MA Experiment 20001248 PARAMETER Experiment Name: At_Far-red-induction_P Parameter: Timepoint (hr) Value: 4
  misc_feature: MA Experiment 20001248 PARAMETER Experiment Name: At_Far-red-induction_P Parameter: Tissue Value: Whole Plant
  misc_feature: MA Experiment ID: 20001557 Result: Down-regulated in Transcription
  misc_feature: MA Experiment 20001557 PARAMETER Experiment Name: At_Drought_Soil_Dry_P Parameter: Age (day) Value: 27
  misc_feature: MA Experiment 20001557 PARAMETER Experiment Name: At_Drought_Soil_Dry_P Parameter: Organism Value: A. thaliana
  misc_feature: MA Experiment 20001557 PARAMETER Experiment Name: At_Drought_Soil_Dry_P Parameter: Plant Line Value: WS
  misc_feature: MA Experiment 20001557 PARAMETER Experiment Name: At_Drought_Soil_Dry_P Parameter: Post Timepoint (hr) Value: 3
  misc_feature: MA Experiment 20001557 PARAMETER Experiment Name: At_Drought_Soil_Dry_P Parameter: Post-Treatment Value: Re-Water vs. No Drought
  misc_feature: MA Experiment 20001557 PARAMETER Experiment Name: At_Drought_Soil_Dry_P Parameter: Timepoint (day) Value: 13
  misc_feature: MA Experiment 20001557 PARAMETER Experiment Name: At_Drought_Soil_Dry_P Parameter: Treatment Value: Drought vs. No Drought
  misc_feature: MA Experiment ID: 20001558 Result: Down-regulated in Transcription
  misc_feature: MA Experiment 20001558 PARAMETER Experiment Name: At_Drought_Soil_Dry_P Parameter: Age (day) Value: 27
  misc_feature: MA Experiment 20001558 PARAMETER Experiment Name: At_Drought_Soil_Dry_P Parameter: Organism Value: A. thaliana
  misc_feature: MA Experiment 20001558 PARAMETER Experiment Name: At_Drought_Soil_Dry_P Parameter: Plant Line Value: WS
  misc_feature: MA Experiment 20001558 PARAMETER Experiment Name: At_Drought_Soil_Dry_P Parameter: Post Timepoint (hr) Value: 6
  misc_feature: MA Experiment 20001558 PARAMETER Experiment Name: At_Drought_Soil_Dry_P Parameter: Post-Treatment Value: Re-Water vs. No Drought
  misc_feature: MA Experiment 20001558 PARAMETER Experiment Name: At_Drought_Soil_Dry_P Parameter: Timepoint (day) Value: 13
  misc_feature: MA Experiment 20001558 PARAMETER Experiment Name: At_Drought_Soil_Dry_P Parameter: Treatment Value: Drought vs. No Drought
  misc_feature: MA Experiment ID: 20001908 Result: Up-regulated in Transcription
  misc_feature: MA Experiment 20001908 PARAMETER Experiment Name: At_Drought_Reproduction_P Parameter: Age (day) Value: 40
  misc_feature: MA Experiment 20001908 PARAMETER Experiment Name: At_Drought_Reproduction_P Parameter: Organism Value: A. thaliana
  misc_feature: MA Experiment 20001908 PARAMETER Experiment Name: At_Drought_Reproduction_P Parameter: Plant Line Value: WS
  misc_feature: MA Experiment 20001908 PARAMETER Experiment Name: At_Drought_Reproduction_P Parameter: Timepoint (day) Value: 10
  misc_feature: MA Experiment 20001908 PARAMETER Experiment Name: At_Drought_Reproduction_P Parameter: Tissue Value: Siliques
  misc_feature: MA Experiment 20001908 PARAMETER Experiment Name: At_Drought_Reproduction_P Parameter: Treatment Value: Drought vs. No Drought
acctcaaagaaaacatcgaaatcttagagaagaagaaaagaaaaagaagagaaatgacagagaagaaagagatggaagtggtgaaagggctcaacgtggagagatacatgggccgttggtacgagattgcttctttcccatcaaggtttcagccaaagaacggcgtcgacactcgcgccacctacacccttaaccccgacggtaccatacacgtcttgaacgaaacgtggagcaacgggaagaggggttttatcgaaggcagcgcctataaggccgatcctaaaagcgacgaagccaagctcaaagtcaagttctatgtccctcctttcctcccaatcattcccgtcaccggagactactgggtgctctacatcgatcctgactaccagcacgctctcattggccagccttccaggagttatctctggatattgagcaggacggcgcaaatggaggaagagacgtataagcagctggtggagaaggcagtggaggaaggttatgacatcagcaagcttcacaagactcctcagagtgacacaccacctgagtccaacactgcccctgaagactccaagggcgtttggtggttcaaatctctcttcggcaaatagattacacggcacacaaagactttgtttcacctctttgatccttttgtctgtgtaatatactaccccctttgtctactctagttatcttccatcatctgcttttgtctatttacgacatcttcatctagttatgcaaagtcgtctcttttac

SEQ ID NO: 30192 - protein, 203 aa, Arabidopsis thaliana
  peptide (1)..(203): Ceres Seq. ID no. 12333666
  misc_feature (34)..(180): Pfam Name: Lipocalin / cytosolic fatty-acid binding protein family Pfam Description: Lipocalin / cytosolic fatty-acid binding
  misc_feature (25)..(185): Homolog of NCBI NO: 23058021 NR Description: hypothetical protein [Pseudomonas fluorescens
  misc_feature (21)..(172): Homolog of NCBI NO: 21231866 NR Description: outer membrane lipoprotein
  misc_feature (18)..(178): Homolog of NCBI NO: 21233298 NR Description: outer membrane lipoprotein Blc
  misc_feature (14)..(172): Homolog of NCBI NO: 13474785 NR Description: outer membrane lipoprotein [Mesorhizobium loti]
  misc_feature (21)..(172): Homolog of NCBI NO: 21243293 NR Description: outer membrane lipoprotein Blc
  misc_feature (13)..(172): Homolog of NCBI NO: 13473955 NR Description: outer membrane lipoprotein [Mesorhizobium loti]
  misc_feature (18)..(178): Homolog of NCBI NO: 21244675 NR Description: outer membrane lipoprotein Blc
  misc_feature (18)..(203): Homolog of NCBI NO: 18650668 NR Description: temperature stress-induced lipocalin [Triticum
  misc_feature (24)..(203): Homolog of NCBI NO: 21553811 NR Description: outer membrane lipoprotein-like [Arabidopsis
  misc_feature (18)..(203): Homolog of NCBI NO: 15242942 NR Description: outer membrane lipoprotein - like
LKENIEILEKKKRKRREMTEKKEMEVVKGLNVERYMGRWYEIASFPSRFQPKNGVDTRATYTLNPDGTIHVLNETWSNGKRGFIEGSAYKADPKSDEAKLKVKFYVPPFLPIIPVTGDYWVLYIDPDYQHALIGQPSRSYLWILSRTAQMEEETYKQLVEKAVEEGYDISKLHKTPQSDTPPESNTAPEDSKGVWWFKSLFGK

SEQ ID NO: 30193 - protein, 186 aa, Arabidopsis thaliana
  peptide (1)..(186): Ceres Seq. ID no. 12333667
  misc_feature (17)..(163): Pfam Name: Lipocalin / cytosolic fatty-acid binding protein family Pfam Description: Lipocalin / cytosolic fatty-acid binding
  misc_feature (8)..(168): Homolog of NCBI NO: 23058021 NR Description: hypothetical protein [Pseudomonas fluorescens
  misc_feature (4)..(155): Homolog of NCBI NO: 21231866 NR Description: outer membrane lipoprotein
  misc_feature (1)..(161): Homolog of NCBI NO: 21233298 NR Description: outer membrane lipoprotein Blc
  misc_feature (1)..(155): Homolog of NCBI NO: 13474785 NR Description: outer membrane lipoprotein [Mesorhizobium loti]
  misc_feature (4)..(155): Homolog of NCBI NO: 21243293 NR Description: outer membrane lipoprotein Blc
  misc_feature (1)..(155): Homolog of NCBI NO: 13473955 NR Description: outer membrane lipoprotein [Mesorhizobium loti]
  misc_feature (1)..(161): Homolog of NCBI NO: 21244675 NR Description: outer membrane lipoprotein Blc
  misc_feature (1)..(186): Homolog of NCBI NO: 18650668 NR Description: temperature stress-induced lipocalin [Triticum
  misc_feature (7)..(186): Homolog of NCBI NO: 21553811 NR Description: outer membrane lipoprotein-like [Arabidopsis
  misc_feature (1)..(186): Homolog of NCBI NO: 15242942 NR Description: outer membrane lipoprotein - like
MTEKKEMEVVKGLNVERYMGRWYEIASFPSRFQPKNGVDTRATYTLNPDGTIHVLNETWSNGKRGFIEGSAYKADPKSDEAKLKVKFYVPPFLPIIPVTGDYWVLYIDPDYQHALIGQPSRSYLWILSRTAQMEEETYKQLVEKAVEEGYDISKLHKTPQSDTPPESNTAPEDSKGVWWFKSLFGK

SEQ ID NO: 30194 - protein, 180 aa, Arabidopsis thaliana
  peptide (1)..(180): Ceres Seq. ID no. 12333668
  misc_feature (11)..(157): Pfam Name: Lipocalin / cytosolic fatty-acid binding protein family Pfam Description: Lipocalin / cytosolic fatty-acid binding
  misc_feature (2)..(162): Homolog of NCBI NO: 23058021 NR Description: hypothetical protein [Pseudomonas fluorescens
  misc_feature (1)..(149): Homolog of NCBI NO: 21231866 NR Description: outer membrane lipoprotein
  misc_feature (1)..(155): Homolog of NCBI NO: 21233298 NR Description: outer membrane lipoprotein Blc
  misc_feature (1)..(149): Homolog of NCBI NO: 13474785 NR Description: outer membrane lipoprotein [Mesorhizobium loti]
  misc_feature (1)..(149): Homolog of NCBI NO: 21243293 NR Description: outer membrane lipoprotein Blc
  misc_feature (1)..(149): Homolog of NCBI NO: 13473955 NR Description: outer membrane lipoprotein [Mesorhizobium loti]
  misc_feature (1)..(155): Homolog of NCBI NO: 21244675 NR Description: outer membrane lipoprotein Blc
  misc_feature (1)..(180): Homolog of NCBI NO: 18650668 NR Description: temperature stress-induced lipocalin [Triticum
  misc_feature (1)..(180): Homolog of NCBI NO: 21553811 NR Description: outer membrane lipoprotein-like [Arabidopsis
  misc_feature (1)..(180): Homolog of NCBI NO: 15242942 NR Description: outer membrane lipoprotein - like
MEVVKGLNVERYMGRWYEIASFPSRFQPKNGVDTRATYTLNPDGTIHVLNETWSNGKRGFIEGSAYKADPKSDEAKLKVKFYVPPFLPIIPVTGDYWVLYIDPDYQHALIGQPSRSYLWILSRTAQMEEETYKQLVEKAVEEGYDISKLHKTPQSDTPPESNTAPEDSKGVWWFKSLFGK

SEQ ID NO: 30195 - DNA, 1364 bp, Arabidopsis thaliana
  misc_feature (1)..(1364): Ceres Seq. ID no. 12335499
  misc_feature: MA Experiment ID: 108573 Result: Up-regulated in Transcription
  misc_feature: MA Experiment 108573 PARAMETER Experiment Name: At_Drought_cDNA_P Parameter: Timepoint (hr) Value: 6
  misc_feature: MA Experiment 108573 PARAMETER Experiment Name: At_Drought_cDNA_P Parameter: Tissue Value: Aerial
  misc_feature: MA Experiment 108573 PARAMETER Experiment Name: At_Drought_cDNA_P Parameter: Treatment Value: Drought vs. No Drought
  misc_feature: MA Experiment ID: 20000235 Result: Down-regulated in Transcription
  misc_feature: MA Experiment 20000235 PARAMETER Experiment Name: At_Siliques_P Parameter: Age (day) Value: 21
  misc_feature: MA Experiment 20000235 PARAMETER Experiment Name: At_Siliques_P Parameter: Organism Value: A. thaliana
  misc_feature: MA Experiment 20000235 PARAMETER Experiment Name: At_Siliques_P Parameter: Plant Line Value: WS
  misc_feature: MA Experiment 20000235 PARAMETER Experiment Name: At_Siliques_P Parameter: Tissue Value: 5-10mm Siliques vs. Whole Plant
  misc_feature: MA Experiment ID: 20000495 Result: Up-regulated in Transcription
  misc_feature: MA Experiment 20000495 PARAMETER Experiment Name: At_Guard_Cells_P Parameter: Harvest Date Value: 8/2/2002
  misc_feature: MA Experiment 20000495 PARAMETER Experiment Name: At_Guard_Cells_P Parameter: Organism Value: A. thaliana
  misc_feature: MA Experiment 20000495 PARAMETER Experiment Name: At_Guard_Cells_P Parameter: Tissue Value: Guard Cells vs. Leaves
  misc_feature: MA Experiment ID: 20000496 Result: Up-regulated in Transcription
  misc_feature: MA Experiment 20000496 PARAMETER Experiment Name: At_Guard_Cells_P Parameter: Harvest Date Value: 7/19/2002
  misc_feature: MA Experiment 20000496 PARAMETER Experiment Name: At_Guard_Cells_P Parameter: Organism Value: Canola
  misc_feature: MA Experiment 20000496 PARAMETER Experiment Name: At_Guard_Cells_P Parameter: Tissue Value: Guard Cells vs. Leaves
  misc_feature: MA Experiment ID: 20001451 Result: Up-regulated in Transcription
  misc_feature: MA Experiment 20001451 PARAMETER Experiment Name: At_Far-red-induction_P Parameter: Age (day) Value: 7
  misc_feature: MA Experiment 20001451 PARAMETER Experiment Name: At_Far-red-induction_P Parameter: Light Value: Far-red vs. White
  misc_feature: MA Experiment 20001451 PARAMETER Experiment Name: At_Far-red-induction_P Parameter: Organism Value: A. thaliana
  misc_feature: MA Experiment 20001451 PARAMETER Experiment Name: At_Far-red-induction_P Parameter: Plant Line Value: Columbia
  misc_feature: MA Experiment 20001451 PARAMETER Experiment Name: At_Far-red-induction_P Parameter: Timepoint (hr) Value: 24
  misc_feature: MA Experiment 20001451 PARAMETER Experiment Name: At_Far-red-induction_P Parameter: Tissue Value: Whole Plant
ataattttctaagaggcgtgactttaaaaatctgtaaaaaagcaaatccgaagaaagagagagagagaaggtgattttgaaatttcagataacgcagaatttttttattctcgccggagttttctcctcccaccgtctctgattctcgtcgccgccgtacacagttgttgttctctgccgtttctgcaagatgattggatcgtttcttacaagaggattggtgatggtgttgggctatgcttaccctgcgtatgaatgttacaagactgttgaaaagaataggcctgaaatcgagcaacttcgcttttggtgtcagtactggatattggttgcttgcttgacagtttttgagagagttggtgatgcgtttgtttcatgggttccgatgtacagtgaagctaagttggcattcttcatatacctgtggtatcctaaaaccaggggtactacatatgtctacgagtccttctttaggccatatctctcacagcatgagaatgacatagaccatagtttgctcgagctaaggactagagcaggagatatggctgttatatactggcaacgagttgcaagttatggtcagaccagaatccttgagattttgcagtatgttgctgcacaatcaactccaagaccgcagccacctcagaaacgtggaggtagagctaatcaagctcctgcgaagcctaagaaagcccctgttcccccaatcagaacctgaagaagtatcattgtcctcgtcttctagctcatcttcaagtgaaaatgaaggtaatgagccaacccgtaaagtatcaggcccgtcaagacctagaccaacagtgacatctgtaccagctgcagatcccaaaaacgcgggtaccactcagatagcacagaaatcagtagcttccccaattgtgaacccaccacagtcaaccacccaagtggaaccaatgcagatagaagaagtggaaggagaggcagaatcagggaatgaaaatcccaacccggaaggtccaaaggagacagtgatggaggagacaatcaggatgactcgtgggaggttgaggaagacgcgttcggaagaaagccgttgaaagaagaagaagaagctcaatccaaaaaattgttacttacttgcataacagtggtctctcttctctcttactctatgtttcctgcttctagaattacgttgacaggaactaacaactagtgggaatggttgtatgaaaagttaatctgttggttttgttcttttattcaatttagttgcatctttgacaaaaaaaaaaaaaatcaatttagttgcattaagtgtaaaagataacactcttgttttgtttgttcctttcgataactaattcggtaaaataggc

SEQ ID NO: 30196 - protein, 177 aa, Arabidopsis thaliana
  peptide (1)..(177): Ceres Seq. ID no. 12335500
  misc_feature (3)..(98): Pfam Name: TB2/DP1, HVA22 family Pfam Description: TB2/DP1, HVA22 family
  misc_feature (1)..(146): Homolog of NCBI NO: 21671921 NR Description: Putative protein with HVA22 domain
  misc_feature (12)..(156): Homolog of NCBI NO: 15222332 NR Description: hypothetical protein; protein id: At1g75700.1
  misc_feature (1)..(151): Homolog of NCBI NO: 20502988 NR Description: Putative InsB from Escherichia coli
  misc_feature (1)..(146): Homolog of NCBI NO: 37531658 NR Description: putative Magnaporthe grisea pathogenicity protein
  misc_feature (12)..(160): Homolog of NCBI NO: 25513732 NR Description: T20H2.26 protein - Arabidopsis thaliana
  misc_feature (1)..(160): Homolog of NCBI NO: 21553483 NR Description: pathogenicity protein PATH531-like protein
  misc_feature (1)..(160): Homolog of NCBI NO: 18394805 NR Description: expressed protein
  misc_feature (1)..(173): Homolog of NCBI NO: 21553813 NR Description: unknown [Arabidopsis thaliana]
  misc_feature (1)..(173): Homolog of NCBI NO: 18422223 NR Description: expressed protein
  misc_feature (12)..(173): Homolog of NCBI NO: 9759014 NR Description: gene_id:K16E1.3~unknown protein [Arabidopsis
MIGSFLTRGLVMVLGYAYPAYECYKTVEKNRPEIEQLRFWCQYWILVACLTVFERVGDAFVSWVPMYSEAKLAFFIYLWYPKTRGTTYVYESFFRPYLSQHENDIDHSLLELRTRAGDMAVIYWQRVASYGQTRILEILQYVAAQSTPRPQPPQKRGGRANQAPAKPKKAPVPPIRT

SEQ ID NO: 30197 - protein, 167 aa, Arabidopsis thaliana
  peptide (1)..(167): Ceres Seq. ID no. 12335501
  misc_feature (69)..(160): Homolog of NCBI NO: 37531658 NR Description: putative Magnaporthe grisea pathogenicity protein
  misc_feature (39)..(163): Homolog of NCBI NO: 25513732 NR Description: T20H2.26 protein - Arabidopsis thaliana
  misc_feature (39)..(163): Homolog of NCBI NO: 21553483 NR Description: pathogenicity protein PATH531-like protein
  misc_feature (39)..(163): Homolog of NCBI NO: 18394805 NR Description: expressed protein
  misc_feature (39)..(167): Homolog of NCBI NO: 21553813 NR Description: unknown [Arabidopsis thaliana]
  misc_feature (39)..(167): Homolog of NCBI NO: 18422223 NR Description: expressed protein
  misc_feature (39)..(167): Homolog of NCBI NO: 9759014 NR Description: gene_id:K16E1.3~unknown protein [Arabidopsis
MVRPESLRFCSMLLHNQLQDRSHLRNVEVELIKLLRSLRKPLFPQSEPEEVSLSSSSSSSSSENEGNEPTRKVSGPSRPRPTVTSVPAADPKNAGTTQIAQKSVASPIVNPPQSTTQVEPMQIEEVEGEAESGNENPNPEGPKETVMEETIRMTRGRLRKTRSEESR

SEQ ID NO: 30198 - protein, 166 aa, Arabidopsis thaliana
  peptide (1)..(166): Ceres Seq. ID no. 12335502
  misc_feature (1)..(87): Pfam Name: TB2/DP1, HVA22 family Pfam Description: TB2/DP1, HVA22 family
  misc_feature (1)..(135): Homolog of NCBI NO: 21671921 NR Description: Putative protein with HVA22 domain
  misc_feature (1)..(145): Homolog of NCBI NO: 15222332 NR Description: hypothetical protein; protein id: At1g75700.1
  misc_feature (1)..(140): Homolog of NCBI NO: 20502988 NR Description: Putative InsB from Escherichia coli
  misc_feature (1)..(135): Homolog of NCBI NO: 37531658 NR Description: putative Magnaporthe grisea pathogenicity protein
  misc_feature (1)..(149): Homolog of NCBI NO: 25513732 NR Description: T20H2.26 protein - Arabidopsis thaliana
  misc_feature (1)..(149): Homolog of NCBI NO: 21553483 NR Description: pathogenicity protein PATH531-like protein
  misc_feature (1)..(149): Homolog of NCBI NO: 18394805 NR Description: expressed protein
  misc_feature (1)..(162): Homolog of NCBI NO: 21553813 NR Description: unknown [Arabidopsis thaliana]
  misc_feature (1)..(162): Homolog of NCBI NO: 18422223 NR Description: expressed protein
  misc_feature (1)..(162): Homolog of NCBI NO: 9759014 NR Description: gene_id:K16E1.3~unknown protein [Arabidopsis
MVLGYAYPAYECYKTVEKNRPEIEQLRFWCQYWILVACLTVFERVGDAFVSWVPMYSEAKLAFFIYLWYPKTRGTTYVYESFFRPYLSQHENDIDHSLLELRTRAGDMAVIYWQRVASYGQTRILEILQYVAAQSTPRPQPPQKRGGRANQAPAKPKKAPVPPIRT

SEQ ID NO: 30199 - DNA, 1355 bp, Arabidopsis thaliana
  misc_feature (1)..(1355): Ceres Seq. ID no. 12325051
  misc_feature: MA Experiment ID: 108573 Result: Up-regulated in Transcription
  misc_feature: MA Experiment 108573 PARAMETER Experiment Name: At_Drought_cDNA_P Parameter: Timepoint (hr) Value: 6
  misc_feature: MA Experiment 108573 PARAMETER Experiment Name: At_Drought_cDNA_P Parameter: Tissue Value: Aerial
  misc_feature: MA Experiment 108573 PARAMETER Experiment Name: At_Drought_cDNA_P Parameter: Treatment Value: Drought vs. No Drought
  misc_feature: MA Experiment ID: 20000173 Result: Down-regulated in Transcription
  misc_feature: MA Experiment 20000173 PARAMETER Experiment Name: At_42deg_Heat_P Parameter: Age (day) Value: 14
  misc_feature: MA Experiment 20000173 PARAMETER Experiment Name: At_42deg_Heat_P Parameter: Organism Value: A. thaliana
  misc_feature: MA Experiment 20000173 PARAMETER Experiment Name: At_42deg_Heat_P Parameter: Plant Line Value: WS
  misc_feature: MA Experiment 20000173 PARAMETER Experiment Name: At_42deg_Heat_P Parameter: Temperature (deg C) Value: 42 vs. 22
  misc_feature: MA Experiment 20000173 PARAMETER Experiment Name: At_42deg_Heat_P Parameter: Timepoint (hr) Value: 6
  misc_feature: MA Experiment 20000173 PARAMETER Experiment Name: At_42deg_Heat_P Parameter: Tissue Value: Aerial
  misc_feature: MA Experiment ID: 20000185 Result: Up-regulated in Transcription
  misc_feature: MA Experiment 20000185 PARAMETER Experiment Name: At_Roots__P Parameter: Age (day) Value: 7 vs. 21
  misc_feature: MA Experiment 20000185 PARAMETER Experiment Name: At_Roots__P Parameter: Organism Value: A. thaliana
  misc_feature: MA Experiment 20000185 PARAMETER Experiment Name: At_Roots__P Parameter: Tissue Value: Roots vs. Whole Plant
  misc_feature: MA Experiment ID: 20000227 Result: Down-regulated in Transcription
  misc_feature: MA Experiment 20000227 PARAMETER Experiment Name: At_Root-Tips-vs-Tops_P Parameter: Tissue Value: Root Tips vs. Root Tops
  misc_feature: MA Experiment ID: 20000439 Result: Up-regulated in Transcription
  misc_feature: MA Experiment 20000439 PARAMETER Experiment Name: At_Roots__P Parameter: Age (day) Value: 14 vs. 21
  misc_feature: MA Experiment 20000439 PARAMETER Experiment Name: At_Roots__P Parameter: Organism Value: A. thaliana
  misc_feature: MA Experiment 20000439 PARAMETER Experiment Name: At_Roots__P Parameter: Tissue Value: Roots vs. Whole Plant
  misc_feature: MA Experiment ID: 20000794 Result: Up-regulated in Transcription
  misc_feature: MA Experiment 20000794 PARAMETER Experiment Name: At_Petals_P Parameter: Age (day) Value: 23-25 days
  misc_feature: MA Experiment 20000794 PARAMETER Experiment Name: At_Petals_P Parameter: Plant Line Value: WS
  misc_feature: MA Experiment 20000794 PARAMETER Experiment Name: At_Petals_P Parameter: Tissue Value: Petals vs. Whole plant
  misc_feature: MA Experiment ID: 20001905 Result: Up-regulated in Transcription
  misc_feature: MA Experiment 20001905 PARAMETER Experiment Name: At_Drought_Reproduction_P Parameter: Age (day) Value: 40
  misc_feature: MA Experiment 20001905 PARAMETER Experiment Name: At_Drought_Reproduction_P Parameter: Organism Value: A. thaliana
  misc_feature: MA Experiment 20001905 PARAMETER Experiment Name: At_Drought_Reproduction_P Parameter: Plant Line Value: WS
  misc_feature: MA Experiment 20001905 PARAMETER Experiment Name: At_Drought_Reproduction_P Parameter: Timepoint (day) Value: 10
  misc_feature: MA Experiment 20001905 PARAMETER Experiment Name: At_Drought_Reproduction_P Parameter: Tissue Value: Rosettes
  misc_feature: MA Experiment 20001905 PARAMETER Experiment Name: At_Drought_Reproduction_P Parameter: Treatment Value: Drought vs. No Drought
aatctcttccgttgtcaacaatcgaaaccgcgaaccctttgatttgaccagatgagatcaaaatcgaagcaggtgttgctactatggcttgagggttttcgagaagcttgttctcttcaccgtgttttcattctctgtctcaggtcgagaaagcttctcttaagaactgggcagtgttttcttttgaatggtttgattttcttaggaagtttaggtgtgtttaagtggtttatagatccatcccttcagtggatattacctgatcagtgctctcccctcacttctcaagaattttgttcgtatggtggattttacgcctttctacgtggtggacttttgcagctcttttacgttttttggttctatcctctgtacatgctcagcttcatcttgagtaacatctggtataacgatattgcaaagcatggattcgaggcaattgagatatctgacttaaactcagctgaagcattaagacaaggtgaagctctggcgtccctgaatatggcaaatgctgaaaggccttctggtcttggaggggtgatgatcggtataggagagcaggtgtactcgatacttctcctgacttttttttttcttgaggtttgtgttgttggtgttataccatacattgggaagatattgaatttcttacttctttcatggatgtatgcctactattgttacgaatataagtggaacttctcggggatttctctgaagaaaaggctggacttctttcaatctaactgggcattctttgctggttttggaagcccctgcgtgttggccattttctttctctcgcctcttgtgagcggagctcttatggccatcttgtttccattgtttgtcttaactgctacaggatcaggacctgaaaaattgattggggccccgagaagaacgtggaaatgtgcaggtttaggaaagcttccaatattctatattgctgacactctctcgatgttggcgttgtctatcttccggttggagtcccctcacgagaattaacatgaaaagacaggctgaagttgaaacattatgtctgcatctctcagtcttcgtggctagtcagaagattatatgcatttgtgttgatagtcataatgtcttcttggtgatattgtcaagtacagactcatgcttcagcaatttccgtgcggctttgaggtcatctgacacgcacgctcatggccgacgacatgctgctgcaaactccaaagcaacagacatgaagaatacaagatttatgttaaagtagtgttgattgtaaaataatataatccgtgtttagtgtttcattcattttacttgtacatatccttatctaataaatcacaactcacttcttt

SEQ ID NO: 30200 - protein, 320 aa, Arabidopsis thaliana
  peptide (1)..(320): Ceres Seq. ID no. 12325052
  misc_feature (34)..(128): Homolog of NCBI NO: 6631104 NR Description: etoposide-induced mRNA [Homo sapiens]
  misc_feature (154)..(271): Homolog of NCBI NO: 6631104 NR Description: etoposide-induced mRNA [Homo sapiens]
  misc_feature (34)..(128): Homolog of NCBI NO: 30585325 NR Description: Homo sapiens etoposide-induced mRNA [synthetic
  misc_feature (154)..(271): Homolog of NCBI NO: 30585325 NR Description: Homo sapiens etoposide-induced mRNA [synthetic
  misc_feature (34)..(128): Homolog of NCBI NO: 12803171 NR Description: Similar to etoposide-induced mRNA [Homo sapiens]
  misc_feature (154)..(271): Homolog of NCBI NO: 12803171 NR Description: Similar to etoposide-induced mRNA [Homo sapiens]
  misc_feature (34)..(128): Homolog of NCBI NO: 34863067 NR Description: similar to EI24 [Rattus norvegicus]
  misc_feature (154)..(271): Homolog of NCBI NO: 34863067 NR Description: similar to EI24 [Rattus norvegicus]
  misc_feature (1)..(52): Homolog of NCBI NO: 30680261 NR Description: predicted protein [Arabidopsis thaliana]
  misc_feature (119)..(213): Homolog of NCBI NO: 30680261 NR Description: predicted protein [Arabidopsis thaliana]
MRSKSKQVLLLWLEGFREACSLHRVFILCLRSRKLLLRTGQCFLLNGLIFLGSLGVFKWFIDPSLQWILPDQCSPLTSQEFCSYGGFYAFLRGGLLQLFYVFWFYPLYMLSFILSNIWYNDIAKHGFEAIEISDLNSAEALRQGEALASLNMANAERPSGLGGVMIGIGEQVYSILLLTFFFLEVCVVGVIPYIGKILNFLLLSWMYAYYCYEYKWNFSGISLKKRLDFFQSNWAFFAGFGSPCVLAIFFLSPLVSGALMAILFPLFVLTATGSGPEKLIGAPRRTWKCAGLGKLPIFYIADTLSMLALSIFRLESPHEN

SEQ ID NO: 30201 - protein, 212 aa, Arabidopsis thaliana
  peptide (1)..(212): Ceres Seq. ID no. 12325053
  misc_feature (46)..(163): Homolog of NCBI NO: 6681289 NR Description: etoposide induced 2.4 mRNA [Mus musculus]
  misc_feature (1)..(20): Homolog of NCBI NO: 6631104 NR Description: etoposide-induced mRNA [Homo sapiens]
  misc_feature (46)..(163): Homolog of NCBI NO: 6631104 NR Description: etoposide-induced mRNA [Homo sapiens]
  misc_feature (1)..(20): Homolog of NCBI NO: 30585325 NR Description: Homo sapiens etoposide-induced mRNA [synthetic
  misc_feature (46)..(163): Homolog of NCBI NO: 30585325 NR Description: Homo sapiens etoposide-induced mRNA [synthetic
  misc_feature (1)..(20): Homolog of NCBI NO: 12803171 NR Description: Similar to etoposide-induced mRNA [Homo sapiens]
  misc_feature (46)..(163): Homolog of NCBI NO: 12803171 NR Description: Similar to etoposide-induced mRNA [Homo sapiens]
  misc_feature (1)..(20): Homolog of NCBI NO: 34863067 NR Description: similar to EI24 [Rattus norvegicus]
  misc_feature (46)..(163): Homolog of NCBI NO: 34863067 NR Description: similar to EI24 [Rattus norvegicus]
  misc_feature (11)..(105): Homolog of NCBI NO: 30680261 NR Description: predicted protein [Arabidopsis thaliana]
MLSFILSNIWYNDIAKHGFEAIEISDLNSAEALRQGEALASLNMANAERPSGLGGVMIGIGEQVYSILLLTFFFLEVCVVGVIPYIGKILNFLLLSWMYAYYCYEYKWNFSGISLKKRLDFFQSNWAFFAGFGSPCVLAIFFLSPLVSGALMAILFPLFVLTATGSGPEKLIGAPRRTWKCAGLGKLPIFYIADTLSMLALSIFRLESPHEN

SEQ ID NO: 30202 - protein, 169 aa, Arabidopsis thaliana
  peptide (1)..(169): Ceres Seq. ID no. 12325054
  misc_feature (40)..(120): Homolog of NCBI NO: 17553308 NR Description: Etoposide-induced mRNA like (36.6 kD)
  misc_feature (1)..(126): Homolog of NCBI NO: 31223768 NR Description: ENSANGP00000010382 [Anopheles gambiae]
  misc_feature (1)..(125): Homolog of NCBI NO: 19920698 NR Description: CG15626-PA [Drosophila melanogaster]
  misc_feature (3)..(120): Homolog of NCBI NO: 6681289 NR Description: etoposide induced 2.4 mRNA [Mus musculus]
  misc_feature (3)..(120): Homolog of NCBI NO: 6631104 NR Description: etoposide-induced mRNA [Homo sapiens]
  misc_feature (3)..(120): Homolog of NCBI NO: 30585325 NR Description: Homo sapiens etoposide-induced mRNA [synthetic
  misc_feature (3)..(120): Homolog of NCBI NO: 12803171 NR Description: Similar to etoposide-induced mRNA [Homo sapiens]
  misc_feature (3)..(120): Homolog of NCBI NO: 34863067 NR Description: similar to EI24 [Rattus norvegicus]
  misc_feature (1)..(62): Homolog of NCBI NO: 30680261 NR Description: predicted protein [Arabidopsis thaliana]
MANAERPSGLGGVMIGIGEQVYSILLLTFFFLEVCVVGVIPYIGKILNFLLLSWMYAYYCYEYKWNFSGISLKKRLDFFQSNWAFFAGFGSPCVLAIFFLSPLVSGALMAILFPLFVLTATGSGPEKLIGAPRRTWKCAGLGKLPIFYIADTLSMLALSIFRLESPHEN

SEQ ID NO: 30203 - DNA, 994 bp, Arabidopsis thaliana
  misc_feature (1)..(994): Ceres Seq. ID no. 13500011
  misc_feature: MA Experiment ID: 108434 Result: Up-regulated in Transcription
  misc_feature: MA Experiment 108434 PARAMETER Experiment Name: At_Root_Tips_cDNA_P Parameter: Tissue Value: Root Tips
  misc_feature: MA Experiment ID: 108435 Result: Up-regulated in Transcription
  misc_feature: MA Experiment 108435 PARAMETER Experiment Name: At_stm_Mutants_cDNA_P Parameter: Plant Line Value: wt Landsburg vs stm
  misc_feature: MA Experiment 108435 PARAMETER Experiment Name: At_stm_Mutants_cDNA_P Parameter: Tissue Value: Shoot Apical Meristem Region
  misc_feature: MA Experiment ID: 108461 Result: Up-regulated in Transcription
  misc_feature: MA Experiment 108461 PARAMETER Experiment Name: At_Germinating_Seeds_cDNA_P Parameter: Age (day) Value: 1 vs. 0
  misc_feature: MA Experiment 108461 PARAMETER Experiment Name: At_Germinating_Seeds_cDNA_P Parameter: Tissue Value: Germinating Seeds
  misc_feature: MA Experiment ID: 108462 Result: Down-regulated in Transcription
  misc_feature: MA Experiment 108462 PARAMETER Experiment Name: At_Germinating_Seeds_cDNA_P Parameter: Age (day) Value: 2 vs. 0
  misc_feature: MA Experiment 108462 PARAMETER Experiment Name: At_Germinating_Seeds_cDNA_P Parameter: Tissue Value: Germinating Seeds
  misc_feature: MA Experiment ID: 108463 Result: Down-regulated in Transcription
  misc_feature: MA Experiment 108463 PARAMETER Experiment Name: At_Germinating_Seeds_cDNA_P Parameter: Age (day) Value: 3 vs. 0
  misc_feature: MA Experiment 108463 PARAMETER Experiment Name: At_Germinating_Seeds_cDNA_P Parameter: Tissue Value: Germinating Seeds
  misc_feature: MA Experiment ID: 108464 Result: Down-regulated in Transcription
  misc_feature: MA Experiment 108464 PARAMETER Experiment Name: At_Germinating_Seeds_cDNA_P Parameter: Age (day) Value: 4 vs. 0
  misc_feature: MA Experiment 108464 PARAMETER Experiment Name: At_Germinating_Seeds_cDNA_P Parameter: Tissue Value: Germinating Seeds
  misc_feature: MA Experiment ID: 108501 Result: Up-regulated in Transcription
  misc_feature: MA Experiment 108501 PARAMETER Experiment Name: At_ap2_floral_buds_cDNA_P Parameter: Plant Line Value: ap2 (Ler.)
  misc_feature: MA Experiment 108501 PARAMETER Experiment Name: At_ap2_floral_buds_cDNA_P Parameter: Tissue Value: Closed Flower
  misc_feature: MA Experiment ID: 108595 Result: Up-regulated in Transcription
  misc_feature: MA Experiment 108595 PARAMETER Experiment Name: At_Ler-pi_Ovule_cDNA_P Parameter: Plant Line Value: null
  misc_feature: MA Experiment ID: 20000171 Result: Down-regulated in Transcription
  misc_feature: MA Experiment 20000171 PARAMETER Experiment Name: At_42deg_Heat_P Parameter: Age (day) Value: 14
  misc_feature: MA Experiment 20000171 PARAMETER Experiment Name: At_42deg_Heat_P Parameter: Organism Value: A. thaliana
  misc_feature: MA Experiment 20000171 PARAMETER Experiment Name: At_42deg_Heat_P Parameter: Plant Line Value: WS
  misc_feature: MA Experiment 20000171 PARAMETER Experiment Name: At_42deg_Heat_P Parameter: Temperature (deg C) Value: 42 vs. 22
  misc_feature: MA Experiment 20000171 PARAMETER Experiment Name: At_42deg_Heat_P Parameter: Timepoint (hr) Value: 1
  misc_feature: MA Experiment 20000171 PARAMETER Experiment Name: At_42deg_Heat_P Parameter: Tissue Value: Aerial
  misc_feature: MA Experiment ID: 20000173 Result: Down-regulated in Transcription
  misc_feature: MA Experiment 20000173 PARAMETER Experiment Name: At_42deg_Heat_P Parameter: Age (day) Value: 14
  misc_feature: MA Experiment 20000173 PARAMETER Experiment Name: At_42deg_Heat_P Parameter: Organism Value: A. thaliana
  misc_feature: MA Experiment 20000173 PARAMETER Experiment Name: At_42deg_Heat_P Parameter: Plant Line Value: WS
  misc_feature: MA Experiment 20000173 PARAMETER Experiment Name: At_42deg_Heat_P Parameter: Temperature (deg C) Value: 42 vs. 22
  misc_feature: MA Experiment 20000173 PARAMETER Experiment Name: At_42deg_Heat_P Parameter: Timepoint (hr) Value: 6
  misc_feature: MA Experiment 20000173 PARAMETER Experiment Name: At_42deg_Heat_P Parameter: Tissue Value: Aerial
  misc_feature: MA Experiment ID: 20000179 Result: Up-regulated in Transcription
  misc_feature: MA Experiment 20000179 PARAMETER Experiment Name: At_Germinating_Seeds_P Parameter: Age (hr) Value: 6 vs. 0
  misc_feature: MA Experiment 20000179 PARAMETER Experiment Name: At_Germinating_Seeds_P Parameter: Tissue Value: Germinating Seeds
  misc_feature: MA Experiment ID: 20000180 Result: Up-regulated in Transcription
  misc_feature: MA Experiment 20000180 PARAMETER Experiment Name: At_Germinating_Seeds_P Parameter: Age (hr) Value: 24 vs. 0
  misc_feature: MA Experiment 20000180 PARAMETER Experiment Name: At_Germinating_Seeds_P Parameter: Tissue Value: Germinating Seeds
  misc_feature: MA Experiment ID: 20000184 Result: Up-regulated in Transcription
  misc_feature: MA Experiment 20000184 PARAMETER Experiment Name: At_Shoots__P Parameter: Age (day) Value: 7
  misc_feature: MA Experiment 20000184 PARAMETER Experiment Name: At_Shoots__P Parameter: Tissue Value: Shoots vs. Whole Plant
  misc_feature: MA Experiment ID: 20000185 Result: Up-regulated in Transcription
  misc_feature: MA Experiment 20000185 PARAMETER Experiment Name: At_Roots__P Parameter: Age (day) Value: 7 vs. 21
  misc_feature: MA Experiment 20000185 PARAMETER Experiment Name: At_Roots__P Parameter: Organism Value: A. thaliana
  misc_feature: MA Experiment 20000185 PARAMETER Experiment Name: At_Roots__P Parameter: Tissue Value: Roots vs. Whole Plant
  misc_feature: MA Experiment ID: 20000227 Result: Up-regulated in Transcription
  misc_feature: MA Experiment 20000227 PARAMETER Experiment Name: At_Root-Tips-vs-Tops_P Parameter: Tissue Value: Root Tips vs. Root Tops
  misc_feature: MA Experiment ID: 20000234 Result: Up-regulated in Transcription
  misc_feature: MA Experiment 20000234 PARAMETER Experiment Name: At_Siliques_P Parameter: Age (day) Value: 21
  misc_feature: MA Experiment 20000234 PARAMETER Experiment Name: At_Siliques_P Parameter: Organism Value: A. thaliana
  misc_feature: MA Experiment 20000234 PARAMETER Experiment Name: At_Siliques_P Parameter: Plant Line Value: WS
  misc_feature: MA Experiment 20000234 PARAMETER Experiment Name: At_Siliques_P Parameter: Tissue Value: Less Than 5mm Siliques vs. Whole Plant
  misc_feature: MA Experiment ID: 20000235 Result: Up-regulated in Transcription
  misc_feature: MA Experiment 20000235 PARAMETER Experiment Name: At_Siliques_P Parameter: Age (day) Value: 21
  misc_feature: MA Experiment 20000235 PARAMETER Experiment Name: At_Siliques_P Parameter: Organism Value: A. thaliana
  misc_feature: MA Experiment 20000235 PARAMETER Experiment Name: At_Siliques_P Parameter: Plant Line Value: WS
  misc_feature: MA Experiment 20000235 PARAMETER Experiment Name: At_Siliques_P Parameter: Tissue Value: 5-10mm Siliques vs. Whole Plant
  misc_feature: MA Experiment ID: 20000264 Result: Up-regulated in Transcription
  misc_feature: MA Experiment 20000264 PARAMETER Experiment Name: At_Open_Flower_P Parameter: Age (day) Value: 21
  misc_feature: MA Experiment 20000264 PARAMETER Experiment Name: At_Open_Flower_P Parameter: Plant Line Value: WS
  misc_feature: MA Experiment 20000264 PARAMETER Experiment Name: At_Open_Flower_P Parameter: Tissue Value: Open Flower vs. Whole Plant
  misc_feature: MA Experiment ID: 20000265 Result: Up-regulated in Transcription
  misc_feature: MA Experiment 20000265 PARAMETER Experiment Name: At_Open_Flower_P Parameter: Age (day) Value: 21
  misc_feature: MA Experiment 20000265 PARAMETER Experiment Name: At_Open_Flower_P Parameter: Plant Line Value: WS
  misc_feature: MA Experiment 20000265 PARAMETER Experiment Name: At_Open_Flower_P Parameter: Tissue Value: Closed Flower vs. Whole Plant
  misc_feature: MA Experiment ID: 20000286 Result: Up-regulated in Transcription
  misc_feature: MA Experiment 20000286 PARAMETER Experiment Name: At_Open_Flower_P Parameter: Age (day) Value: 21
  misc_feature: MA Experiment 20000286 PARAMETER Experiment Name: At_Open_Flower_P Parameter: Plant Line Value: WS
  misc_feature: MA Experiment 20000286 PARAMETER Experiment Name: At_Open_Flower_P Parameter: Tissue Value: Half Open vs. Whole Plant
  misc_feature: MA Experiment ID: 20000436 Result: Down-regulated in Transcription
  misc_feature: MA Experiment 20000436 PARAMETER Experiment Name: At_Drought_P Parameter: Age (day) Value: 7
  misc_feature: MA Experiment 20000436 PARAMETER Experiment Name: At_Drought_P Parameter: Organism Value: A. thaliana
  misc_feature: MA Experiment 20000436 PARAMETER Experiment Name: At_Drought_P Parameter: Plant Line Value: WS
  misc_feature: MA Experiment 20000436 PARAMETER Experiment Name: At_Drought_P Parameter: Timepoint (hr) Value: 12
  misc_feature: MA Experiment 20000436 PARAMETER Experiment Name: At_Drought_P Parameter: Tissue Value: Whole Plant
  misc_feature: MA Experiment 20000436 PARAMETER Experiment Name: At_Drought_P Parameter: Treatment Value: Drought vs. No Drought
  misc_feature: MA Experiment ID: 20000437 Result: Down-regulated in Transcription
  misc_feature: MA Experiment 20000437 PARAMETER Experiment Name: At_Drought_P Parameter: Age (day) Value: 8
  misc_feature: MA Experiment 20000437 PARAMETER Experiment Name: At_Drought_P Parameter: Organism Value: A. thaliana
  misc_feature: MA Experiment 20000437 PARAMETER Experiment Name: At_Drought_P Parameter: Plant Line Value: WS
  misc_feature: MA Experiment 20000437 PARAMETER Experiment Name: At_Drought_P Parameter: Timepoint (hr) Value: 24
  misc_feature: MA Experiment 20000437 PARAMETER Experiment Name: At_Drought_P Parameter: Tissue Value: Whole Plant
  misc_feature: MA Experiment 20000437 PARAMETER Experiment Name: At_Drought_P Parameter: Treatment Value: Drought vs. No Drought
  misc_feature: MA Experiment ID: 20000439 Result: Up-regulated in Transcription
  misc_feature: MA Experiment 20000439 PARAMETER Experiment Name: At_Roots__P Parameter: Age (day) Value: 14 vs. 21
  misc_feature: MA Experiment 20000439 PARAMETER Experiment Name: At_Roots__P Parameter: Organism Value: A. thaliana
  misc_feature: MA Experiment 20000439 PARAMETER Experiment Name: At_Roots__P Parameter: Tissue Value: Roots vs. Whole Plant
  misc_feature: MA Experiment ID: 20000453 Result: Down-regulated in Transcription
  misc_feature: MA Experiment 20000453 PARAMETER Experiment Name: At_100uM_ABA_P Parameter: Age (day) Value: 15
  misc_feature: MA Experiment 20000453 PARAMETER Experiment Name: At_100uM_ABA_P Parameter: Organism Value: A. thaliana
  misc_feature: MA Experiment 20000453 PARAMETER Experiment Name: At_100uM_ABA_P Parameter: Plant Line Value: WS
  misc_feature: MA Experiment 20000453 PARAMETER Experiment Name: At_100uM_ABA_P Parameter: Timepoint (hr) Value: 24
  misc_feature: MA Experiment 20000453 PARAMETER Experiment Name: At_100uM_ABA_P Parameter: Tissue Value: Aerial
  misc_feature: MA Experiment 20000453 PARAMETER Experiment Name: At_100uM_ABA_P Parameter: Treatment Value: 100uM ABA vs. No Treatment
  misc_feature: MA Experiment ID: 20000495 Result: Up-regulated in Transcription
  misc_feature: MA Experiment 20000495 PARAMETER Experiment Name: At_Guard_Cells_P Parameter: Harvest Date Value: 8/2/2002
  misc_feature: MA Experiment 20000495 PARAMETER Experiment Name: At_Guard_Cells_P Parameter: Organism Value: A. thaliana
  misc_feature: MA Experiment 20000495 PARAMETER Experiment Name: At_Guard_Cells_P Parameter: Tissue Value: Guard Cells vs. Leaves
  misc_feature: MA Experiment ID: 20000496 Result: Up-regulated in Transcription
  misc_feature: MA Experiment 20000496 PARAMETER Experiment Name: At_Guard_Cells_P Parameter: Harvest Date Value: 7/19/2002
  misc_feature: MA Experiment 20000496 PARAMETER Experiment Name: At_Guard_Cells_P Parameter: Organism Value: Canola
  misc_feature: MA Experiment 20000496 PARAMETER Experiment Name: At_Guard_Cells_P Parameter: Tissue Value: Guard Cells vs. Leaves
  misc_feature: MA Experiment ID: 20001247 Result: Down-regulated in Transcription
  misc_feature: MA Experiment 20001247 PARAMETER Experiment Name: At_Far-red-induction_P Parameter: Age (day) Value: 7
  misc_feature: MA Experiment 20001247 PARAMETER Experiment Name: At_Far-red-induction_P Parameter: Light Value: Far-red vs. White
  misc_feature: MA Experiment 20001247 PARAMETER Experiment Name: At_Far-red-induction_P Parameter: Organism Value: A. thaliana
  misc_feature: MA Experiment 20001247 PARAMETER Experiment Name: At_Far-red-induction_P Parameter: Plant Line Value: Columbia
  misc_feature: MA Experiment 20001247 PARAMETER Experiment Name: At_Far-red-induction_P Parameter: Timepoint (hr) Value: 1
  misc_feature: MA Experiment 20001247 PARAMETER Experiment Name: At_Far-red-induction_P Parameter: Tissue Value: Whole Plant
  misc_feature: MA Experiment ID: 20001450 Result: Down-regulated in Transcription
  misc_feature: MA Experiment 20001450 PARAMETER Experiment Name: At_Far-red-induction_P Parameter: Age (day) Value: 7
  misc_feature: MA Experiment 20001450 PARAMETER Experiment Name: At_Far-red-induction_P Parameter: Light Value: Far-red vs. White
  misc_feature: MA Experiment 20001450 PARAMETER Experiment Name: At_Far-red-induction_P Parameter: Organism Value: A. thaliana
  misc_feature: MA Experiment 20001450 PARAMETER Experiment Name: At_Far-red-induction_P Parameter: Plant Line Value: Columbia
  misc_feature: MA Experiment 20001450 PARAMETER Experiment Name: At_Far-red-induction_P Parameter: Timepoint (hr) Value: 8
  misc_feature: MA Experiment 20001450 PARAMETER Experiment Name: At_Far-red-induction_P Parameter: Tissue Value: Whole Plant
  misc_feature: MA Experiment ID: 20001451 Result: Down-regulated in Transcription
  misc_feature: MA Experiment 20001451 PARAMETER Experiment Name: At_Far-red-induction_P Parameter: Age (day) Value: 7
  misc_feature: MA Experiment 20001451 PARAMETER Experiment Name: At_Far-red-induction_P Parameter: Light Value: Far-red vs. White
  misc_feature: MA Experiment 20001451 PARAMETER Experiment Name: At_Far-red-induction_P Parameter: Organism Value: A. thaliana
  misc_feature: MA Experiment 20001451 PARAMETER Experiment Name: At_Far-red-induction_P Parameter: Plant Line Value: Columbia
  misc_feature: MA Experiment 20001451 PARAMETER Experiment Name: At_Far-red-induction_P Parameter: Timepoint (hr) Value: 24
  misc_feature: MA Experiment 20001451 PARAMETER Experiment Name: At_Far-red-induction_P Parameter: Tissue Value: Whole Plant
  misc_feature: MA Experiment ID: 20001457 Result: Up-regulated in Transcription
  misc_feature: MA Experiment 20001457 PARAMETER Experiment Name: At_50mM_NH4NO3_L-to-H_P Parameter: Age (day) Value: Undefined
  misc_feature: MA Experiment 20001457 PARAMETER Experiment Name: At_50mM_NH4NO3_L-to-H_P Parameter: Organism Value: Undefined
  misc_feature: MA Experiment 20001457 PARAMETER Experiment Name: At_50mM_NH4NO3_L-to-H_P Parameter: Plant Line Value: Undefined
  misc_feature: MA Experiment 20001457 PARAMETER Experiment Name: At_50mM_NH4NO3_L-to-H_P Parameter: Timepoint (hr) Value: 0.5
  misc_feature: MA Experiment 20001457 PARAMETER Experiment Name: At_50mM_NH4NO3_L-to-H_P Parameter: Tissue Value: Siliques
  misc_feature: MA Experiment 20001457 PARAMETER Experiment Name: At_50mM_NH4NO3_L-to-H_P Parameter: Treatment Value: 50mM NH4NO3 vs. 100mM Manitol
  misc_feature: MA Experiment ID: 20001560 Result: Up-regulated in Transcription
  misc_feature: MA Experiment 20001560 PARAMETER Experiment Name: At_Drought_Soil_Dry_P Parameter: Age (day) Value: 28
  misc_feature: MA Experiment 20001560 PARAMETER Experiment Name: At_Drought_Soil_Dry_P Parameter: Organism Value: A. thaliana
  misc_feature: MA Experiment 20001560 PARAMETER Experiment Name: At_Drought_Soil_Dry_P Parameter: Plant Line Value: WS
  misc_feature: MA Experiment 20001560 PARAMETER Experiment Name: At_Drought_Soil_Dry_P Parameter: Post Timepoint (hr) Value: None
  misc_feature: MA Experiment 20001560 PARAMETER Experiment Name: At_Drought_Soil_Dry_P Parameter: Post-Treatment Value: None
  misc_feature: MA Experiment 20001560 PARAMETER Experiment Name: At_Drought_Soil_Dry_P Parameter: Timepoint (day) Value: 14
  misc_feature: MA Experiment 20001560 PARAMETER Experiment Name: At_Drought_Soil_Dry_P Parameter: Treatment Value: Drought vs. No Drought
ataaagagaaaatctccaaaagcaatgaccaatgagaaatgtgaagttgctcttccactaaagttgaaatcagaaaaaccatcaatggcttcttcatcatctctctttctcctccctctccttcttcttgtctcccaagcttcagcttcaacggttatattttacaacaagtgcacgtacactgtctggcctgggatccaacctagctccggtcagtcattactcgccggcggcggatttaaactgtcgccgaacagagcttacactctccaacttccaccgctctggtccggtcgcttctggggccgccacggttgctcctttgacagatctggccgtggtcgctgcgccaccggagactgtggtggttctttcctctgtaacggagctggcggtgtacctccggctactcttgccgagatcaccctcggtcatgacatggacttttatgacgtcagcctcgttgatggatataacttggcgatgtcgataatgccggtgaagggtacgggaaagtgtacctacgctggttgcgtaagcgacctgaaccggatgtgcccggttggtctacaagtccgttcacgtgacgggacacaggtagtagcctgtaaaagcgcatgctctgcgtttaactcaccacgctattgctgtaccggcttgttcggtaacccacagtcatgcaagccaacggcttactctaagatcttcaaggtagcttgccctaaggcttactcatacgcctacgatgacccaactagcattgcgacatgttctaaagctaattatgtcgtcactttttgccctcaccgcggccgttgattaaagggattgacatctatgaataattttgcttgactatttagtacgagatcttctttttgagttatcgacccgtttttttgttttggaatttagtgatttcatcgatttgttacaaagaacatgcattatttatgcgtcttttaaaaaattagtgatgtctaattcgtttgct

SEQ ID NO: 30204 - protein, 272 aa, Arabidopsis thaliana
  peptide (1)..(272): Ceres Seq. ID no. 13500012
  misc_feature (56)..(268): Pfam Name: Thaumatin family Pfam Description: Thaumatin family
  misc_feature (29)..(268): Homolog of NCBI NO: 2435406 NR Description: thaumatin-like protein [Arabidopsis thaliana]
  misc_feature (29)..(268): Homolog of NCBI NO: 15222088 NR Description: thaumatin-like protein [Arabidopsis thaliana]
  misc_feature (29)..(268): Homolog of NCBI NO: 6273385 NR Description: SCUTL2 [Vitis vinifera]
  misc_feature (40)..(132): Homolog of NCBI NO: 25296198 NR Description: protein T10O22.21 [imported] - Arabidopsis
  misc_feature (169)..(269): Homolog of NCBI NO: 25296198 NR Description: protein T10O22.21 [imported] - Arabidopsis
  misc_feature (31)..(272): Homolog of NCBI NO: 7442175 NR Description: thaumatin-like protein - turnip
  misc_feature (31)..(269): Homolog of NCBI NO: 2129751 NR Description: thaumatin-like protein - Arabidopsis thaliana
  misc_feature (31)..(269): Homolog of NCBI NO: 15221033 NR Description: thaumatin-like protein [Arabidopsis thaliana]
  misc_feature (29)..(272): Homolog of NCBI NO: 21553814 NR Description: thaumatin-like protein [Arabidopsis thaliana]
  misc_feature (9)..(272): Homolog of NCBI NO: 15219508 NR Description: thaumatin-like protein (pathogenesis-related
IKRKSPKAMTNEKCEVALPLKLKSEKPSMASSSSLFLLPLLLLVSQASASTVIFYNKCTYTVWPGIQPSSGQSLLAGGGFKLSPNRAYTLQLPPLWSGRFWGRHGCSFDRSGRGRCATGDCGGSFLCNGAGGVPPATLAEITLGHDMDFYDVSLVDGYNLAMSIMPVKGTGKCTYAGCVSDLNRMCPVGLQVRSRDGTQVVACKSACSAFNSPRYCCTGLFGNPQSCKPTAYSKIFKVACPKAYSYAYDDPTSIATCSKANYVVTFCPHRGR

SEQ ID NO: 30205 - protein, 264 aa, Arabidopsis thaliana
  peptide (1)..(264): Ceres Seq. ID no. 13500013
  misc_feature (48)..(260): Pfam Name: Thaumatin family Pfam Description: Thaumatin family
  misc_feature (21)..(260): Homolog of NCBI NO: 2435406 NR Description: thaumatin-like protein [Arabidopsis thaliana]
  misc_feature (21)..(260): Homolog of NCBI NO: 15222088 NR Description: thaumatin-like protein [Arabidopsis thaliana]
  misc_feature (21)..(260): Homolog of NCBI NO: 6273385 NR Description: SCUTL2 [Vitis vinifera]
  misc_feature (32)..(124): Homolog of NCBI NO: 25296198 NR Description: protein T10O22.21 [imported] - Arabidopsis
  misc_feature (161)..(261): Homolog of NCBI NO: 25296198 NR Description: protein T10O22.21 [imported] - Arabidopsis
  misc_feature (23)..(264): Homolog of NCBI NO: 7442175 NR Description: thaumatin-like protein - turnip
  misc_feature (23)..(261): Homolog of NCBI NO: 2129751 NR Description: thaumatin-like protein - Arabidopsis thaliana
  misc_feature (23)..(261): Homolog of NCBI NO: 15221033 NR Description: thaumatin-like protein [Arabidopsis thaliana]
  misc_feature (21)..(264): Homolog of NCBI NO: 21553814 NR Description: thaumatin-like protein [Arabidopsis thaliana]
  misc_feature (1)..(264): Homolog of NCBI NO: 15219508 NR Description: thaumatin-like protein (pathogenesis-related
MTNEKCEVALPLKLKSEKPSMASSSSLFLLPLLLLVSQASASTVIFYNKCTYTVWPGIQPSSGQSLLAGGGFKLSPNRAYTLQLPPLWSGRFWGRHGCSFDRSGRGRCATGDCGGSFLCNGAGGVPPATLAEITLGHDMDFYDVSLVDGYNLAMSIMPVKGTGKCTYAGCVSDLNRMCPVGLQVRSRDGTQVVACKSACSAFNSPRYCCTGLFGNPQSCKPTAYSKIFKVACPKAYSYAYDDPTSIATCSKANYVVTFCPHRGR

SEQ ID NO: 30206 - protein, 244 aa, Arabidopsis thaliana
  peptide (1)..(244): Ceres Seq. ID no. 13500014
  misc_feature (28)..(240): Pfam Name: Thaumatin family Pfam Description: Thaumatin family
  misc_feature (1)..(240): Homolog of NCBI NO: 2435406 NR Description: thaumatin-like protein [Arabidopsis thaliana]
  misc_feature (1)..(240): Homolog of NCBI NO: 15222088 NR Description: thaumatin-like protein [Arabidopsis thaliana]
  misc_feature (1)..(240): Homolog of NCBI NO: 6273385 NR Description: SCUTL2 [Vitis vinifera]
  misc_feature (12)..(104): Homolog of NCBI NO: 25296198 NR Description: protein T10O22.21 [imported] - Arabidopsis
  misc_feature (141)..(241): Homolog of NCBI NO: 25296198 NR Description: protein T10O22.21 [imported] - Arabidopsis
  misc_feature (3)..(244): Homolog of NCBI NO: 7442175 NR Description: thaumatin-like protein - turnip
  misc_feature (3)..(241): Homolog of NCBI NO: 2129751 NR Description: thaumatin-like protein - Arabidopsis thaliana
  misc_feature (3)..(241): Homolog of NCBI NO: 15221033 NR Description: thaumatin-like protein [Arabidopsis thaliana]
  misc_feature (1)..(244): Homolog of NCBI NO: 21553814 NR Description: thaumatin-like protein [Arabidopsis thaliana]
  misc_feature (1)..(244): Homolog of NCBI NO: 15219508 NR Description: thaumatin-like protein (pathogenesis-related
MASSSSLFLLPLLLLVSQASASTVIFYNKCTYTVWPGIQPSSGQSLLAGGGFKLSPNRAYTLQLPPLWSGRFWGRHGCSFDRSGRGRCATGDCGGSFLCNGAGGVPPATLAEITLGHDMDFYDVSLVDGYNLAMSIMPVKGTGKCTYAGCVSDLNRMCPVGLQVRSRDGTQVVACKSACSAFNSPRYCCTGLFGNPQSCKPTAYSKIFKVACPKAYSYAYDDPTSIATCSKANYVVTFCPHRGR

SEQ ID NO: 30207 - DNA, 1179 bp, Arabidopsis thaliana
  misc_feature (1)..(1179): Ceres Seq. ID no. 12335675
  misc_feature: MA Experiment ID: 108461 Result: Up-regulated in Transcription
  misc_feature: MA Experiment 108461 PARAMETER Experiment Name: At_Germinating_Seeds_cDNA_P Parameter: Age (day) Value: 1 vs. 0
  misc_feature: MA Experiment 108461 PARAMETER Experiment Name: At_Germinating_Seeds_cDNA_P Parameter: Tissue Value: Germinating Seeds
  misc_feature: MA Experiment ID: 108463 Result: Down-regulated in Transcription
  misc_feature: MA Experiment 108463 PARAMETER Experiment Name: At_Germinating_Seeds_cDNA_P Parameter: Age (day) Value: 3 vs. 0
  misc_feature: MA Experiment 108463 PARAMETER Experiment Name: At_Germinating_Seeds_cDNA_P Parameter: Tissue Value: Germinating Seeds
  misc_feature: MA Experiment ID: 108464 Result: Down-regulated in Transcription
  misc_feature: MA Experiment 108464 PARAMETER Experiment Name: At_Germinating_Seeds_cDNA_P Parameter: Age (day) Value: 4 vs. 0
  misc_feature: MA Experiment 108464 PARAMETER Experiment Name: At_Germinating_Seeds_cDNA_P Parameter: Tissue Value: Germinating Seeds
  misc_feature: MA Experiment ID: 108595 Result: Down-regulated in Transcription
  misc_feature: MA Experiment 108595 PARAMETER Experiment Name: At_Ler-pi_Ovule_cDNA_P Parameter: Plant Line Value: null
  misc_feature: MA Experiment ID: 20000069 Result: Down-regulated in Transcription
  misc_feature: MA Experiment 20000069 PARAMETER Experiment Name: At_100uM_ABA_Mutants_cDNA_P Parameter: Plant Line Value: CS23
  misc_feature: MA Experiment 20000069 PARAMETER Experiment Name: At_100uM_ABA_Mutants_cDNA_P Parameter: Timepoint (hr) Value: 6
  misc_feature: MA Experiment 20000069 PARAMETER Experiment Name: At_100uM_ABA_Mutants_cDNA_P Parameter: Tissue Value: Aerial
  misc_feature: MA Experiment 20000069 PARAMETER Experiment Name: At_100uM_ABA_Mutants_cDNA_P Parameter: Treatment Value: 100uM ABA vs. No Treatment
  misc_feature: MA Experiment ID: 20000070 Result: Down-regulated in Transcription
  misc_feature: MA Experiment 20000070 PARAMETER Experiment Name: At_100uM_ABA_Mutants_cDNA_P Parameter: Plant Line Value: CS24
  misc_feature: MA Experiment 20000070 PARAMETER Experiment Name: At_100uM_ABA_Mutants_cDNA_P Parameter: Timepoint (hr) Value: 6
  misc_feature: MA Experiment 20000070 PARAMETER Experiment Name: At_100uM_ABA_Mutants_cDNA_P Parameter: Tissue Value: Aerial
  misc_feature: MA Experiment 20000070 PARAMETER Experiment Name: At_100uM_ABA_Mutants_cDNA_P Parameter: Treatment Value: 100uM ABA vs. No Treatment
  misc_feature: MA Experiment ID: 20000071 Result: Down-regulated in Transcription
  misc_feature: MA Experiment 20000071 PARAMETER Experiment Name: At_100uM_ABA_Mutants_cDNA_P Parameter: Plant Line Value: CS8104
  misc_feature: MA Experiment 20000071 PARAMETER Experiment Name: At_100uM_ABA_Mutants_cDNA_P Parameter: Timepoint (hr) Value: 6
  misc_feature: MA Experiment 20000071 PARAMETER Experiment Name: At_100uM_ABA_Mutants_cDNA_P Parameter: Tissue Value: Aerial
  misc_feature: MA Experiment 20000071 PARAMETER Experiment Name: At_100uM_ABA_Mutants_cDNA_P Parameter: Treatment Value: 100uM ABA vs. No Treatment
  misc_feature: MA Experiment ID: 20000086 Result: Down-regulated in Transcription
  misc_feature: MA Experiment 20000086 PARAMETER Experiment Name: At_100uM_ABA_Mutants_cDNA_P Parameter: Plant Line Value: CS22
  misc_feature: MA Experiment 20000086 PARAMETER Experiment Name: At_100uM_ABA_Mutants_cDNA_P Parameter: Timepoint (hr) Value: 6
  misc_feature: MA Experiment 20000086 PARAMETER Experiment Name: At_100uM_ABA_Mutants_cDNA_P Parameter: Tissue Value: Aerial
  misc_feature: MA Experiment 20000086 PARAMETER Experiment Name: At_100uM_ABA_Mutants_cDNA_P Parameter: Treatment Value: 100uM ABA vs. No Treatment
  misc_feature: MA Experiment ID: 20000117 Result: Down-regulated in Transcription
  misc_feature: MA Experiment 20000117 PARAMETER Experiment Name: At_100uM_ABA_Mutants_cDNA_P Parameter: Plant Line Value: Columbia
  misc_feature: MA Experiment 20000117 PARAMETER Experiment Name: At_100uM_ABA_Mutants_cDNA_P Parameter: Timepoint (hr) Value: 6
  misc_feature: MA Experiment 20000117 PARAMETER Experiment Name: At_100uM_ABA_Mutants_cDNA_P Parameter: Tissue Value: Aerial
  misc_feature: MA Experiment 20000117 PARAMETER Experiment Name: At_100uM_ABA_Mutants_cDNA_P Parameter: Treatment Value: 100uM ABA vs. No Treatment
  misc_feature: MA Experiment ID: 20000180 Result: Up-regulated in Transcription
  misc_feature: MA Experiment 20000180 PARAMETER Experiment Name: At_Germinating_Seeds_P Parameter: Age (hr) Value: 24 vs. 0
  misc_feature: MA Experiment 20000180 PARAMETER Experiment Name: At_Germinating_Seeds_P Parameter: Tissue Value: Germinating Seeds
  misc_feature: MA Experiment ID: 20000185 Result: Down-regulated in Transcription
  misc_feature: MA Experiment 20000185 PARAMETER Experiment Name: At_Roots__P Parameter: Age (day) Value: 7 vs. 21
  misc_feature: MA Experiment 20000185 PARAMETER Experiment Name: At_Roots__P Parameter: Organism Value: A. thaliana
  misc_feature: MA Experiment 20000185 PARAMETER Experiment Name: At_Roots__P Parameter: Tissue Value: Roots vs. Whole Plant
  misc_feature: MA Experiment ID: 20000437 Result: Down-regulated in Transcription
  misc_feature: MA Experiment 20000437 PARAMETER Experiment Name: At_Drought_P Parameter: Age (day) Value: 8
  misc_feature: MA Experiment 20000437 PARAMETER Experiment Name: At_Drought_P Parameter: Organism Value: A. thaliana
  misc_feature: MA Experiment 20000437 PARAMETER Experiment Name: At_Drought_P Parameter: Plant Line Value: WS
  misc_feature: MA Experiment 20000437 PARAMETER Experiment Name: At_Drought_P Parameter: Timepoint (hr) Value: 24
  misc_feature: MA Experiment 20000437 PARAMETER Experiment Name: At_Drought_P Parameter: Tissue Value: Whole Plant
  misc_feature: MA Experiment 20000437 PARAMETER Experiment Name: At_Drought_P Parameter: Treatment Value: Drought vs. No Drought
  misc_feature: MA Experiment ID: 20000439 Result: Down-regulated in Transcription
  misc_feature: MA Experiment 20000439 PARAMETER Experiment Name: At_Roots__P Parameter: Age (day) Value: 14 vs. 21
  misc_feature: MA Experiment 20000439 PARAMETER Experiment Name: At_Roots__P Parameter: Organism Value: A. thaliana
  misc_feature: MA Experiment 20000439 PARAMETER Experiment Name: At_Roots__P Parameter: Tissue Value: Roots vs. Whole Plant
  misc_feature: MA Experiment ID: 20000794 Result: Down-regulated in Transcription
  misc_feature: MA Experiment 20000794 PARAMETER Experiment Name: At_Petals_P Parameter: Age (day) Value: 23-25 days
  misc_feature: MA Experiment 20000794 PARAMETER Experiment Name: At_Petals_P Parameter: Plant Line Value: WS
  misc_feature: MA Experiment 20000794 PARAMETER Experiment Name: At_Petals_P Parameter: Tissue Value: Petals vs. Whole plant
  misc_feature: MA Experiment ID: 20001560 Result: Up-regulated in Transcription
  misc_feature: MA Experiment 20001560 PARAMETER Experiment Name: At_Drought_Soil_Dry_P Parameter: Age (day) Value: 28
  misc_feature: MA Experiment 20001560 PARAMETER Experiment Name: At_Drought_Soil_Dry_P Parameter: Organism Value: A. thaliana
  misc_feature: MA Experiment 20001560 PARAMETER Experiment Name: At_Drought_Soil_Dry_P Parameter: Plant Line Value: WS
  misc_feature: MA Experiment 20001560 PARAMETER Experiment Name: At_Drought_Soil_Dry_P Parameter: Post Timepoint (hr) Value: None
  misc_feature: MA Experiment 20001560 PARAMETER Experiment Name: At_Drought_Soil_Dry_P Parameter: Post-Treatment Value: None
  misc_feature: MA Experiment 20001560 PARAMETER Experiment Name: At_Drought_Soil_Dry_P Parameter: Timepoint (day) Value: 14
  misc_feature: MA Experiment 20001560 PARAMETER Experiment Name: At_Drought_Soil_Dry_P Parameter: Treatment Value: Drought vs. No Drought
  misc_feature: MA Experiment ID: 20001757 Result: Up-regulated in Transcription
  misc_feature: MA Experiment 20001757 PARAMETER Experiment Name: At_50mM_NH4NO3_L-to-H_P Parameter: Timepoint (hr) Value: 6
  misc_feature: MA Experiment 20001757 PARAMETER Experiment Name: At_50mM_NH4NO3_L-to-H_P Parameter: Tissue Value: Leaf
  misc_feature: MA Experiment 20001757 PARAMETER Experiment Name: At_50mM_NH4NO3_L-to-H_P Parameter: Treatment Value: 50mM NH4NO3 vs 100mM Mannitol
  misc_feature: MA Experiment ID: 20001911 Result: Down-regulated in Transcription
  misc_feature: MA Experiment 20001911 PARAMETER Experiment Name: At_Drought_Reproduction_P Parameter: Age (day) Value: 40
  misc_feature: MA Experiment 20001911 PARAMETER Experiment Name: At_Drought_Reproduction_P Parameter: Organism Value: A. thaliana
  misc_feature: MA Experiment 20001911 PARAMETER Experiment Name: At_Drought_Reproduction_P Parameter: Plant Line Value: WS
  misc_feature: MA Experiment 20001911 PARAMETER Experiment Name: At_Drought_Reproduction_P Parameter: Timepoint (day) Value: 10
  misc_feature: MA Experiment 20001911 PARAMETER Experiment Name: At_Drought_Reproduction_P Parameter: Tissue Value: Flowers
  misc_feature: MA Experiment 20001911 PARAMETER Experiment Name: At_Drought_Reproduction_P Parameter: Treatment Value: Drought vs. No Drought
attatcttttgcttcatcttcttcaaaagccatggctttgtgctctatctgtcctcgcatccctcttcgattcaggccaaaacccatttccccttttctctcaaaacctcaaatttgtctcgcttacagggtttactcttccctgcaatctactactccctctaccagagatgaacttggaactgttagcattgggtttctgggtatgggaatcatgggttctccaatggcacagaacctcatcaaagctgggtgtgatgtgactgtatggaatcgaactaagagcaaatgtgatcctctcgttggattaggagcaaagtacaagtcttctcctgaagaagtgactgcaacttgtgatctcacatttgcaatgcttgctgatcctgaaagtgcaattgatgttgcatgtggaaagaatggagccatatttgggattagttcaggaaaagggtatgttgatgtctcaaccgttgatgtggcctcatcaatactaatcagcaagcaaataaaggataccggagccttgttcttggaggcaccagtttcaggttccaaaaagcctgccgaagatgggcagttaatatttctcactgcaggtgacaagccgctatacgaaaaagctgctcctttcttagacatcatgggaaagtcaaaattctatttgggtgaagttggtaatggagcagcaatgaaacttgtcgtcaacatgatcatgggaagtatgatggcatcattcgcggagggaatacttctaagccagaaagttggactcgatccaaatgtacttgtcgaggttgtctcacagggagctatcaatgcgccaatgtactcactaaagggtccttcaatgatcaagtcagtgtacccgacggcttttccattaaagcatcagcagaaggatatgagactcgcacttggactagcggaatccgtatcgcaatctactccgattgcagccgctgcgaacgagctttacaaggttgcaaaatcttatgggttgagcgatgaagatttctctgcagtaattgaagcactaaaagctgcaaaatcccgagaagcttagctaaagatttgttcaatgtgaaaatgtgtttttttttgctgttgtatgaaaaatttcatctttacaacatgtcaattgataattgttaattttatatgagagcaagttaaaagtgc

SEQ ID NO: 30208 - protein, 353 aa, Arabidopsis thaliana
  peptide (1)..(353): Ceres Seq. ID no. 12335676
  misc_feature (61)..(223): Pfam Name: NAD binding domain of 6-phosphogluconate dehydrogenase Pfam Description: NAD binding domain of 6-phosphogluconate
  misc_feature (64)..(344): Homolog of NCBI NO: 13277568 NR Description: Similar to RIKEN cDNA 3930401K13 gene [Homo
  misc_feature (65)..(346): Homolog of NCBI NO: 23054597 NR Description: hypothetical protein [Geobacter metallireducens]
  misc_feature (65)..(346): Homolog of NCBI NO: 39996474 NR Description: 3-hydroxyisobutyrate dehydrogenase family protein
  misc_feature (62)..(349): Homolog of NCBI NO: 18404556 NR Description: expressed protein
  misc_feature (62)..(348): Homolog of NCBI NO: 29368238 NR Description: gamma hydroxybutyrate dehydrogenase-like protein
  misc_feature (62)..(349): Homolog of NCBI NO: 15375068 NR Description: gamma hydroxybutyrate dehydrogenase [Arabidopsis
  misc_feature (44)..(347): Homolog of NCBI NO: 34914300 NR Description: putative gamma hydroxybutyrate dehydrogenase
  misc_feature (11)..(353): Homolog of NCBI NO: 18394513 NR Description: Expressed protein
  misc_feature (1)..(132): Homolog of NCBI NO: 8778467 NR Description: F1L3.35 [Arabidopsis thaliana]
  misc_feature (132)..(353): Homolog of NCBI NO: 8778467 NR Description: F1L3.35 [Arabidopsis thaliana]
LSFASSSSKAMALCSICPRIPLRFRPKPISPFLSKPQICLAYRVYSSLQSTTPSTRDELGTVSIGFLGMGIMGSPMAQNLIKAGCDVTVWNRTKSKCDPLVGLGAKYKSSPEEVTATCDLTFAMLADPESAIDVACGKNGAIFGISSGKGYVDVSTVDVASSILISKQIKDTGALFLEAPVSGSKKPAEDGQLIFLTAGDKPLYEKAAPFLDIMGKSKFYLGEVGNGAAMKLVVNMIMGSMMASFAEGILLSQKVGLDPNVLVEVVSQGAINAPMYSLKGPSMIKSVYPTAFPLKHQQKDMRLALGLAESVSQSTPIAAAANELYKVAKSYGLSDEDFSAVIEALKAAKSREA

SEQ ID NO: 30209 - protein, 343 aa, Arabidopsis thaliana
  peptide (1)..(343): Ceres Seq. ID no. 12335677
  misc_feature (51)..(213): Pfam Name: NAD binding domain of 6-phosphogluconate dehydrogenase Pfam Description: NAD binding domain of 6-phosphogluconate
  misc_feature (54)..(334): Homolog of NCBI NO: 13277568 NR Description: Similar to RIKEN cDNA 3930401K13 gene [Homo
  misc_feature (55)..(336): Homolog of NCBI NO: 23054597 NR Description: hypothetical protein [Geobacter metallireducens]
  misc_feature (55)..(336): Homolog of NCBI NO: 39996474 NR Description: 3-hydroxyisobutyrate dehydrogenase family protein
  misc_feature (52)..(339): Homolog of NCBI NO: 18404556 NR Description: expressed protein
  misc_feature (52)..(338): Homolog of NCBI NO: 29368238 NR Description: gamma hydroxybutyrate dehydrogenase-like protein
  misc_feature (52)..(339): Homolog of NCBI NO: 15375068 NR Description: gamma hydroxybutyrate dehydrogenase [Arabidopsis
  misc_feature (34)..(337): Homolog of NCBI NO: 34914300 NR Description: putative gamma hydroxybutyrate dehydrogenase
  misc_feature (1)..(343): Homolog of NCBI NO: 18394513 NR Description: Expressed protein
  misc_feature (1)..(122): Homolog of NCBI NO: 8778467 NR Description: F1L3.35 [Arabidopsis thaliana]
  misc_feature (122)..(343): Homolog of NCBI NO: 8778467 NR Description: F1L3.35 [Arabidopsis thaliana]
MALCSICPRIPLRFRPKPISPFLSKPQICLAYRVYSSLQSTTPSTRDELGTVSIGFLGMGIMGSPMAQNLIKAGCDVTVWNRTKSKCDPLVGLGAKYKSSPEEVTATCDLTFAMLADPESAIDVACGKNGAIFGISSGKGYVDVSTVDVASSILISKQIKDTGALFLEAPVSGSKKPAEDGQLIFLTAGDKPLYEKAAPFLDIMGKSKFYLGEVGNGAAMKLVVNMIMGSMMASFAEGILLSQKVGLDPNVLVEVVSQGAINAPMYSLKGPSMIKSVYPTAFPLKHQQKDMRLALGLAESVSQSTPIAAAANELYKVAKSYGLSDEDFSAVIEALKAAKSREA

SEQ ID NO: 30210 - protein, 285 aa, Arabidopsis thaliana
  peptide (1)..(285): Ceres Seq. ID no. 12335678
  misc_feature (1)..(155): Pfam Name: NAD binding domain of 6-phosphogluconate dehydrogenase Pfam Description: NAD binding domain of 6-phosphogluconate
  misc_feature (1)..(276): Homolog of NCBI NO: 13277568 NR Description: Similar to RIKEN cDNA 3930401K13 gene [Homo
  misc_feature (1)..(278): Homolog of NCBI NO: 23054597 NR Description: hypothetical protein [Geobacter metallireducens]
  misc_feature (1)..(278): Homolog of NCBI NO: 39996474 NR Description: 3-hydroxyisobutyrate dehydrogenase family protein
  misc_feature (1)..(281): Homolog of NCBI NO: 18404556 NR Description: expressed protein
  misc_feature (1)..(280): Homolog of NCBI NO: 29368238 NR Description: gamma hydroxybutyrate dehydrogenase-like protein
  misc_feature (1)..(281): Homolog of NCBI NO: 15375068 NR Description: gamma hydroxybutyrate dehydrogenase [Arabidopsis
  misc_feature (1)..(279): Homolog of NCBI NO: 34914300 NR Description: putative gamma hydroxybutyrate dehydrogenase
  misc_feature (1)..(285): Homolog of NCBI NO: 18394513 NR Description: Expressed protein
  misc_feature (1)..(64): Homolog of NCBI NO: 8778467 NR Description: F1L3.35 [Arabidopsis thaliana]
  misc_feature (64)..(285): Homolog of NCBI NO: 8778467 NR Description: F1L3.35 [Arabidopsis thaliana]
MGIMGSPMAQNLIKAGCDVTVWNRTKSKCDPLVGLGAKYKSSPEEVTATCDLTFAMLADPESAIDVACGKNGAIFGISSGKGYVDVSTVDVASSILISKQIKDTGALFLEAPVSGSKKPAEDGQLIFLTAGDKPLYEKAAPFLDIMGKSKFYLGEVGNGAAMKLVVNMIMGSMMASFAEGILLSQKVGLDPNVLVEVVSQGAINAPMYSLKGPSMIKSVYPTAFPLKHQQKDMRLALGLAESVSQSTPIAAAANELYKVAKSYGLSDEDFSAVIEALKAAKSREA

SEQ ID NO: 30211 - DNA, 1132 bp, Arabidopsis thaliana
  misc_feature (1)..(1132): Ceres Seq. ID no. 13490255
  misc_feature: MA Experiment ID: 108434 Result: Down-regulated in Transcription
  misc_feature: MA Experiment 108434 PARAMETER Experiment Name: At_Root_Tips_cDNA_P Parameter: Tissue Value: Root Tips
  misc_feature: MA Experiment ID: 108461 Result: Up-regulated in Transcription
  misc_feature: MA Experiment 108461 PARAMETER Experiment Name: At_Germinating_Seeds_cDNA_P Parameter: Age (day) Value: 1 vs. 0
  misc_feature: MA Experiment 108461 PARAMETER Experiment Name: At_Germinating_Seeds_cDNA_P Parameter: Tissue Value: Germinating Seeds
  misc_feature: MA Experiment ID: 108462 Result: Up-regulated in Transcription
  misc_feature: MA Experiment 108462 PARAMETER Experiment Name: At_Germinating_Seeds_cDNA_P Parameter: Age (day) Value: 2 vs. 0
  misc_feature: MA Experiment 108462 PARAMETER Experiment Name: At_Germinating_Seeds_cDNA_P Parameter: Tissue Value: Germinating Seeds
  misc_feature: MA Experiment ID: 108464 Result: Up-regulated in Transcription
  misc_feature: MA Experiment 108464 PARAMETER Experiment Name: At_Germinating_Seeds_cDNA_P Parameter: Age (day) Value: 4 vs. 0
  misc_feature: MA Experiment 108464 PARAMETER Experiment Name: At_Germinating_Seeds_cDNA_P Parameter: Tissue Value: Germinating Seeds
  misc_feature: MA Experiment ID: 108488 Result: Down-regulated in Transcription
  misc_feature: MA Experiment ID: 108574 Result: Down-regulated in Transcription
  misc_feature: MA Experiment 108574 PARAMETER Experiment Name: At_Wounding__cDNA_P Parameter: Timepoint (hr) Value: 1
  misc_feature: MA Experiment 108574 PARAMETER Experiment Name: At_Wounding__cDNA_P Parameter: Tissue Value: Aerial
  misc_feature: MA Experiment 108574 PARAMETER Experiment Name: At_Wounding__cDNA_P Parameter: Treatment Value: Wounding vs. No Wounding
  misc_feature: MA Experiment ID: 108577 Result: Down-regulated in Transcription
  misc_feature: MA Experiment 108577 PARAMETER Experiment Name: At_42deg_Heat_cDNA_P Parameter: Temperature (deg C) Value: 42 vs. 22
  misc_feature: MA Experiment 108577 PARAMETER Experiment Name: At_42deg_Heat_cDNA_P Parameter: Timepoint (hr) Value: 6
  misc_feature: MA Experiment 108577 PARAMETER Experiment Name: At_42deg_Heat_cDNA_P Parameter: Tissue Value: Aerial
  misc_feature: MA Experiment ID: 108579 Result: Down-regulated in Transcription
  misc_feature: MA Experiment 108579 PARAMETER Experiment Name: At_4deg_Cold_cDNA_P Parameter: Temperature (deg C) Value: 4 vs. 22
  misc_feature: MA Experiment 108579 PARAMETER Experiment Name: At_4deg_Cold_cDNA_P Parameter: Timepoint (hr) Value: 6
  misc_feature: MA Experiment 108579 PARAMETER Experiment Name: At_4deg_Cold_cDNA_P Parameter: Tissue Value: Aerial
  misc_feature: MA Experiment ID: 108608 Result: Down-regulated in Transcription
  misc_feature: MA Experiment 108608 PARAMETER Experiment Name: At_100uM_ABA_cDNA_P Parameter: Timepoint (hr) Value: 1
  misc_feature: MA Experiment 108608 PARAMETER Experiment Name: At_100uM_ABA_cDNA_P Parameter: Tissue Value: Aerial
  misc_feature: MA Experiment 108608 PARAMETER Experiment Name: At_100uM_ABA_cDNA_P Parameter: Treatment Value: 100uM ABA vs. No Treatment
  misc_feature: MA Experiment ID: 108667 Result: Down-regulated in Transcription
  misc_feature: MA Experiment 108667 PARAMETER Experiment Name: At_2mM_SA_cDNA_P Parameter: Plant Line Value: WS
  misc_feature: MA Experiment 108667 PARAMETER Experiment Name: At_2mM_SA_cDNA_P Parameter: Timepoint (hr) Value: 1
  misc_feature: MA Experiment 108667 PARAMETER Experiment Name: At_2mM_SA_cDNA_P Parameter: Treatment Value: 2mM SA vs. No Treatment
  misc_feature: MA Experiment ID: 20000069 Result: Up-regulated in Transcription
  misc_feature: MA Experiment 20000069 PARAMETER Experiment Name: At_100uM_ABA_Mutants_cDNA_P Parameter: Plant Line Value: CS23
  misc_feature: MA Experiment 20000069 PARAMETER Experiment Name: At_100uM_ABA_Mutants_cDNA_P Parameter: Timepoint (hr) Value: 6
  misc_feature: MA Experiment 20000069 PARAMETER Experiment Name: At_100uM_ABA_Mutants_cDNA_P Parameter: Tissue Value: Aerial
  misc_feature: MA Experiment 20000069 PARAMETER Experiment Name: At_100uM_ABA_Mutants_cDNA_P Parameter: Treatment Value: 100uM ABA vs. No Treatment
  misc_feature: MA Experiment ID: 20000070 Result: Up-regulated in Transcription
  misc_feature: MA Experiment 20000070 PARAMETER Experiment Name: At_100uM_ABA_Mutants_cDNA_P Parameter: Plant Line Value: CS24
  misc_feature: MA Experiment 20000070 PARAMETER Experiment Name: At_100uM_ABA_Mutants_cDNA_P Parameter: Timepoint (hr) Value: 6
  misc_feature: MA Experiment 20000070 PARAMETER Experiment Name: At_100uM_ABA_Mutants_cDNA_P Parameter: Tissue Value: Aerial
  misc_feature: MA Experiment 20000070 PARAMETER Experiment Name: At_100uM_ABA_Mutants_cDNA_P Parameter: Treatment Value: 100uM ABA vs. No Treatment
  misc_feature: MA Experiment ID: 20000071 Result: Up-regulated in Transcription
  misc_feature: MA Experiment 20000071 PARAMETER Experiment Name: At_100uM_ABA_Mutants_cDNA_P Parameter: Plant Line Value: CS8104
  misc_feature: MA Experiment 20000071 PARAMETER Experiment Name: At_100uM_ABA_Mutants_cDNA_P Parameter: Timepoint (hr) Value: 6
  misc_feature: MA Experiment 20000071 PARAMETER Experiment Name: At_100uM_ABA_Mutants_cDNA_P Parameter: Tissue Value: Aerial
  misc_feature: MA Experiment 20000071 PARAMETER Experiment Name: At_100uM_ABA_Mutants_cDNA_P Parameter: Treatment Value: 100uM ABA vs. No Treatment
  misc_feature: MA Experiment ID: 20000088 Result: Up-regulated in Transcription
  misc_feature: MA Experiment 20000088 PARAMETER Experiment Name: At_100uM_ABA_Mutants_cDNA_P Parameter: Plant Line Value: Landsberg
  misc_feature: MA Experiment 20000088 PARAMETER Experiment Name: At_100uM_ABA_Mutants_cDNA_P Parameter: Timepoint (hr) Value: 6
  misc_feature: MA Experiment 20000088 PARAMETER Experiment Name: At_100uM_ABA_Mutants_cDNA_P Parameter: Tissue Value: Aerial
  misc_feature: MA Experiment 20000088 PARAMETER Experiment Name: At_100uM_ABA_Mutants_cDNA_P Parameter: Treatment Value: 100uM ABA vs. No Treatment
  misc_feature: MA Experiment ID: 20000089 Result: Up-regulated in Transcription
  misc_feature: MA Experiment ID: 20000117 Result: Up-regulated in Transcription
  misc_feature: MA Experiment 20000117 PARAMETER Experiment Name: At_100uM_ABA_Mutants_cDNA_P Parameter: Plant Line Value: Columbia
  misc_feature: MA Experiment 20000117 PARAMETER Experiment Name: At_100uM_ABA_Mutants_cDNA_P Parameter: Timepoint (hr) Value: 6
  misc_feature: MA Experiment 20000117 PARAMETER Experiment Name: At_100uM_ABA_Mutants_cDNA_P Parameter: Tissue Value: Aerial
  misc_feature: MA Experiment 20000117 PARAMETER Experiment Name: At_100uM_ABA_Mutants_cDNA_P Parameter: Treatment Value: 100uM ABA vs. No Treatment
  misc_feature: MA Experiment ID: 20000213 Result: Down-regulated in Transcription
  misc_feature: MA Experiment 20000213 PARAMETER Experiment Name: At_4deg_Cold_P Parameter: Timepoint (hr) Value: 2
  misc_feature: MA Experiment ID: 20000224 Result: Down-regulated in Transcription
  misc_feature: MA Experiment ID: 20000227 Result: Down-regulated in Transcription
  misc_feature: MA Experiment 20000227 PARAMETER Experiment Name: At_Root-Tips-vs-Tops_P Parameter: Tissue Value: Root Tips vs. Root Tops
  misc_feature: MA Experiment ID: 20000234 Result: Down-regulated in Transcription
  misc_feature: MA Experiment 20000234 PARAMETER Experiment Name: At_Siliques_P Parameter: Age (day) Value: 21
  misc_feature: MA Experiment 20000234 PARAMETER Experiment Name: At_Siliques_P Parameter: Organism Value: A. thaliana
  misc_feature: MA Experiment 20000234 PARAMETER Experiment Name: At_Siliques_P Parameter: Plant Line Value: WS
  misc_feature: MA Experiment 20000234 PARAMETER Experiment Name: At_Siliques_P Parameter: Tissue Value: Less Than 5mm Siliques vs. Whole Plant
  misc_feature: MA Experiment ID: 20000235 Result: Down-regulated in Transcription
  misc_feature: MA Experiment 20000235 PARAMETER Experiment Name: At_Siliques_P Parameter: Age (day) Value: 21
  misc_feature: MA Experiment 20000235 PARAMETER Experiment Name: At_Siliques_P Parameter: Organism Value: A. thaliana
  misc_feature: MA Experiment 20000235 PARAMETER Experiment Name: At_Siliques_P Parameter: Plant Line Value: WS
  misc_feature: MA Experiment 20000235 PARAMETER Experiment Name: At_Siliques_P Parameter: Tissue Value: 5-10mm Siliques vs. Whole Plant
  misc_feature: MA Experiment ID: 20000264 Result: Down-regulated in Transcription
  misc_feature: MA Experiment 20000264 PARAMETER Experiment Name: At_Open_Flower_P Parameter: Age (day) Value: 21
  misc_feature: MA Experiment 20000264 PARAMETER Experiment Name: At_Open_Flower_P Parameter: Plant Line Value: WS
  misc_feature: MA Experiment 20000264 PARAMETER Experiment Name: At_Open_Flower_P Parameter: Tissue Value: Open Flower vs. Whole Plant
  misc_feature: MA Experiment ID: 20000265 Result: Down-regulated in Transcription
  misc_feature: MA Experiment 20000265 PARAMETER Experiment Name: At_Open_Flower_P Parameter: Age (day) Value: 21
  misc_feature: MA Experiment 20000265 PARAMETER Experiment Name: At_Open_Flower_P Parameter: Plant Line Value: WS
  misc_feature: MA Experiment 20000265 PARAMETER Experiment Name: At_Open_Flower_P Parameter: Tissue Value: Closed Flower vs. Whole Plant
  misc_feature: MA Experiment ID: 20000286 Result: Down-regulated in Transcription
  misc_feature: MA Experiment 20000286 PARAMETER Experiment Name: At_Open_Flower_P Parameter: Age (day) Value: 21
  misc_feature: MA Experiment 20000286 PARAMETER Experiment Name: At_Open_Flower_P Parameter: Plant Line Value: WS
  misc_feature: MA Experiment 20000286 PARAMETER Experiment Name: At_Open_Flower_P Parameter: Tissue Value: Half Open vs. Whole Plant
  misc_feature: MA Experiment ID: 20000438 Result: Down-regulated in Transcription
  misc_feature: MA Experiment 20000438 PARAMETER Experiment Name: At_Shoots__P Parameter: Age (day) Value: 14
  misc_feature: MA Experiment 20000438 PARAMETER Experiment Name: At_Shoots__P Parameter: Tissue Value: Shoots vs. Whole Plant
  misc_feature: MA Experiment ID: 20000527 Result: Down-regulated in Transcription
  misc_feature: MA Experiment 20000527 PARAMETER Experiment Name: At_10percent_PEG_P Parameter: Age (day) Value: 20
  misc_feature: MA Experiment 20000527 PARAMETER Experiment Name: At_10percent_PEG_P Parameter: Organism Value: A. thaliana
  misc_feature: MA Experiment 20000527 PARAMETER Experiment Name: At_10percent_PEG_P Parameter: Plant Line Value: WS
  misc_feature: MA Experiment 20000527 PARAMETER Experiment Name: At_10percent_PEG_P Parameter: Timepoint (day) Value: 20
  misc_feature: MA Experiment 20000527 PARAMETER Experiment Name: At_10percent_PEG_P Parameter: Tissue Value: Whole Plant
  misc_feature: MA Experiment 20000527 PARAMETER Experiment Name: At_10percent_PEG_P Parameter: Treatment Value: 10percent PEG vs. No Treatment
  misc_feature: MA Experiment ID: 20001248 Result: Up-regulated in Transcription
  misc_feature: MA Experiment 20001248 PARAMETER Experiment Name: At_Far-red-induction_P Parameter: Age (day) Value: 7
  misc_feature: MA Experiment 20001248 PARAMETER Experiment Name: At_Far-red-induction_P Parameter: Light Value: Far-red vs. White
  misc_feature: MA Experiment 20001248 PARAMETER Experiment Name: At_Far-red-induction_P Parameter: Organism Value: A. thaliana
  misc_feature: MA Experiment 20001248 PARAMETER Experiment Name: At_Far-red-induction_P Parameter: Plant Line Value: Columbia
  misc_feature: MA Experiment 20001248 PARAMETER Experiment Name: At_Far-red-induction_P Parameter: Timepoint (hr) Value: 4
  misc_feature: MA Experiment 20001248 PARAMETER Experiment Name: At_Far-red-induction_P Parameter: Tissue Value: Whole Plant
  misc_feature: MA Experiment ID: 20001560 Result: Down-regulated in Transcription
  misc_feature: MA Experiment 20001560 PARAMETER Experiment Name: At_Drought_Soil_Dry_P Parameter: Age (day) Value: 28
  misc_feature: MA Experiment 20001560 PARAMETER Experiment Name: At_Drought_Soil_Dry_P Parameter: Organism Value: A. thaliana
  misc_feature: MA Experiment 20001560 PARAMETER Experiment Name: At_Drought_Soil_Dry_P Parameter: Plant Line Value: WS
  misc_feature: MA Experiment 20001560 PARAMETER Experiment Name: At_Drought_Soil_Dry_P Parameter: Post Timepoint (hr) Value: None
  misc_feature: MA Experiment 20001560 PARAMETER Experiment Name: At_Drought_Soil_Dry_P Parameter: Post-Treatment Value: None
  misc_feature: MA Experiment 20001560 PARAMETER Experiment Name: At_Drought_Soil_Dry_P Parameter: Timepoint (day) Value: 14
  misc_feature: MA Experiment 20001560 PARAMETER Experiment Name: At_Drought_Soil_Dry_P Parameter: Treatment Value: Drought vs. No Drought
tcccccccccgaagagcccgtcgtttctcccattaccctccaattaatacactattttttttatttttttgtctttccctttttaaaatgatcatcatcttcttcttcactcgcctcaatttttgttcccttcttcttctataattcaactgtgaatttcaccgacgaaacaaaaaagagagagagagagagagaaacgatgagttctcagatttcggagattgaacaagagcagctgatcgagaagcttgagatcttcaagatccatggcagagacaaacgtggccgtaagatccttcgtattatcggaaaattcttcccagctcgatttctgtcactggatgtgttgaagaagtatctagaggagaagatatttcctcgattaggtagaaaaccattcgccgtactctacgtccacaccggcgtacagagaagcgagaacttcccaggtatctcagctctacgagcgatctacgacgcaattccggtaaacgtcagagacaatcttcaggaggtttacttcctccatccaggtcttcaatcacgtctcttcctcgccacctgcggccgatttctattttccggcgggttgtacgggaagctgaggtacataagcagagttgattatctgtgggaacatgtgaggaggaatgagatagagatgccggagtttgtatacgatcacgatgatgatctggagtatcgtccgatgatggattacggtcaagaaagcgatcacgcgagggttttcgccggagccgccgtggattcatcagtctcaagtttctccatgaggtgtatctcatagcgtaaaaggctaaaactccacccactagatatcggatcgtatcttataaaccatataatatacgaatacgattaataatatatcaaaaagattggaaataggtgtgctttttgaaattagtgagcgttttttatggaaaagaaaagaaaagaaagcagttggcgtctggataaagggaaggaggagaatctttagattttttctttaatctgtttttcttttgtcttgattagttttttctttagtggtggtggttgtgagttagtgtgtaaaatgtatattgtcatatgtgaatttaataataagtccttttgtaagatgatc

SEQ ID NO: 30212 - protein, 202 aa, Arabidopsis thaliana
  peptide (1)..(202): Ceres Seq. ID no. 13490256
  misc_feature (1)..(163): Homolog of NCBI NO: 24586353 NR Description: CG18812-PC [Drosophila melanogaster]
  misc_feature (1)..(163): Homolog of NCBI NO: 24586355 NR Description: CG18812-PB [Drosophila melanogaster]
  misc_feature (1)..(163): Homolog of NCBI NO: 24586357 NR Description: CG18812-PA [Drosophila melanogaster]
  misc_feature (14)..(49): Homolog of NCBI NO: 22830926 NR Description: P0466H10.24 [Oryza sativa (japonica
  misc_feature (41)..(196): Homolog of NCBI NO: 22830926 NR Description: P0466H10.24 [Oryza sativa (japonica
  misc_feature (14)..(202): Homolog of NCBI NO: 21593697 NR Description: unknown [Arabidopsis thaliana]
  misc_feature (14)..(202): Homolog of NCBI NO: 18398797 NR Description: expressed protein [Arabidopsis thaliana]
  misc_feature (9)..(202): Homolog of NCBI NO: 38345848 NR Description: OSJNBa0084K11.12 [Oryza sativa (japonica
  misc_feature (1)..(202): Homolog of NCBI NO: 21553817 NR Description: unknown [Arabidopsis thaliana]
  misc_feature (1)..(202): Homolog of NCBI NO: 15237117 NR Description: expressed protein [Arabidopsis thaliana]
MSSQISEIEQEQLIEKLEIFKIHGRDKRGRKILRIIGKFFPARFLSLDVLKKYLEEKIFPRLGRKPFAVLYVHTGVQRSENFPGISALRAIYDAIPVNVRDNLQEVYFLHPGLQSRLFLATCGRFLFSGGLYGKLRYISRVDYLWEHVRRNEIEMPEFVYDHDDDLEYRPMMDYGQESDHARVFAGAAVDSSVSSFSMRCIS

SEQ ID NO: 30213 - DNA, 1440 bp, Arabidopsis thaliana
  misc_feature (1)..(1440): Ceres Seq. ID no. 13488422
  misc_feature: MA Experiment ID: 108461 Result: Up-regulated in Transcription
  misc_feature: MA Experiment 108461 PARAMETER Experiment Name: At_Germinating_Seeds_cDNA_P Parameter: Age (day) Value: 1 vs. 0
  misc_feature: MA Experiment 108461 PARAMETER Experiment Name: At_Germinating_Seeds_cDNA_P Parameter: Tissue Value: Germinating Seeds
  misc_feature: MA Experiment ID: 108462 Result: Up-regulated in Transcription
  misc_feature: MA Experiment 108462 PARAMETER Experiment Name: At_Germinating_Seeds_cDNA_P Parameter: Age (day) Value: 2 vs. 0
  misc_feature: MA Experiment 108462 PARAMETER Experiment Name: At_Germinating_Seeds_cDNA_P Parameter: Tissue Value: Germinating Seeds
  misc_feature: MA Experiment ID: 108463 Result: Up-regulated in Transcription
  misc_feature: MA Experiment 108463 PARAMETER Experiment Name: At_Germinating_Seeds_cDNA_P Parameter: Age (day) Value: 3 vs. 0
  misc_feature: MA Experiment 108463 PARAMETER Experiment Name: At_Germinating_Seeds_cDNA_P Parameter: Tissue Value: Germinating Seeds
  misc_feature: MA Experiment ID: 108464 Result: Up-regulated in Transcription
  misc_feature: MA Experiment 108464 PARAMETER Experiment Name: At_Germinating_Seeds_cDNA_P Parameter: Age (day) Value: 4 vs. 0
  misc_feature: MA Experiment 108464 PARAMETER Experiment Name: At_Germinating_Seeds_cDNA_P Parameter: Tissue Value: Germinating Seeds
  misc_feature: MA Experiment ID: 20000070 Result: Down-regulated in Transcription
  misc_feature: MA Experiment 20000070 PARAMETER Experiment Name: At_100uM_ABA_Mutants_cDNA_P Parameter: Plant Line Value: CS24
  misc_feature: MA Experiment 20000070 PARAMETER Experiment Name: At_100uM_ABA_Mutants_cDNA_P Parameter: Timepoint (hr) Value: 6
  misc_feature: MA Experiment 20000070 PARAMETER Experiment Name: At_100uM_ABA_Mutants_cDNA_P Parameter: Tissue Value: Aerial
  misc_feature: MA Experiment 20000070 PARAMETER Experiment Name: At_100uM_ABA_Mutants_cDNA_P Parameter: Treatment Value: 100uM ABA vs. No Treatment
  misc_feature: MA Experiment ID: 20000087 Result: Down-regulated in Transcription
  misc_feature: MA Experiment 20000087 PARAMETER Experiment Name: At_100uM_ABA_Mutants_cDNA_P Parameter: Plant Line Value: WS
  misc_feature: MA Experiment 20000087 PARAMETER Experiment Name: At_100uM_ABA_Mutants_cDNA_P Parameter: Timepoint (hr) Value: 6
  misc_feature: MA Experiment 20000087 PARAMETER Experiment Name: At_100uM_ABA_Mutants_cDNA_P Parameter: Tissue Value: Aerial
  misc_feature: MA Experiment 20000087 PARAMETER Experiment Name: At_100uM_ABA_Mutants_cDNA_P Parameter: Treatment Value: 100uM ABA vs. No Treatment
  misc_feature: MA Experiment ID: 20000117 Result: Down-regulated in Transcription
  misc_feature: MA Experiment 20000117 PARAMETER Experiment Name: At_100uM_ABA_Mutants_cDNA_P Parameter: Plant Line Value: Columbia
  misc_feature: MA Experiment 20000117 PARAMETER Experiment Name: At_100uM_ABA_Mutants_cDNA_P Parameter: Timepoint (hr) Value: 6
  misc_feature: MA Experiment 20000117 PARAMETER Experiment Name: At_100uM_ABA_Mutants_cDNA_P Parameter: Tissue Value: Aerial
  misc_feature: MA Experiment 20000117 PARAMETER Experiment Name: At_100uM_ABA_Mutants_cDNA_P Parameter: Treatment Value: 100uM ABA vs. No Treatment
  misc_feature: MA Experiment ID: 20000179 Result: Up-regulated in Transcription
  misc_feature: MA Experiment 20000179 PARAMETER Experiment Name: At_Germinating_Seeds_P Parameter: Age (hr) Value: 6 vs. 0
  misc_feature: MA Experiment 20000179 PARAMETER Experiment Name: At_Germinating_Seeds_P Parameter: Tissue Value: Germinating Seeds
  misc_feature: MA Experiment ID: 20000180 Result: Up-regulated in Transcription
  misc_feature: MA Experiment 20000180 PARAMETER Experiment Name: At_Germinating_Seeds_P Parameter: Age (hr) Value: 24 vs. 0
  misc_feature: MA Experiment 20000180 PARAMETER Experiment Name: At_Germinating_Seeds_P Parameter: Tissue Value: Germinating Seeds
  misc_feature: MA Experiment ID: 20000182 Result: Down-regulated in Transcription
  misc_feature: MA Experiment 20000182 PARAMETER Experiment Name: At_2mM_SA_P Parameter: Age (day) Value: 14
  misc_feature: MA Experiment 20000182 PARAMETER Experiment Name: At_2mM_SA_P Parameter: Organism Value: A. thaliana
  misc_feature: MA Experiment 20000182 PARAMETER Experiment Name: At_2mM_SA_P Parameter: Plant Line Value: WS
  misc_feature: MA Experiment 20000182 PARAMETER Experiment Name: At_2mM_SA_P Parameter: Timepoint (hr) Value: 6
  misc_feature: MA Experiment 20000182 PARAMETER Experiment Name: At_2mM_SA_P Parameter: Tissue Value: Aerial
  misc_feature: MA Experiment 20000182 PARAMETER Experiment Name: At_2mM_SA_P Parameter: Treatment Value: 2mM SA vs. No Treatment
  misc_feature: MA Experiment ID: 20000185 Result: Down-regulated in Transcription
  misc_feature: MA Experiment 20000185 PARAMETER Experiment Name: At_Roots__P Parameter: Age (day) Value: 7 vs. 21
  misc_feature: MA Experiment 20000185 PARAMETER Experiment Name: At_Roots__P Parameter: Organism Value: A. thaliana
  misc_feature: MA Experiment 20000185 PARAMETER Experiment Name: At_Roots__P Parameter: Tissue Value: Roots vs. Whole Plant
  misc_feature: MA Experiment ID: 20000234 Result: Up-regulated in Transcription
  misc_feature: MA Experiment 20000234 PARAMETER Experiment Name: At_Siliques_P Parameter: Age (day) Value: 21
  misc_feature: MA Experiment 20000234 PARAMETER Experiment Name: At_Siliques_P Parameter: Organism Value: A. thaliana
  misc_feature: MA Experiment 20000234 PARAMETER Experiment Name: At_Siliques_P Parameter: Plant Line Value: WS
  misc_feature: MA Experiment 20000234 PARAMETER Experiment Name: At_Siliques_P Parameter: Tissue Value: Less Than 5mm Siliques vs. Whole Plant
  misc_feature: MA Experiment ID: 20000235 Result: Up-regulated in Transcription
  misc_feature: MA Experiment 20000235 PARAMETER Experiment Name: At_Siliques_P Parameter: Age (day) Value: 21
  misc_feature: MA Experiment 20000235 PARAMETER Experiment Name: At_Siliques_P Parameter: Organism Value: A. thaliana
  misc_feature: MA Experiment 20000235 PARAMETER Experiment Name: At_Siliques_P Parameter: Plant Line Value: WS
  misc_feature: MA Experiment 20000235 PARAMETER Experiment Name: At_Siliques_P Parameter: Tissue Value: 5-10mm Siliques vs. Whole Plant
  misc_feature: MA Experiment ID: 20000437 Result: Down-regulated in Transcription
  misc_feature: MA Experiment 20000437 PARAMETER Experiment Name: At_Drought_P Parameter: Age (day) Value: 8
  misc_feature: MA Experiment 20000437 PARAMETER Experiment Name: At_Drought_P Parameter: Organism Value: A. thaliana
  misc_feature: MA Experiment 20000437 PARAMETER Experiment Name: At_Drought_P Parameter: Plant Line Value: WS
  misc_feature: MA Experiment 20000437 PARAMETER Experiment Name: At_Drought_P Parameter: Timepoint (hr) Value: 24
  misc_feature: MA Experiment 20000437 PARAMETER Experiment Name: At_Drought_P Parameter: Tissue Value: Whole Plant
  misc_feature: MA Experiment 20000437 PARAMETER Experiment Name: At_Drought_P Parameter: Treatment Value: Drought vs. No Drought
  misc_feature: MA Experiment ID: 20000438 Result: Up-regulated in Transcription
  misc_feature: MA Experiment 20000438 PARAMETER Experiment Name: At_Shoots__P Parameter: Age (day) Value: 14
  misc_feature: MA Experiment 20000438 PARAMETER Experiment Name: At_Shoots__P Parameter: Tissue Value: Shoots vs. Whole Plant
  misc_feature: MA Experiment ID: 20000439 Result: Down-regulated in Transcription
  misc_feature: MA Experiment 20000439 PARAMETER Experiment Name: At_Roots__P Parameter: Age (day) Value: 14 vs. 21
  misc_feature: MA Experiment 20000439 PARAMETER Experiment Name: At_Roots__P Parameter: Organism Value: A. thaliana
  misc_feature: MA Experiment 20000439 PARAMETER Experiment Name: At_Roots__P Parameter: Tissue Value: Roots vs. Whole Plant
  misc_feature: MA Experiment ID: 20000794 Result: Down-regulated in Transcription
  misc_feature: MA Experiment 20000794 PARAMETER Experiment Name: At_Petals_P Parameter: Age (day) Value: 23-25 days
  misc_feature: MA Experiment 20000794 PARAMETER Experiment Name: At_Petals_P Parameter: Plant Line Value: WS
  misc_feature: MA Experiment 20000794 PARAMETER Experiment Name: At_Petals_P Parameter: Tissue Value: Petals vs. Whole plant
  misc_feature: MA Experiment ID: 20001248 Result: Down-regulated in Transcription
  misc_feature: MA Experiment 20001248 PARAMETER Experiment Name: At_Far-red-induction_P Parameter: Age (day) Value: 7
  misc_feature: MA Experiment 20001248 PARAMETER Experiment Name: At_Far-red-induction_P Parameter: Light Value: Far-red vs. White
  misc_feature: MA Experiment 20001248 PARAMETER Experiment Name: At_Far-red-induction_P Parameter: Organism Value: A. thaliana
  misc_feature: MA Experiment 20001248 PARAMETER Experiment Name: At_Far-red-induction_P Parameter: Plant Line Value: Columbia
  misc_feature: MA Experiment 20001248 PARAMETER Experiment Name: At_Far-red-induction_P Parameter: Timepoint (hr) Value: 4
  misc_feature: MA Experiment 20001248 PARAMETER Experiment Name: At_Far-red-induction_P Parameter: Tissue Value: Whole Plant
  misc_feature: MA Experiment ID: 20001450 Result: Down-regulated in Transcription
  misc_feature: MA Experiment 20001450 PARAMETER Experiment Name: At_Far-red-induction_P Parameter: Age (day) Value: 7
  misc_feature: MA Experiment 20001450 PARAMETER Experiment Name: At_Far-red-induction_P Parameter: Light Value: Far-red vs. White
  misc_feature: MA Experiment 20001450 PARAMETER Experiment Name: At_Far-red-induction_P Parameter: Organism Value: A. thaliana
  misc_feature: MA Experiment 20001450 PARAMETER Experiment Name: At_Far-red-induction_P Parameter: Plant Line Value: Columbia
  misc_feature: MA Experiment 20001450 PARAMETER Experiment Name: At_Far-red-induction_P Parameter: Timepoint (hr) Value: 8
  misc_feature: MA Experiment 20001450 PARAMETER Experiment Name: At_Far-red-induction_P Parameter: Tissue Value: Whole Plant
  misc_feature: MA Experiment ID: 20001556 Result: Up-regulated in Transcription
  misc_feature: MA Experiment 20001556 PARAMETER Experiment Name: At_Drought_Soil_Dry_P Parameter: Age (day) Value: 26
  misc_feature: MA Experiment 20001556 PARAMETER Experiment Name: At_Drought_Soil_Dry_P Parameter: Organism Value: A. thaliana
  misc_feature: MA Experiment 20001556 PARAMETER Experiment Name: At_Drought_Soil_Dry_P Parameter: Plant Line Value: WS
  misc_feature: MA Experiment 20001556 PARAMETER Experiment Name: At_Drought_Soil_Dry_P Parameter: Post Timepoint (hr) Value: None
  misc_feature: MA Experiment 20001556 PARAMETER Experiment Name: At_Drought_Soil_Dry_P Parameter: Post-Treatment Value: None
  misc_feature: MA Experiment 20001556 PARAMETER Experiment Name: At_Drought_Soil_Dry_P Parameter: Timepoint (day) Value: 12
  misc_feature: MA Experiment 20001556 PARAMETER Experiment Name: At_Drought_Soil_Dry_P Parameter: Treatment Value: Drought vs. No Drought
  misc_feature: MA Experiment ID: 20001558 Result: Up-regulated in Transcription
  misc_feature: MA Experiment 20001558 PARAMETER Experiment Name: At_Drought_Soil_Dry_P Parameter: Age (day) Value: 27
  misc_feature: MA Experiment 20001558 PARAMETER Experiment Name: At_Drought_Soil_Dry_P Parameter: Organism Value: A. thaliana
  misc_feature: MA Experiment 20001558 PARAMETER Experiment Name: At_Drought_Soil_Dry_P Parameter: Plant Line Value: WS
  misc_feature: MA Experiment 20001558 PARAMETER Experiment Name: At_Drought_Soil_Dry_P Parameter: Post Timepoint (hr) Value: 6
  misc_feature: MA Experiment 20001558 PARAMETER Experiment Name: At_Drought_Soil_Dry_P Parameter: Post-Treatment Value: Re-Water vs. No Drought
  misc_feature: MA Experiment 20001558 PARAMETER Experiment Name: At_Drought_Soil_Dry_P Parameter: Timepoint (day) Value: 13
  misc_feature: MA Experiment 20001558 PARAMETER Experiment Name: At_Drought_Soil_Dry_P Parameter: Treatment Value: Drought vs. No Drought
  misc_feature: MA Experiment ID: 20001560 Result: Up-regulated in Transcription
  misc_feature: MA Experiment 20001560 PARAMETER Experiment Name: At_Drought_Soil_Dry_P Parameter: Age (day) Value: 28
  misc_feature: MA Experiment 20001560 PARAMETER Experiment Name: At_Drought_Soil_Dry_P Parameter: Organism Value: A. thaliana
  misc_feature: MA Experiment 20001560 PARAMETER Experiment Name: At_Drought_Soil_Dry_P Parameter: Plant Line Value: WS
  misc_feature: MA Experiment 20001560 PARAMETER Experiment Name: At_Drought_Soil_Dry_P Parameter: Post Timepoint (hr) Value: None
  misc_feature: MA Experiment 20001560 PARAMETER Experiment Name: At_Drought_Soil_Dry_P Parameter: Post-Treatment Value: None
  misc_feature: MA Experiment 20001560 PARAMETER Experiment Name: At_Drought_Soil_Dry_P Parameter: Timepoint (day) Value: 14
  misc_feature: MA Experiment 20001560 PARAMETER Experiment Name: At_Drought_Soil_Dry_P Parameter: Treatment Value: Drought vs. No Drought
  misc_feature: MA Experiment ID: 20001757 Result: Up-regulated in Transcription
  misc_feature: MA Experiment 20001757 PARAMETER Experiment Name: At_50mM_NH4NO3_L-to-H_P Parameter: Timepoint (hr) Value: 6
  misc_feature: MA Experiment 20001757 PARAMETER Experiment Name: At_50mM_NH4NO3_L-to-H_P Parameter: Tissue Value: Leaf
  misc_feature: MA Experiment 20001757 PARAMETER Experiment Name: At_50mM_NH4NO3_L-to-H_P Parameter: Treatment Value: 50mM NH4NO3 vs 100mM Mannitol
  misc_feature: MA Experiment ID: 20001905 Result: Down-regulated in Transcription
  misc_feature: MA Experiment 20001905 PARAMETER Experiment Name: At_Drought_Reproduction_P Parameter: Age (day) Value: 40
  misc_feature: MA Experiment 20001905 PARAMETER Experiment Name: At_Drought_Reproduction_P Parameter: Organism Value: A. thaliana
  misc_feature: MA Experiment 20001905 PARAMETER Experiment Name: At_Drought_Reproduction_P Parameter: Plant Line Value: WS
  misc_feature: MA Experiment 20001905 PARAMETER Experiment Name: At_Drought_Reproduction_P Parameter: Timepoint (day) Value: 10
  misc_feature: MA Experiment 20001905 PARAMETER Experiment Name: At_Drought_Reproduction_P Parameter: Tissue Value: Rosettes
  misc_feature: MA Experiment 20001905 PARAMETER Experiment Name: At_Drought_Reproduction_P Parameter: Treatment Value: Drought vs. No Drought
  misc_feature: MA Experiment ID: 20001906 Result: Down-regulated in Transcription
  misc_feature: MA Experiment 20001906 PARAMETER Experiment Name: At_Drought_Reproduction_P Parameter: Age (day) Value: 35
  misc_feature: MA Experiment 20001906 PARAMETER Experiment Name: At_Drought_Reproduction_P Parameter: Organism Value: A. thaliana
  misc_feature: MA Experiment 20001906 PARAMETER Experiment Name: At_Drought_Reproduction_P Parameter: Plant Line Value: WS
  misc_feature: MA Experiment 20001906 PARAMETER Experiment Name: At_Drought_Reproduction_P Parameter: Timepoint (day) Value: 5
  misc_feature: MA Experiment 20001906 PARAMETER Experiment Name: At_Drought_Reproduction_P Parameter: Tissue Value: Siliques
  misc_feature: MA Experiment 20001906 PARAMETER Experiment Name: At_Drought_Reproduction_P Parameter: Treatment Value: Drought vs. No Drought
  misc_feature: MA Experiment ID: 20001911 Result: Down-regulated in Transcription
  misc_feature: MA Experiment 20001911 PARAMETER Experiment Name: At_Drought_Reproduction_P Parameter: Age (day) Value: 40
  misc_feature: MA Experiment 20001911 PARAMETER Experiment Name: At_Drought_Reproduction_P Parameter: Organism Value: A. thaliana
  misc_feature: MA Experiment 20001911 PARAMETER Experiment Name: At_Drought_Reproduction_P Parameter: Plant Line Value: WS
  misc_feature: MA Experiment 20001911 PARAMETER Experiment Name: At_Drought_Reproduction_P Parameter: Timepoint (day) Value: 10
  misc_feature: MA Experiment 20001911 PARAMETER Experiment Name: At_Drought_Reproduction_P Parameter: Tissue Value: Flowers
  misc_feature: MA Experiment 20001911 PARAMETER Experiment Name: At_Drought_Reproduction_P Parameter: Treatment Value: Drought vs. No Drought
aaaacgagttgctacaatggcctcacactaggatcttcactttctcgcactttccctctcattttcccgatcatagaaacagcattgtacagagatttcaaagaatgtcactttgctcttccttcaacgtattcgcttcctactcaccaaaacccaaaaccatcttcaaagattccaaattcatttcacaatttcaggtaaagtcgtctcctttagcttcaacattccacacaaatgaatcctcaacgagtcttaagtataagagagcgagactcaaaccaatttcatctctagactcgggaatttcagaaatcgctacatcaccttcattcaggaacaaaagccctaaagatataaacgttttagtggttggttcaactgggtacataggtagatttgtagtgaaagagatgatcaaaagagggttcaatgtgattgctgttgcgagagagaagagtgggattagaggcaaaaacgacaaggaagagactttgaagcaattacaaggcgccaatgtgtgtttctctgatgttactgagttagatgttcttgagaaatctattgagaatctaggatttggtgttgatgttgttgtttcctgtctcgctagtcgtaatggagggattaaagattcgtggaagattgattatgaagctaccaaaaacagtcttgtagctgggaagaagtttggtgctaagcattttgttttgctctctgcgatttgtgtgcagaagcctttactggagtttcagagagcgaaactgaagttcgaagcagagttgatggatttggctgagcaacaagactctagctttacatacagcattgtgagaccaacggcttttttcaagagcttaggtggtcaagttgagattgtgaaagatgggaaaccttacgtgatgtttggagatggtaagctatgcgcttgtaaaccgatcagcgaacaagatttagcagcgtttatagcggattgcgtgttggaagagaacaagatcaatcaagttttgccaattggtggaccaggcaaggcattaacgccattagagcaaggagagattctgtttaagattcttgggagagagcctaagttcttgaaagtacctatcgagattatggattttgtgattggtgttctcgattctattgcaaagatctttccttcggttggagaggctgccgaatttgggaagattggaaggtattacgccgcagagagtatgttgattcttgatccagagactggagggtatagcgaggagaagacaccgagttacgggaaagacacgcttgaggatttctttgcgaaagtgatcagagaaggcatggcgggtcaagaactcggtgaacagttcttctagtatgaattgtttttgtgcgaaatgagtttgctgtgtagtttgtaactgatgagattataaatataaaacctgtgaatttgag

SEQ ID NO: 30214 - protein, 451 aa, Arabidopsis thaliana
  peptide (1)..(451): Ceres Seq. ID no. 13488423
  misc_feature (120)..(345): Pfam Name: Isoflavone reductase Pfam Description: Isoflavone reductase
  misc_feature (120)..(377): Homolog of NCBI NO: 21673823 NR Description: conserved hypothetical protein [Chlorobium
  misc_feature (121)..(372): Homolog of NCBI NO: 23043621 NR Description: hypothetical protein [Trichodesmium erythraeum
  misc_feature (120)..(378): Homolog of NCBI NO: 21673318 NR Description: conserved hypothetical protein [Chlorobium
  misc_feature (195)..(442): Homolog of NCBI NO: 21328662 NR Description: conserved hypothetical protein [uncultured
  misc_feature (115)..(448): Homolog of NCBI NO: 22959007 NR Description: hypothetical protein [Rhodobacter sphaeroides]
  misc_feature (112)..(447): Homolog of NCBI NO: 21673889 NR Description: conserved hypothetical protein [Chlorobium
  misc_feature (104)..(448): Homolog of NCBI NO: 33865497 NR Description: conserved hypothetical protein [Synechococcus sp.
  misc_feature (35)..(451): Homolog of NCBI NO: 21553818 NR Description: unknown [Arabidopsis thaliana]
  misc_feature (35)..(451): Homolog of NCBI NO: 15239530 NR Description: isoflavone reductase-related [Arabidopsis
  misc_feature (35)..(451): Homolog of NCBI NO: 26449404 NR Description: unknown protein [Arabidopsis thaliana]
NELLQWPHTRIFTFSHFPSHFPDHRNSIVQRFQRMSLCSSFNVFASYSPKPKTIFKDSKFISQFQVKSSPLASTFHTNESSTSLKYKRARLKPISSLDSGISEIATSPSFRNKSPKDINVLVVGSTGYIGRFVVKEMIKRGFNVIAVAREKSGIRGKNDKEETLKQLQGANVCFSDVTELDVLEKSIENLGFGVDVVVSCLASRNGGIKDSWKIDYEATKNSLVAGKKFGAKHFVLLSAICVQKPLLEFQRAKLKFEAELMDLAEQQDSSFTYSIVRPTAFFKSLGGQVEIVKDGKPYVMFGDGKLCACKPISEQDLAAFIADCVLEENKINQVLPIGGPGKALTPLEQGEILFKILGREPKFLKVPIEIMDFVIGVLDSIAKIFPSVGEAAEFGKIGRYYAAESMLILDPETGGYSEEKTPSYGKDTLEDFFAKVIREGMAGQELGEQFF

SEQ ID NO: 30215 - protein, 417 aa, Arabidopsis thaliana
  peptide (1)..(417): Ceres Seq. ID no. 13488424
  misc_feature (86)..(311): Pfam Name: Isoflavone reductase Pfam Description: Isoflavone reductase
  misc_feature (86)..(343): Homolog of NCBI NO: 21673823 NR Description: conserved hypothetical protein [Chlorobium
  misc_feature (87)..(338): Homolog of NCBI NO: 23043621 NR Description: hypothetical protein [Trichodesmium erythraeum
  misc_feature (86)..(344): Homolog of NCBI NO: 21673318 NR Description: conserved hypothetical protein [Chlorobium
  misc_feature (161)..(408): Homolog of NCBI NO: 21328662 NR Description: conserved hypothetical protein [uncultured
  misc_feature (81)..(414): Homolog of NCBI NO: 22959007 NR Description: hypothetical protein [Rhodobacter sphaeroides]
  misc_feature (78)..(413): Homolog of NCBI NO: 21673889 NR Description: conserved hypothetical protein [Chlorobium
  misc_feature (70)..(414): Homolog of NCBI NO: 33865497 NR Description: conserved hypothetical protein [Synechococcus sp.
  misc_feature (1)..(417): Homolog of NCBI NO: 21553818 NR Description: unknown [Arabidopsis thaliana]
  misc_feature (1)..(417): Homolog of NCBI NO: 15239530 NR Description: isoflavone reductase-related [Arabidopsis
  misc_feature (1)..(417): Homolog of NCBI NO: 26449404 NR Description: unknown protein [Arabidopsis thaliana]
MSLCSSFNVFASYSPKPKTIFKDSKFISQFQVKSSPLASTFHTNESSTSLKYKRARLKPISSLDSGISEIATSPSFRNKSPKDINVLVVGSTGYIGRFVVKEMIKRGFNVIAVAREKSGIRGKNDKEETLKQLQGANVCFSDVTELDVLEKSIENLGFGVDVVVSCLASRNGGIKDSWKIDYEATKNSLVAGKKFGAKHFVLLSAICVQKPLLEFQRAKLKFEAELMDLAEQQDSSFTYSIVRPTAFFKSLGGQVEIVKDGKPYVMFGDGKLCACKPISEQDLAAFIADCVLEENKINQVLPIGGPGKALTPLEQGEILFKILGREPKFLKVPIEIMDFVIGVLDSIAKIFPSVGEAAEFGKIGRYYAAESMLILDPETGGYSEEKTPSYGKDTLEDFFAKVIREGMAGQELGEQFF

SEQ ID NO: 30216 - protein, 315 aa, Arabidopsis thaliana
  peptide (1)..(315): Ceres Seq. ID no. 13488425
  misc_feature (1)..(209): Pfam Name: Isoflavone reductase Pfam Description: Isoflavone reductase
  misc_feature (1)..(241): Homolog of NCBI NO: 21673823 NR Description: conserved hypothetical protein [Chlorobium
  misc_feature (1)..(236): Homolog of NCBI NO: 23043621 NR Description: hypothetical protein [Trichodesmium erythraeum
  misc_feature (1)..(242): Homolog of NCBI NO: 21673318 NR Description: conserved hypothetical protein [Chlorobium
  misc_feature (59)..(306): Homolog of NCBI NO: 21328662 NR Description: conserved hypothetical protein [uncultured
  misc_feature (1)..(312): Homolog of NCBI NO: 22959007 NR Description: hypothetical protein [Rhodobacter sphaeroides]
  misc_feature (1)..(311): Homolog of NCBI NO: 21673889 NR Description: conserved hypothetical protein [Chlorobium
  misc_feature (1)..(312): Homolog of NCBI NO: 33865497 NR Description: conserved hypothetical protein [Synechococcus sp.
  misc_feature (1)..(315): Homolog of NCBI NO: 21553818 NR Description: unknown [Arabidopsis thaliana]
  misc_feature (1)..(315): Homolog of NCBI NO: 15239530 NR Description: isoflavone reductase-related [Arabidopsis
  misc_feature (1)..(315): Homolog of NCBI NO: 26449404 NR Description: unknown protein [Arabidopsis thaliana]
MIKRGFNVIAVAREKSGIRGKNDKEETLKQLQGANVCFSDVTELDVLEKSIENLGFGVDVVVSCLASRNGGIKDSWKIDYEATKNSLVAGKKFGAKHFVLLSAICVQKPLLEFQRAKLKFEAELMDLAEQQDSSFTYSIVRPTAFFKSLGGQVEIVKDGKPYVMFGDGKLCACKPISEQDLAAFIADCVLEENKINQVLPIGGPGKALTPLEQGEILFKILGREPKFLKVPIEIMDFVIGVLDSIAKIFPSVGEAAEFGKIGRYYAAESMLILDPETGGYSEEKTPSYGKDTLEDFFAKVIREGMAGQELGEQFF

SEQ ID NO: 30217 - DNA, 716 bp, Arabidopsis thaliana
  misc_feature (1)..(716): Ceres Seq. ID no. 13499521
  misc_feature: MA Experiment ID: 108434 Result: Up-regulated in Transcription
  misc_feature: MA Experiment 108434 PARAMETER Experiment Name: At_Root_Tips_cDNA_P Parameter: Tissue Value: Root Tips
  misc_feature: MA Experiment ID: 20000794 Result: Down-regulated in Transcription
  misc_feature: MA Experiment 20000794 PARAMETER Experiment Name: At_Petals_P Parameter: Age (day) Value: 23-25 days
  misc_feature: MA Experiment 20000794 PARAMETER Experiment Name: At_Petals_P Parameter: Plant Line Value: WS
  misc_feature: MA Experiment 20000794 PARAMETER Experiment Name: At_Petals_P Parameter: Tissue Value: Petals vs. Whole plant
ctctgcaagtttgcgcaacaatggcgactacgattccactcttcgcctctttcaaatacgccgatagcttaacggtcgtaggaatctccttctgcaccgcgttggtctgcgaagccatctcatggatcttaatctaccgtaccagctcatacaaatccttgaaatactccattgacaaggccacgaagaaactcgagacaatgaagacagagaatccatcgtcaaagctatccataaagaaatcaaagacgaagaagatcgatcgcgttgaaaccagcttaaaggaatcgagccgagatctgtcactcttcaagttcaaatccggcgccgttgtggcactggttctcttcgtcgtcttcggattgctcaattcactattcgaaggtaaagtcgtcgcgaagcttcctttccatccgatcacgatagtgaagaagatgagtcacaggggactgaaaggtgatgatccgacggattgttccatggcttttctctatctgctgtgttcaattagtatcagaaccaatctacagaaatttctagggttttctccgccgcgaggagctgctggtgctggtggtttgttccccatgcctgatcctaagaccaactgatcactcctttgaggtttttttttttttgtttttgttgagatttttggaacaattttcatataaacacacagttacaagtttttgcaatcatctgatgattttggc

SEQ ID NO: 30218 - protein, 202 aa, Arabidopsis thaliana
  peptide (1)..(202): Ceres Seq. ID no. 13499522
  misc_feature (21)..(188): Homolog of NCBI NO: 17533405 NR Description: Putative protein, with a coiled coil domain, of
  misc_feature (25)..(199): Homolog of NCBI NO: 33328806 NR Description: meg-2-like protein [Rattus norvegicus]
  misc_feature (19)..(197): Homolog of NCBI NO: 24585112 NR Description: CG10470-PA [Drosophila melanogaster]
  misc_feature (20)..(188): Homolog of NCBI NO: 39587169 NR Description: Hypothetical protein CBG00622 [Caenorhabditis
  misc_feature (16)..(199): Homolog of NCBI NO: 23956188 NR Description: RIKEN cDNA 1190006A08 [Mus musculus]
  misc_feature (16)..(199): Homolog of NCBI NO: 3283893 NR Description: unknown [Homo sapiens]
  misc_feature (7)..(202): Homolog of NCBI NO: 21554161 NR Description: unknown [Arabidopsis thaliana]
  misc_feature (7)..(202): Homolog of NCBI NO: 15240119 NR Description: expressed protein [Arabidopsis thaliana]
  misc_feature (7)..(202): Homolog of NCBI NO: 21553820 NR Description: unknown [Arabidopsis thaliana]
  misc_feature (7)..(202): Homolog of NCBI NO: 18399454 NR Description: expressed protein [Arabidopsis thaliana]
LQVCATMATTIPLFASFKYADSLTVVGISFCTALVCEAISWILIYRTSSYKSLKYSIDKATKKLETMKTENPSSKLSIKKSKTKKIDRVETSLKESSRDLSLFKFKSGAVVALVLFVVFGLLNSLFEGKVVAKLPFHPITIVKKMSHRGLKGDDPTDCSMAFLYLLCSISIRTNLQKFLGFSPPRGAAGAGGLFPMPDPKTN

SEQ ID NO: 30219 - protein, 196 aa, Arabidopsis thaliana
  peptide (1)..(196): Ceres Seq. ID no. 13499523
  misc_feature (15)..(182): Homolog of NCBI NO: 17533405 NR Description: Putative protein, with a coiled coil domain, of
  misc_feature (19)..(193): Homolog of NCBI NO: 33328806 NR Description: meg-2-like protein [Rattus norvegicus]
  misc_feature (13)..(191): Homolog of NCBI NO: 24585112 NR Description: CG10470-PA [Drosophila melanogaster]
  misc_feature (14)..(182): Homolog of NCBI NO: 39587169 NR Description: Hypothetical protein CBG00622 [Caenorhabditis
  misc_feature (10)..(193): Homolog of NCBI NO: 23956188 NR Description: RIKEN cDNA 1190006A08 [Mus musculus]
  misc_feature (10)..(193): Homolog of NCBI NO: 3283893 NR Description: unknown [Homo sapiens]
  misc_feature (1)..(196): Homolog of NCBI NO: 21554161 NR Description: unknown [Arabidopsis thaliana]
  misc_feature (1)..(196): Homolog of NCBI NO: 15240119 NR Description: expressed protein [Arabidopsis thaliana]
  misc_feature (1)..(196): Homolog of NCBI NO: 21553820 NR Description: unknown [Arabidopsis thaliana]
  misc_feature (1)..(196): Homolog of NCBI NO: 18399454 NR Description: expressed protein [Arabidopsis thaliana]
MATTIPLFASFKYADSLTVVGISFCTALVCEAISWILIYRTSSYKSLKYSIDKATKKLETMKTENPSSKLSIKKSKTKKIDRVETSLKESSRDLSLFKFKSGAVVALVLFVVFGLLNSLFEGKVVAKLPFHPITIVKKMSHRGLKGDDPTDCSMAFLYLLCSISIRTNLQKFLGFSPPRGAAGAGGLFPMPDPKTN

SEQ ID NO: 30220 - protein, 136 aa, Arabidopsis thaliana
  peptide (1)..(136): Ceres Seq. ID no. 13499524
  misc_feature (1)..(122): Homolog of NCBI NO: 17533405 NR Description: Putative protein, with a coiled coil domain, of
  misc_feature (1)..(133): Homolog of NCBI NO: 33328806 NR Description: meg-2-like protein [Rattus norvegicus]
  misc_feature (1)..(131): Homolog of NCBI NO: 24585112 NR Description: CG10470-PA [Drosophila melanogaster]
  misc_feature (1)..(122): Homolog of NCBI NO: 39587169 NR Description: Hypothetical protein CBG00622 [Caenorhabditis
  misc_feature (1)..(133): Homolog of NCBI NO: 23956188 NR Description: RIKEN cDNA 1190006A08 [Mus musculus]
  misc_feature (1)..(133): Homolog of NCBI NO: 3283893 NR Description: unknown [Homo sapiens]
  misc_feature (1)..(136): Homolog of NCBI NO: 21554161 NR Description: unknown [Arabidopsis thaliana]
  misc_feature (1)..(136): Homolog of NCBI NO: 15240119 NR Description: expressed protein [Arabidopsis thaliana]
  misc_feature (1)..(136): Homolog of NCBI NO: 21553820 NR Description: unknown [Arabidopsis thaliana]
  misc_feature (1)..(136): Homolog of NCBI NO: 18399454 NR Description: expressed protein [Arabidopsis thaliana]
MKTENPSSKLSIKKSKTKKIDRVETSLKESSRDLSLFKFKSGAVVALVLFVVFGLLNSLFEGKVVAKLPFHPITIVKKMSHRGLKGDDPTDCSMAFLYLLCSISIRTNLQKFLGFSPPRGAAGAGGLFPMPDPKTN

SEQ ID NO: 30221 - DNA, 1022 bp, Arabidopsis thaliana
  misc_feature (1)..(1022): Ceres Seq. ID no. 12393636
  misc_feature: MA Experiment ID: 108434 Result: Up-regulated in Transcription
  misc_feature: MA Experiment 108434 PARAMETER Experiment Name: At_Root_Tips_cDNA_P Parameter: Tissue Value: Root Tips
  misc_feature: MA Experiment ID: 108462 Result: Down-regulated in Transcription
  misc_feature: MA Experiment 108462 PARAMETER Experiment Name: At_Germinating_Seeds_cDNA_P Parameter: Age (day) Value: 2 vs. 0
  misc_feature: MA Experiment 108462 PARAMETER Experiment Name: At_Germinating_Seeds_cDNA_P Parameter: Tissue Value: Germinating Seeds
  misc_feature: MA Experiment ID: 108463 Result: Down-regulated in Transcription
  misc_feature: MA Experiment 108463 PARAMETER Experiment Name: At_Germinating_Seeds_cDNA_P Parameter: Age (day) Value: 3 vs. 0
  misc_feature: MA Experiment 108463 PARAMETER Experiment Name: At_Germinating_Seeds_cDNA_P Parameter: Tissue Value: Germinating Seeds
  misc_feature: MA Experiment ID: 108464 Result: Down-regulated in Transcription
  misc_feature: MA Experiment 108464 PARAMETER Experiment Name: At_Germinating_Seeds_cDNA_P Parameter: Age (day) Value: 4 vs. 0
  misc_feature: MA Experiment 108464 PARAMETER Experiment Name: At_Germinating_Seeds_cDNA_P Parameter: Tissue Value: Germinating Seeds
  misc_feature: MA Experiment ID: 108573 Result: Down-regulated in Transcription
  misc_feature: MA Experiment 108573 PARAMETER Experiment Name: At_Drought_cDNA_P Parameter: Timepoint (hr) Value: 6
  misc_feature: MA Experiment 108573 PARAMETER Experiment Name: At_Drought_cDNA_P Parameter: Tissue Value: Aerial
  misc_feature: MA Experiment 108573 PARAMETER Experiment Name: At_Drought_cDNA_P Parameter: Treatment Value: Drought vs. No Drought
  misc_feature: MA Experiment ID: 108595 Result: Down-regulated in Transcription
  misc_feature: MA Experiment 108595 PARAMETER Experiment Name: At_Ler-pi_Ovule_cDNA_P Parameter: Plant Line Value: null
  misc_feature: MA Experiment ID: 20000224 Result: Up-regulated in Transcription
  misc_feature: MA Experiment ID: 20000437 Result: Down-regulated in Transcription
  misc_feature: MA Experiment 20000437 PARAMETER Experiment Name: At_Drought_P Parameter: Age (day) Value: 8
  misc_feature: MA Experiment 20000437 PARAMETER Experiment Name: At_Drought_P Parameter: Organism Value: A. thaliana
  misc_feature: MA Experiment 20000437 PARAMETER Experiment Name: At_Drought_P Parameter: Plant Line Value: WS
  misc_feature: MA Experiment 20000437 PARAMETER Experiment Name: At_Drought_P Parameter: Timepoint (hr) Value: 24
  misc_feature: MA Experiment 20000437 PARAMETER Experiment Name: At_Drought_P Parameter: Tissue Value: Whole Plant
  misc_feature: MA Experiment 20000437 PARAMETER Experiment Name: At_Drought_P Parameter: Treatment Value: Drought vs. No Drought
cctcttcaccaatcggatccacgaaaaattcgataaacctcgattgatcccaaattcccaatggaggtttctgttctcacctaatttagctccatatccctcgcagtccgattcaagtgagattcttctaagttttttggaagaataatggtgttgccgttgatgaaactgggcacactcgccgtcaaaaccataagtaaaccattggctagtcagctcaagcaccaagctaaggttcatcccaagtttcgtcaatctatcatcaacttcgctcagaggaatcatcgaatcactacgcaaatgcaaagaaggatatatggtcatgccactgatgtagagattcgtcccttagatgaggaaaaggctgttcaagctgctgttgacctcattggagagatctttctctttggggtcggtggagctgttgttgtttttgaggtgcagagaagttcgcggtcagaagcaagaaaagaggaagcacgtaagcaagaactagaggagttgagaataaaagatgaagaactagaaaagcaagtggcagatctcaagagcaagctagaggagcttgaacaacttgctaaggcacgaggactgagcggtattttccagttaaaaccacagcctggtactaccgctagtgggaaaccagacaaatccagttgaatcatcatcatcatcatcttattcaatctagaagattcaaaccaaagttaacaatacggtaatgattctttttcacaagagttgaggagtttctgattctctcctctatatacatgtaccatccatcatcaaaaacaatctgcttttaaattatcaaattaggtgacaaataaaaaaagttttgatgttgaggttttgtcttttcaacatttgttgcttagatttggtcttttgagaccaatggctcgattttaggtaatgttggataatgacgaattcattatgaaagagacattgagatgtaccaaattacttctttctccagattacaaaatgtacatcatatttatccatgaaat

SEQ ID NO: 30222 - protein, 171 aa, Arabidopsis thaliana
  peptide (1)..(171): Ceres Seq. ID no. 12393637
  misc_feature (1)..(84): Homolog of NCBI NO: 34909606 NR Description: P0435B05.23 [Oryza sativa (japonica
  misc_feature (2)..(129): Homolog of NCBI NO: 23482917 NR Description: Arabidopsis thaliana At1g28510/F3M18_5
  misc_feature (4)..(164): Homolog of NCBI NO: 13376717 NR Description: OPA3 protein; Optic atrophy 3 (Iraqi-Jewish
  misc_feature (4)..(148): Homolog of NCBI NO: 27676608 NR Description: similar to OPA3 protein
  misc_feature (4)..(148): Homolog of NCBI NO: 26342969 NR Description: unnamed protein product [Mus musculus]
  misc_feature (1)..(159): Homolog of NCBI NO: 24649440 NR Description: CG13601-PA [Drosophila melanogaster]
  misc_feature (6)..(141): Homolog of NCBI NO: 19112998 NR Description: hypothetical coiled-coil protein
  misc_feature (1)..(145): Homolog of NCBI NO: 15230967 NR Description: putative protein; protein id: At3g58150.1
  misc_feature (1)..(164): Homolog of NCBI NO: 34904528 NR Description: B1066G12.9 [Oryza sativa (japonica
  misc_feature (1)..(171): Homolog of NCBI NO: 18396819 NR Description: expressed protein
MVLPLMKLGTLAVKTISKPLASQLKHQAKVHPKFRQSIINFAQRNHRITTQMQRRIYGHATDVEIRPLDEEKAVQAAVDLIGEIFLFGVGGAVVVFEVQRSSRSEARKEEARKQELEELRIKDEELEKQVADLKSKLEELEQLAKARGLSGIFQLKPQPGTTASGKPDKSS

SEQ ID NO: 30223 - protein, 166 aa, Arabidopsis thaliana
  peptide (1)..(166): Ceres Seq. ID no. 12393638
  misc_feature (1)..(79): Homolog of NCBI NO: 34909606 NR Description: P0435B05.23 [Oryza sativa (japonica
  misc_feature (1)..(124): Homolog of NCBI NO: 23482917 NR Description: Arabidopsis thaliana At1g28510/F3M18_5
  misc_feature (1)..(159): Homolog of NCBI NO: 13376717 NR Description: OPA3 protein; Optic atrophy 3 (Iraqi-Jewish
  misc_feature (1)..(143): Homolog of NCBI NO: 27676608 NR Description: similar to OPA3 protein
  misc_feature (1)..(143): Homolog of NCBI NO: 26342969 NR Description: unnamed protein product [Mus musculus]
  misc_feature (1)..(154): Homolog of NCBI NO: 24649440 NR Description: CG13601-PA [Drosophila melanogaster]
  misc_feature (1)..(136): Homolog of NCBI NO: 19112998 NR Description: hypothetical coiled-coil protein
  misc_feature (1)..(140): Homolog of NCBI NO: 15230967 NR Description: putative protein; protein id: At3g58150.1
  misc_feature (1)..(159): Homolog of NCBI NO: 34904528 NR Description: B1066G12.9 [Oryza sativa (japonica
  misc_feature (1)..(166): Homolog of NCBI NO: 18396819 NR Description: expressed protein
MKLGTLAVKTISKPLASQLKHQAKVHPKFRQSIINFAQRNHRITTQMQRRIYGHATDVEIRPLDEEKAVQAAVDLIGEIFLFGVGGAVVVFEVQRSSRSEARKEEARKQELEELRIKDEELEKQVADLKSKLEELEQLAKARGLSGIFQLKPQPGTTASGKPDKSS

SEQ ID NO: 30224 - protein, 120 aa, Arabidopsis thaliana
  peptide (1)..(120): Ceres Seq. ID no. 12393639
  misc_feature (1)..(33): Homolog of NCBI NO: 34909606 NR Description: P0435B05.23 [Oryza sativa (japonica
  misc_feature (1)..(78): Homolog of NCBI NO: 23482917 NR Description: Arabidopsis thaliana At1g28510/F3M18_5
  misc_feature (1)..(113): Homolog of NCBI NO: 13376717 NR Description: OPA3 protein; Optic atrophy 3 (Iraqi-Jewish
  misc_feature (1)..(97): Homolog of NCBI NO: 27676608 NR Description: similar to OPA3 protein
  misc_feature (1)..(97): Homolog of NCBI NO: 26342969 NR Description: unnamed protein product [Mus musculus]
  misc_feature (1)..(108): Homolog of NCBI NO: 24649440 NR Description: CG13601-PA [Drosophila melanogaster]
  misc_feature (1)..(90): Homolog of NCBI NO: 19112998 NR Description: hypothetical coiled-coil protein
  misc_feature (1)..(94): Homolog of NCBI NO: 15230967 NR Description: putative protein; protein id: At3g58150.1
  misc_feature (1)..(113): Homolog of NCBI NO: 34904528 NR Description: B1066G12.9 [Oryza sativa (japonica
  misc_feature (1)..(120): Homolog of NCBI NO: 18396819 NR Description: expressed protein
MQRRIYGHATDVEIRPLDEEKAVQAAVDLIGEIFLFGVGGAVVVFEVQRSSRSEARKEEARKQELEELRIKDEELEKQVADLKSKLEELEQLAKARGLSGIFQLKPQPGTTASGKPDKSS

SEQ ID NO: 30225 - DNA, 1072 bp, Arabidopsis thaliana
  misc_feature (1)..(1072): Ceres Seq. ID no. 12394892
  misc_feature: MA Experiment ID: 108461 Result: Up-regulated in Transcription
  misc_feature: MA Experiment 108461 PARAMETER Experiment Name: At_Germinating_Seeds_cDNA_P Parameter: Age (day) Value: 1 vs. 0
  misc_feature: MA Experiment 108461 PARAMETER Experiment Name: At_Germinating_Seeds_cDNA_P Parameter: Tissue Value: Germinating Seeds
  misc_feature: MA Experiment ID: 108462 Result: Up-regulated in Transcription
  misc_feature: MA Experiment 108462 PARAMETER Experiment Name: At_Germinating_Seeds_cDNA_P Parameter: Age (day) Value: 2 vs. 0
  misc_feature: MA Experiment 108462 PARAMETER Experiment Name: At_Germinating_Seeds_cDNA_P Parameter: Tissue Value: Germinating Seeds
  misc_feature: MA Experiment ID: 108464 Result: Up-regulated in Transcription
  misc_feature: MA Experiment 108464 PARAMETER Experiment Name: At_Germinating_Seeds_cDNA_P Parameter: Age (day) Value: 4 vs. 0
  misc_feature: MA Experiment 108464 PARAMETER Experiment Name: At_Germinating_Seeds_cDNA_P Parameter: Tissue Value: Germinating Seeds
  misc_feature: MA Experiment ID: 20000112 Result: Up-regulated in Transcription
  misc_feature: MA Experiment 20000112 PARAMETER Experiment Name: At_42deg_Heat_cDNA_P Parameter: Temperature (deg C) Value: 42 vs. 22
  misc_feature: MA Experiment 20000112 PARAMETER Experiment Name: At_42deg_Heat_cDNA_P Parameter: Timepoint (hr) Value: 2
  misc_feature: MA Experiment 20000112 PARAMETER Experiment Name: At_42deg_Heat_cDNA_P Parameter: Tissue Value: Aerial
  misc_feature: MA Experiment ID: 20000144 Result: Up-regulated in Transcription
  misc_feature: MA Experiment 20000144 PARAMETER Experiment Name: At_42deg_Heat_cDNA_P Parameter: Temperature (deg C) Value: 42 vs. 22
  misc_feature: MA Experiment 20000144 PARAMETER Experiment Name: At_42deg_Heat_cDNA_P Parameter: Timepoint (hr) Value: 1
  misc_feature: MA Experiment 20000144 PARAMETER Experiment Name: At_42deg_Heat_cDNA_P Parameter: Tissue Value: Aerial
atttcaaaccaaacagatttcaagaacacaaaaacagagttaaaactctcccaaaaaagatgcctttaagcaacaatgtaatcggttgcataaatttcatcaccgtcctcctctccattccggtcatcggcgccggaatctggctagccataggaacagtaaactcatgcgtcaagcttcttcaatggccagtaataatcctcggagtcttaatcctcttagtgggtctcgctggtttcattggagggttttggagaatcacatggcttcttgttgtttacttaatcgccatgcttattctcattgtacttttgggttgccttgtcggatttatttacatggttaccataagaggctctggtcatccagaaccaagtagagcttatcttgagtataatcttcaagatttctctggttggttacgtagaagagttcagagatcttataaatgggaaaggattcgtacttgtttgagtacaactaccatttgccctgaactaaatcagagatacactttggctcaagatttcttcaatgctcatcttgatcccattcaatctggttgctgcaagcccccaacaaaatgtggattcacatttgttaatcctacttattggataagtcccatagatatgtctgctgatatggattgtctaaattggagcaatgaccaaaacactttgtgttacacttgtgattcttgtaaagccggcttgctcgcaaatattaaggtagattggttaaaagcggatatctttctactcttggcgcttatcggattgattatcgtctacattatcgggtgctgcgcattccgtaatgcggaaactgaggatattttcaggaagtacaagcagggttatacttgatcaagatgagaagtttagtggcaaaactgcgaggaattttaatatttactggattcctgtattttagtttctctacgttttggcccctgtagtctgtgtttttatgtgaactaccagaacattcgttgtaactggaagattatgttgtatatctctctccgtgatttgggtttgtgaaacttaacttattatctattattgtt

SEQ ID NO: 30226 - protein, 288 aa, Arabidopsis thaliana
  peptide (1)..(288): Ceres Seq. ID no. 12394893
  misc_feature (22)..(260): Pfam Name: Tetraspanin family Pfam Description: Tetraspanin family
  misc_feature (22)..(260): Pfam Name: Tetraspanin family Pfam Description: Tetraspanin family
  misc_feature (23)..(278): Homolog of NCBI NO: 15234743 NR Description: senescence-associated protein homolog
  misc_feature (24)..(275): Homolog of NCBI NO: 15238641 NR Description: senescence-associated protein - like; protein id:
  misc_feature (20)..(278): Homolog of NCBI NO: 15231187 NR Description: putative protein
  misc_feature (22)..(284): Homolog of NCBI NO: 3551954 NR Description: senescence-associated protein 5 [Hemerocallis
  misc_feature (22)..(287): Homolog of NCBI NO: 29367553 NR Description: senescence-associated protein-like protein
  misc_feature (23)..(278): Homolog of NCBI NO: 15234743 NR Description: senescence-associated protein homolog
  misc_feature (20)..(278): Homolog of NCBI NO: 15231187 NR Description: putative protein
  misc_feature (22)..(287): Homolog of NCBI NO: 29367553 NR Description: senescence-associated protein-like protein
  misc_feature (20)..(288): Homolog of NCBI NO: 15237490 NR Description: senescence-associated protein 5-like protein
  misc_feature (20)..(288): Homolog of NCBI NO: 17979386 NR Description: putative senescence-associated protein 5
  misc_feature (20)..(287): Homolog of NCBI NO: 15224802 NR Description: putative senescence-associated protein 5; protein
  misc_feature (23)..(287): Homolog of NCBI NO: 20197174 NR Description: hypothetical protein [Arabidopsis thaliana]
  misc_feature (23)..(273): Homolog of NCBI NO: 15234374 NR Description: senescence-associated protein -like
  misc_feature (22)..(284): Homolog of NCBI NO: 3551954 NR Description: senescence-associated protein 5 [Hemerocallis
  misc_feature (24)..(275): Homolog of NCBI NO: 15238641 NR Description: senescence-associated protein - like; protein id:
  misc_feature (23)..(273): Homolog of NCBI NO: 15234374 NR Description: senescence-associated protein -like
  misc_feature (23)..(287): Homolog of NCBI NO: 20197174 NR Description: hypothetical protein [Arabidopsis thaliana]
  misc_feature (20)..(287): Homolog of NCBI NO: 15224802 NR Description: putative senescence-associated protein 5; protein
  misc_feature (20)..(288): Homolog of NCBI NO: 17979386 NR Description: putative senescence-associated protein 5
  misc_feature (20)..(288): Homolog of NCBI NO: 15237490 NR Description: senescence-associated protein 5-like protein
FKPNRFQEHKNRVKTLPKKMPLSNNVIGCINFITVLLSIPVIGAGIWLAIGTVNSCVKLLQWPVIILGVLILLVGLAGFIGGFWRITWLLVVYLIAMLILIVLLGCLVGFIYMVTIRGSGHPEPSRAYLEYNLQDFSGWLRRRVQRSYKWERIRTCLSTTTICPELNQRYTLAQDFFNAHLDPIQSGCCKPPTKCGFTFVNPTYWISPIDMSADMDCLNWSNDQNTLCYTCDSCKAGLLANIKVDWLKADIFLLLALIGLIIVYIIGCCAFRNAETEDIFRKYKQGYT

SEQ ID NO: 30227 - protein, 269 aa, Arabidopsis thaliana
  peptide (1)..(269): Ceres Seq. ID no. 12394894
  misc_feature (3)..(241): Pfam Name: Tetraspanin family Pfam Description: Tetraspanin family
  misc_feature (3)..(241): Pfam Name: Tetraspanin family Pfam Description: Tetraspanin family
  misc_feature (4)..(259): Homolog of NCBI NO: 15234743 NR Description: senescence-associated protein homolog
  misc_feature (5)..(256): Homolog of NCBI NO: 15238641 NR Description: senescence-associated protein - like; protein id:
  misc_feature (1)..(259): Homolog of NCBI NO: 15231187 NR Description: putative protein
  misc_feature (3)..(265): Homolog of NCBI NO: 3551954 NR Description: senescence-associated protein 5 [Hemerocallis
  misc_feature (3)..(268): Homolog of NCBI NO: 29367553 NR Description: senescence-associated protein-like protein
  misc_feature (4)..(259): Homolog of NCBI NO: 15234743 NR Description: senescence-associated protein homolog
  misc_feature (1)..(259): Homolog of NCBI NO: 15231187 NR Description: putative protein
  misc_feature (3)..(268): Homolog of NCBI NO: 29367553 NR Description: senescence-associated protein-like protein
  misc_feature (1)..(269): Homolog of NCBI NO: 15237490 NR Description: senescence-associated protein 5-like protein
  misc_feature (1)..(269): Homolog of NCBI NO: 17979386 NR Description: putative senescence-associated protein 5
  misc_feature (1)..(268): Homolog of NCBI NO: 15224802 NR Description: putative senescence-associated protein 5; protein
  misc_feature (4)..(268): Homolog of NCBI NO: 20197174 NR Description: hypothetical protein [Arabidopsis thaliana]
  misc_feature (4)..(254): Homolog of NCBI NO: 15234374 NR Description: senescence-associated protein -like
  misc_feature (3)..(265): Homolog of NCBI NO: 3551954 NR Description: senescence-associated protein 5 [Hemerocallis
  misc_feature (5)..(256): Homolog of NCBI NO: 15238641 NR Description: senescence-associated protein - like; protein id:
  misc_feature (4)..(254): Homolog of NCBI NO: 15234374 NR Description: senescence-associated protein -like
  misc_feature (4)..(268): Homolog of NCBI NO: 20197174 NR Description: hypothetical protein [Arabidopsis thaliana]
  misc_feature (1)..(268): Homolog of NCBI NO: 15224802 NR Description: putative senescence-associated protein 5; protein
  misc_feature (1)..(269): Homolog of NCBI NO: 17979386 NR Description: putative senescence-associated protein 5
  misc_feature (1)..(269): Homolog of NCBI NO: 15237490 NR Description: senescence-associated protein 5-like protein
MPLSNNVIGCINFITVLLSIPVIGAGIWLAIGTVNSCVKLLQWPVIILGVLILLVGLAGFIGGFWRITWLLVVYLIAMLILIVLLGCLVGFIYMVTIRGSGHPEPSRAYLEYNLQDFSGWLRRRVQRSYKWERIRTCLSTTTICPELNQRYTLAQDFFNAHLDPIQSGCCKPPTKCGFTFVNPTYWISPIDMSADMDCLNWSNDQNTLCYTCDSCKAGLLANIKVDWLKADIFLLLALIGLIIVYIIGCCAFRNAETEDIFRKYKQGYT

SEQ ID NO: 30228 - protein, 192 aa, Arabidopsis thaliana
  peptide (1)..(192): Ceres Seq. ID no. 12394895
  misc_feature (1)..(164): Pfam Name: Tetraspanin family Pfam Description: Tetraspanin family
  misc_feature (1)..(164): Pfam Name: Tetraspanin family Pfam Description: Tetraspanin family
  misc_feature (1)..(182): Homolog of NCBI NO: 15234743 NR Description: senescence-associated protein homolog
  misc_feature (1)..(179): Homolog of NCBI NO: 15238641 NR Description: senescence-associated protein - like; protein id:
  misc_feature (1)..(182): Homolog of NCBI NO: 15231187 NR Description: putative protein
  misc_feature (1)..(188): Homolog of NCBI NO: 3551954 NR Description: senescence-associated protein 5 [Hemerocallis
  misc_feature (1)..(191): Homolog of NCBI NO: 29367553 NR Description: senescence-associated protein-like protein
  misc_feature (1)..(182): Homolog of NCBI NO: 15234743 NR Description: senescence-associated protein homolog
  misc_feature (1)..(182): Homolog of NCBI NO: 15231187 NR Description: putative protein
  misc_feature (1)..(191): Homolog of NCBI NO: 29367553 NR Description: senescence-associated protein-like protein
  misc_feature (1)..(192): Homolog of NCBI NO: 15237490 NR Description: senescence-associated protein 5-like protein
  misc_feature (1)..(192): Homolog of NCBI NO: 17979386 NR Description: putative senescence-associated protein 5
  misc_feature (1)..(191): Homolog of NCBI NO: 15224802 NR Description: putative senescence-associated protein 5; protein
  misc_feature (1)..(191): Homolog of NCBI NO: 20197174 NR Description: hypothetical protein [Arabidopsis thaliana]
  misc_feature (1)..(177): Homolog of NCBI NO: 15234374 NR Description: senescence-associated protein -like
  misc_feature (1)..(188): Homolog of NCBI NO: 3551954 NR Description: senescence-associated protein 5 [Hemerocallis
  misc_feature (1)..(179): Homolog of NCBI NO: 15238641 NR Description: senescence-associated protein - like; protein id:
  misc_feature (1)..(177): Homolog of NCBI NO: 15234374 NR Description: senescence-associated protein -like
  misc_feature (1)..(191): Homolog of NCBI NO: 20197174 NR Description: hypothetical protein [Arabidopsis thaliana]
  misc_feature (1)..(191): Homolog of NCBI NO: 15224802 NR Description: putative senescence-associated protein 5; protein
  misc_feature (1)..(192): Homolog of NCBI NO: 17979386 NR Description: putative senescence-associated protein 5
  misc_feature (1)..(192): Homolog of NCBI NO: 15237490 NR Description: senescence-associated protein 5-like protein
MLILIVLLGCLVGFIYMVTIRGSGHPEPSRAYLEYNLQDFSGWLRRRVQRSYKWERIRTCLSTTTICPELNQRYTLAQDFFNAHLDPIQSGCCKPPTKCGFTFVNPTYWISPIDMSADMDCLNWSNDQNTLCYTCDSCKAGLLANIKVDWLKADIFLLLALIGLIIVYIIGCCAFRNAETEDIFRKYKQGYT

SEQ ID NO: 30229 - DNA, 1209 bp, Arabidopsis thaliana
  misc_feature (1)..(1209): Ceres Seq. ID no. 12334293
  misc_feature: MA Experiment ID: 20000179 Result: Up-regulated in Transcription
  misc_feature: MA Experiment 20000179 PARAMETER Experiment Name: At_Germinating_Seeds_P Parameter: Age (hr) Value: 6 vs. 0
  misc_feature: MA Experiment 20000179 PARAMETER Experiment Name: At_Germinating_Seeds_P Parameter: Tissue Value: Germinating Seeds
  misc_feature: MA Experiment ID: 20000185 Result: Up-regulated in Transcription
  misc_feature: MA Experiment 20000185 PARAMETER Experiment Name: At_Roots__P Parameter: Age (day) Value: 7 vs. 21
  misc_feature: MA Experiment 20000185 PARAMETER Experiment Name: At_Roots__P Parameter: Organism Value: A. thaliana
  misc_feature: MA Experiment 20000185 PARAMETER Experiment Name: At_Roots__P Parameter: Tissue Value: Roots vs. Whole Plant
  misc_feature: MA Experiment ID: 20000439 Result: Up-regulated in Transcription
  misc_feature: MA Experiment 20000439 PARAMETER Experiment Name: At_Roots__P Parameter: Age (day) Value: 14 vs. 21
  misc_feature: MA Experiment 20000439 PARAMETER Experiment Name: At_Roots__P Parameter: Organism Value: A. thaliana
  misc_feature: MA Experiment 20000439 PARAMETER Experiment Name: At_Roots__P Parameter: Tissue Value: Roots vs. Whole Plant
  misc_feature: MA Experiment ID: 20001554 Result: Up-regulated in Transcription
  misc_feature: MA Experiment 20001554 PARAMETER Experiment Name: At_Drought_Soil_Dry_P Parameter: Age (day) Value: 21
  misc_feature: MA Experiment 20001554 PARAMETER Experiment Name: At_Drought_Soil_Dry_P Parameter: Organism Value: A. thaliana
  misc_feature: MA Experiment 20001554 PARAMETER Experiment Name: At_Drought_Soil_Dry_P Parameter: Plant Line Value: WS
  misc_feature: MA Experiment 20001554 PARAMETER Experiment Name: At_Drought_Soil_Dry_P Parameter: Post Timepoint (hr) Value: None
  misc_feature: MA Experiment 20001554 PARAMETER Experiment Name: At_Drought_Soil_Dry_P Parameter: Post-Treatment Value: None
  misc_feature: MA Experiment 20001554 PARAMETER Experiment Name: At_Drought_Soil_Dry_P Parameter: Timepoint (day) Value: 7
  misc_feature: MA Experiment 20001554 PARAMETER Experiment Name: At_Drought_Soil_Dry_P Parameter: Treatment Value: Drought vs. No Drought
  misc_feature: MA Experiment ID: 20001555 Result: Up-regulated in Transcription
  misc_feature: MA Experiment 20001555 PARAMETER Experiment Name: At_Drought_Soil_Dry_P Parameter: Age (day) Value: 24
  misc_feature: MA Experiment 20001555 PARAMETER Experiment Name: At_Drought_Soil_Dry_P Parameter: Organism Value: A. thaliana
  misc_feature: MA Experiment 20001555 PARAMETER Experiment Name: At_Drought_Soil_Dry_P Parameter: Plant Line Value: WS
  misc_feature: MA Experiment 20001555 PARAMETER Experiment Name: At_Drought_Soil_Dry_P Parameter: Post Timepoint (hr) Value: None
  misc_feature: MA Experiment 20001555 PARAMETER Experiment Name: At_Drought_Soil_Dry_P Parameter: Post-Treatment Value: None
  misc_feature: MA Experiment 20001555 PARAMETER Experiment Name: At_Drought_Soil_Dry_P Parameter: Timepoint (day) Value: 10
  misc_feature: MA Experiment 20001555 PARAMETER Experiment Name: At_Drought_Soil_Dry_P Parameter: Treatment Value: Drought vs. No Drought
  misc_feature: MA Experiment ID: 20001556 Result: Up-regulated in Transcription
  misc_feature: MA Experiment 20001556 PARAMETER Experiment Name: At_Drought_Soil_Dry_P Parameter: Age (day) Value: 26
  misc_feature: MA Experiment 20001556 PARAMETER Experiment Name: At_Drought_Soil_Dry_P Parameter: Organism Value: A. thaliana
  misc_feature: MA Experiment 20001556 PARAMETER Experiment Name: At_Drought_Soil_Dry_P Parameter: Plant Line Value: WS
  misc_feature: MA Experiment 20001556 PARAMETER Experiment Name: At_Drought_Soil_Dry_P Parameter: Post Timepoint (hr) Value: None
  misc_feature: MA Experiment 20001556 PARAMETER Experiment Name: At_Drought_Soil_Dry_P Parameter: Post-Treatment Value: None
  misc_feature: MA Experiment 20001556 PARAMETER Experiment Name: At_Drought_Soil_Dry_P Parameter: Timepoint (day) Value: 12
  misc_feature: MA Experiment 20001556 PARAMETER Experiment Name: At_Drought_Soil_Dry_P Parameter: Treatment Value: Drought vs. No Drought
acaagcaaaaaaaattcactttttgtttttgttaacactcacgtgaaagcttcgttcttcttcaaaccttttgaacaatttctcccgatgccggtaaatcaccggtttacgtttagctaccggttactcttcctcatcttccttttgagtttcgaaacggcacagcgtttggtcaccggtgacccaaacgacgaagcatgcttgacgaatctccgtcggagtttagaagatcccgcgaataatctccgtaactggacaaaatccttcttcataaatccttgctccggcttctcttcttatcttcatggagtcatttgcaacaatggcagaatttacaaactctccttaacaaatctctctctccgtggctcaatctctccgtttctctctaattgcacaaatctccaatccctagatctatcttccaaccagatctccggcgagatcccgccgcaattacagtttctcgttaacctagccgttcttaatctctcttctaatcgtctctccggtcaaatctcaccacaaatcgctctctgcgcttacttaaacgtcatcgatcttcacgataaccaactctccggtcaaattccgtttcagttcgggcttctcgctagattaacggcgtttgatgtctctaataacaaattatccggtcagattccctcgaatctggcgatgcgtaacggaaacttgccgagatttaacgcgagctcgtttatagggaacaagaaattgttcgggtatccgttggaggagatgaagaacaaaggattgtcgataatggcgattgttgggattggacttggaagtggaatcgcgagcttagtgattagcttcactggagtttgtatatggttgaagattacagagaagaagatggaggaagaagaaggaaagataagtcactccatgcctgtttactaaacacaaacatttcgttttttttcttcttaagtataattaacggtttcttttatcacataattagttttttttttccattttgatcaaaagcatacagcaatagggagggttcaattaagcgaatttagggttaattaatgctttgatcatatatacatgtttctttggttatctttggatacatattaacaaaaatcacaaggtttaagcatgaggtactaagttattgttgtatagtttttgtagttatgaaagtgtaatttatagtgacatcatttatgc

SEQ ID NO: 30230 - protein, 308 aa, Arabidopsis thaliana
  peptide (1)..(308): Ceres Seq. ID no. 12334294
  misc_feature (182)..(205): Pfam Name: Leucine Rich Repeat Pfam Description: Leucine Rich Repeat
  misc_feature (41)..(299): Homolog of NCBI NO: 17064966 NR Description: receptor-like protein kinase [Arabidopsis
  misc_feature (41)..(299): Homolog of NCBI NO: 8777368 NR Description: receptor-like protein kinase [Arabidopsis
  misc_feature (42)..(299): Homolog of NCBI NO: 15222519 NR Description: leucine-rich repeat transmembrane protein kinase,
  misc_feature (42)..(280): Homolog of NCBI NO: 38344230 NR Description: OJ991113_30.7 [Oryza sativa (japonica
  misc_feature (42)..(291): Homolog of NCBI NO: 15223445 NR Description: leucine-rich repeat transmembrane protein kinase,
  misc_feature (41)..(293): Homolog of NCBI NO: 15233004 NR Description: leucine-rich repeat transmembrane protein kinase,
  misc_feature (37)..(308): Homolog of NCBI NO: 15229606 NR Description: leucine rich repeat protein family; protein id:
  misc_feature (52)..(308): Homolog of NCBI NO: 7486525 NR Description: hypothetical protein F6H11.60 - Arabidopsis
  misc_feature (30)..(308): Homolog of NCBI NO: 15239162 NR Description: leucine rich repeat protein family
  misc_feature (30)..(308): Homolog of NCBI NO: 21553823 NR Description: unknown [Arabidopsis thaliana]
TSKKNSLFVFVNTHVKASFFFKPFEQFLPMPVNHRFTFSYRLLFLIFLLSFETAQRLVTGDPNDEACLTNLRRSLEDPANNLRNWTKSFFINPCSGFSSYLHGVICNNGRIYKLSLTNLSLRGSISPFLSNCTNLQSLDLSSNQISGEIPPQLQFLVNLAVLNLSSNRLSGQISPQIALCAYLNVIDLHDNQLSGQIPFQFGLLARLTAFDVSNNKLSGQIPSNLAMRNGNLPRFNASSFIGNKKLFGYPLEEMKNKGLSIMAIVGIGLGSGIASLVISFTGVCIWLKITEKKMEEEEGKISHSMPVY

SEQ ID NO: 30231 - protein, 279 aa, Arabidopsis thaliana
  peptide (1)..(279): Ceres Seq. ID no. 12334295
  misc_feature (153)..(176): Pfam Name: Leucine Rich Repeat Pfam Description: Leucine Rich Repeat
  misc_feature (12)..(270): Homolog of NCBI NO: 17064966 NR Description: receptor-like protein kinase [Arabidopsis
  misc_feature (12)..(270): Homolog of NCBI NO: 8777368 NR Description: receptor-like protein kinase [Arabidopsis
  misc_feature (13)..(270): Homolog of NCBI NO: 15222519 NR Description: leucine-rich repeat transmembrane protein kinase,
  misc_feature (13)..(251): Homolog of NCBI NO: 38344230 NR Description: OJ991113_30.7 [Oryza sativa (japonica
  misc_feature (13)..(262): Homolog of NCBI NO: 15223445 NR Description: leucine-rich repeat transmembrane protein kinase,
  misc_feature (12)..(264): Homolog of NCBI NO: 15233004 NR Description: leucine-rich repeat transmembrane protein kinase,
  misc_feature (8)..(279): Homolog of NCBI NO: 15229606 NR Description: leucine rich repeat protein family; protein id:
  misc_feature (23)..(279): Homolog of NCBI NO: 7486525 NR Description: hypothetical protein F6H11.60 - Arabidopsis
  misc_feature (1)..(279): Homolog of NCBI NO: 15239162 NR Description: leucine rich repeat protein family
  misc_feature (1)..(279): Homolog of NCBI NO: 21553823 NR Description: unknown [Arabidopsis thaliana]
MPVNHRFTFSYRLLFLIFLLSFETAQRLVTGDPNDEACLTNLRRSLEDPANNLRNWTKSFFINPCSGFSSYLHGVICNNGRIYKLSLTNLSLRGSISPFLSNCTNLQSLDLSSNQISGEIPPQLQFLVNLAVLNLSSNRLSGQISPQIALCAYLNVIDLHDNQLSGQIPFQFGLLARLTAFDVSNNKLSGQIPSNLAMRNGNLPRFNASSFIGNKKLFGYPLEEMKNKGLSIMAIVGIGLGSGIASLVISFTGVCIWLKITEKKMEEEEGKISHSMPVY

SEQ ID NO: 30232 - DNA, 1609 bp, Arabidopsis thaliana
  misc_feature (1)..(1609): Ceres Seq. ID no. 13491644
  misc_feature: MA Experiment ID: 108579 Result: Down-regulated in Transcription
  misc_feature: MA Experiment 108579 PARAMETER Experiment Name: At_4deg_Cold_cDNA_P Parameter: Temperature (deg C) Value: 4 vs. 22
  misc_feature: MA Experiment 108579 PARAMETER Experiment Name: At_4deg_Cold_cDNA_P Parameter: Timepoint (hr) Value: 6
  misc_feature: MA Experiment 108579 PARAMETER Experiment Name: At_4deg_Cold_cDNA_P Parameter: Tissue Value: Aerial
  misc_feature: MA Experiment ID: 20000264 Result: Up-regulated in Transcription
  misc_feature: MA Experiment 20000264 PARAMETER Experiment Name: At_Open_Flower_P Parameter: Age (day) Value: 21
  misc_feature: MA Experiment 20000264 PARAMETER Experiment Name: At_Open_Flower_P Parameter: Plant Line Value: WS
  misc_feature: MA Experiment 20000264 PARAMETER Experiment Name: At_Open_Flower_P Parameter: Tissue Value: Open Flower vs. Whole Plant
  misc_feature: MA Experiment ID: 20000265 Result: Up-regulated in Transcription
  misc_feature: MA Experiment 20000265 PARAMETER Experiment Name: At_Open_Flower_P Parameter: Age (day) Value: 21
  misc_feature: MA Experiment 20000265 PARAMETER Experiment Name: At_Open_Flower_P Parameter: Plant Line Value: WS
  misc_feature: MA Experiment 20000265 PARAMETER Experiment Name: At_Open_Flower_P Parameter: Tissue Value: Closed Flower vs. Whole Plant
  misc_feature: MA Experiment ID: 20000286 Result: Up-regulated in Transcription
  misc_feature: MA Experiment 20000286 PARAMETER Experiment Name: At_Open_Flower_P Parameter: Age (day) Value: 21
  misc_feature: MA Experiment 20000286 PARAMETER Experiment Name: At_Open_Flower_P Parameter: Plant Line Value: WS
  misc_feature: MA Experiment 20000286 PARAMETER Experiment Name: At_Open_Flower_P Parameter: Tissue Value: Half Open vs. Whole Plant
  misc_feature: MA Experiment ID: 20000794 Result: Up-regulated in Transcription
  misc_feature: MA Experiment 20000794 PARAMETER Experiment Name: At_Petals_P Parameter: Age (day) Value: 23-25 days
  misc_feature: MA Experiment 20000794 PARAMETER Experiment Name: At_Petals_P Parameter: Plant Line Value: WS
  misc_feature: MA Experiment 20000794 PARAMETER Experiment Name: At_Petals_P Parameter: Tissue Value: Petals vs. Whole plant
  misc_feature: MA Experiment ID: 20001757 Result: Down-regulated in Transcription
  misc_feature: MA Experiment 20001757 PARAMETER Experiment Name: At_50mM_NH4NO3_L-to-H_P Parameter: Timepoint (hr) Value: 6
  misc_feature: MA Experiment 20001757 PARAMETER Experiment Name: At_50mM_NH4NO3_L-to-H_P Parameter: Tissue Value: Leaf
  misc_feature: MA Experiment 20001757 PARAMETER Experiment Name: At_50mM_NH4NO3_L-to-H_P Parameter: Treatment Value: 50mM NH4NO3 vs 100mM Mannitol
aacttttgcttcttcttcgcattcactcaaaccaaagtagaagacggaatccggccaagtcacttccgcaatcctttcgaaatttagattttagggttacttcgtcggagattgttaatttgtagtatctggagattggcaacaatgtctgaactcaaagagcgtttgcttcctccaagacctgcttcggctattaaccttagaggtgatgcaggctctcgtccttctccttcagggagacaaccactccttggagttgatgttttgggtctcaagaagcgtggacaaggccttaagtcgtggattcgtgttgatacttctgccaattctcaggtcattgaggttgataagttcactatgatgcgtagatgtgatttaccagcacgggatttaaggctgctcgatcctttgtttgtgtatccgtcaactattcttggtagagagaaggctattgttgttaacttagagcagatccgttgtattattactgcggatgaggttttgctcttgaattcccttgacaactatgtccttcgctatgttgttgagctgcagcagagactaaaggcaagttctgttactgaggtttggaatcaggacagtctcgaattgagcaggaggaggagtaggagtttagacaatgtgtttcagaactcatcccctgattatttacctttcgagttcagggctcttgaagttgcccttgaagctgcttgtaccttccttgattcccaggcttcagagttagagattgaggcatacccattattggatgagcttacctcaaagatcagtactctaaacttggagcgtgctcgtagactaaagagcagacttgtagcattgacgagacgagttcagaaggttcgggatgagattgaacagctaatggacgatgatggggatatggcagaaatgtatctaacagagaagaagaagagaatggaaggatctttatatggtgatcaatctttacctgtttatcgaacaaatgattgtttttctctgtctgcgccagtttctcctgtttcttctccccctgagtcccgtagacttgagaaaagcttgagcattgtaaggagccggcatgacagtgctaggagctcagaagacgcaaccgagaatatagaggagctagagatgttgctggaagcatactttgttgtcattgatagcactctcaacaagctaacctcgttaaaggagtacatcgatgataccgaagatttcatcaacattcaattggataacgtacggaatcagctgatccaattcgagctgctgctaactactgccacattcgttgtagccatcttcggggttgtagccgggatctttgggatgaattttgagatagacttctttgaaaagcctggtgctttcaaatgggttttagccattactggagtgtgtggccttgttgtatttttggcattcctctggttctacaaacgtagaagactcatgcctctgtgaagacataactaccctgacacgtagacgattgttttactgtttatgttgcttaaatctatacattaatcgcctgtgacctttacaagataaaaccccgtgtatttttttttgggttactgaaagattattaagc

SEQ ID NO: 30233 - protein, 443 aa, Arabidopsis thaliana
  peptide (1)..(443): Ceres Seq. ID no. 13491645
  misc_feature (40)..(410): Homolog of NCBI NO: 34908640 NR Description: P0677H08.20 [Oryza sativa (japonica
  misc_feature (12)..(441): Homolog of NCBI NO: 11282358 NR Description: hypothetical protein F17J16.20 - Arabidopsis
  misc_feature (94)..(443): Homolog of NCBI NO: 25360882 NR Description: MRS2-5 [Arabidopsis thaliana]
  misc_feature (94)..(443): Homolog of NCBI NO: 15227679 NR Description: MRS2-5 protein [Arabidopsis thaliana]
  misc_feature (19)..(441): Homolog of NCBI NO: 18411070 NR Description: expressed protein [Arabidopsis thaliana]
  misc_feature (5)..(140): Homolog of NCBI NO: 38345033 NR Description: OSJNBa0029H02.17 [Oryza sativa (japonica
  misc_feature (174)..(443): Homolog of NCBI NO: 38345033 NR Description: OSJNBa0029H02.17 [Oryza sativa (japonica
  misc_feature (1)..(443): Homolog of NCBI NO: 18394312 NR Description: expressed protein [Arabidopsis thaliana]
  misc_feature (1)..(443): Homolog of NCBI NO: 18412911 NR Description: expressed protein [Arabidopsis thaliana]
  misc_feature (1)..(443): Homolog of NCBI NO: 21553824 NR Description: unknown [Arabidopsis thaliana]
MSELKERLLPPRPASAINLRGDAGSRPSPSGRQPLLGVDVLGLKKRGQGLKSWIRVDTSANSQVIEVDKFTMMRRCDLPARDLRLLDPLFVYPSTILGREKAIVVNLEQIRCIITADEVLLLNSLDNYVLRYVVELQQRLKASSVTEVWNQDSLELSRRRSRSLDNVFQNSSPDYLPFEFRALEVALEAACTFLDSQASELEIEAYPLLDELTSKISTLNLERARRLKSRLVALTRRVQKVRDEIEQLMDDDGDMAEMYLTEKKKRMEGSLYGDQSLPVYRTNDCFSLSAPVSPVSSPPESRRLEKSLSIVRSRHDSARSSEDATENIEELEMLLEAYFVVIDSTLNKLTSLKEYIDDTEDFINIQLDNVRNQLIQFELLLTTATFVVAIFGVVAGIFGMNFEIDFFEKPGAFKWVLAITGVCGLVVFLAFLWFYKRRRLMPL

SEQ ID NO: 30234 - protein, 372 aa, Arabidopsis thaliana
  peptide (1)..(372): Ceres Seq. ID no. 13491646
  misc_feature (1)..(339): Homolog of NCBI NO: 34908640 NR Description: P0677H08.20 [Oryza sativa (japonica
  misc_feature (1)..(370): Homolog of NCBI NO: 11282358 NR Description: hypothetical protein F17J16.20 - Arabidopsis
  misc_feature (23)..(372): Homolog of NCBI NO: 25360882 NR Description: MRS2-5 [Arabidopsis thaliana]
  misc_feature (23)..(372): Homolog of NCBI NO: 15227679 NR Description: MRS2-5 protein [Arabidopsis thaliana]
  misc_feature (1)..(370): Homolog of NCBI NO: 18411070 NR Description: expressed protein [Arabidopsis thaliana]
  misc_feature (1)..(69): Homolog of NCBI NO: 38345033 NR Description: OSJNBa0029H02.17 [Oryza sativa (japonica
  misc_feature (103)..(372): Homolog of NCBI NO: 38345033 NR Description: OSJNBa0029H02.17 [Oryza sativa (japonica
  misc_feature (1)..(372): Homolog of NCBI NO: 18394312 NR Description: expressed protein [Arabidopsis thaliana]
  misc_feature (1)..(372): Homolog of NCBI NO: 18412911 NR Description: expressed protein [Arabidopsis thaliana]
  misc_feature (1)..(372): Homolog of NCBI NO: 21553824 NR Description: unknown [Arabidopsis thaliana]
MMRRCDLPARDLRLLDPLFVYPSTILGREKAIVVNLEQIRCIITADEVLLLNSLDNYVLRYVVELQQRLKASSVTEVWNQDSLELSRRRSRSLDNVFQNSSPDYLPFEFRALEVALEAACTFLDSQASELEIEAYPLLDELTSKISTLNLERARRLKSRLVALTRRVQKVRDEIEQLMDDDGDMAEMYLTEKKKRMEGSLYGDQSLPVYRTNDCFSLSAPVSPVSSPPESRRLEKSLSIVRSRHDSARSSEDATENIEELEMLLEAYFVVIDSTLNKLTSLKEYIDDTEDFINIQLDNVRNQLIQFELLLTTATFVVAIFGVVAGIFGMNFEIDFFEKPGAFKWVLAITGVCGLVVFLAFLWFYKRRRLMPL

SEQ ID NO: 30235 - protein, 371 aa, Arabidopsis thaliana
  peptide (1)..(371): Ceres Seq. ID no. 13491647
  misc_feature (1)..(338): Homolog of NCBI NO: 34908640 NR Description: P0677H08.20 [Oryza sativa (japonica
  misc_feature (1)..(369): Homolog of NCBI NO: 11282358 NR Description: hypothetical protein F17J16.20 - Arabidopsis
  misc_feature (22)..(371): Homolog of NCBI NO: 25360882 NR Description: MRS2-5 [Arabidopsis thaliana]
  misc_feature (22)..(371): Homolog of NCBI NO: 15227679 NR Description: MRS2-5 protein [Arabidopsis thaliana]
  misc_feature (1)..(369): Homolog of NCBI NO: 18411070 NR Description: expressed protein [Arabidopsis thaliana]
  misc_feature (1)..(68): Homolog of NCBI NO: 38345033 NR Description: OSJNBa0029H02.17 [Oryza sativa (japonica
  misc_feature (102)..(371): Homolog of NCBI NO: 38345033 NR Description: OSJNBa0029H02.17 [Oryza sativa (japonica
  misc_feature (1)..(371): Homolog of NCBI NO: 18394312 NR Description: expressed protein [Arabidopsis thaliana]
  misc_feature (1)..(371): Homolog of NCBI NO: 18412911 NR Description: expressed protein [Arabidopsis thaliana]
  misc_feature (1)..(371): Homolog of NCBI NO: 21553824 NR Description: unknown [Arabidopsis thaliana]
MRRCDLPARDLRLLDPLFVYPSTILGREKAIVVNLEQIRCIITADEVLLLNSLDNYVLRYVVELQQRLKASSVTEVWNQDSLELSRRRSRSLDNVFQNSSPDYLPFEFRALEVALEAACTFLDSQASELEIEAYPLLDELTSKISTLNLERARRLKSRLVALTRRVQKVRDEIEQLMDDDGDMAEMYLTEKKKRMEGSLYGDQSLPVYRTNDCFSLSAPVSPVSSPPESRRLEKSLSIVRSRHDSARSSEDATENIEELEMLLEAYFVVIDSTLNKLTSLKEYIDDTEDFINIQLDNVRNQLIQFELLLTTATFVVAIFGVVAGIFGMNFEIDFFEKPGAFKWVLAITGVCGLVVFLAFLWFYKRRRLMPL

SEQ ID NO: 30236 - DNA, 677 bp, Arabidopsis thaliana; identical to SEQ ID NO: 23436
  misc_feature (1)..(677): Ceres Seq. ID no. 12561632
  misc_feature: MA Experiment ID: 20000166 Result: Down-regulated in Transcription
  misc_feature: MA Experiment 20000166 PARAMETER Experiment Name: At_100uM_ABA_P Parameter: Age (day) Value: 14
  misc_feature: MA Experiment 20000166 PARAMETER Experiment Name: At_100uM_ABA_P Parameter: Organism Value: A. thaliana
  misc_feature: MA Experiment 20000166 PARAMETER Experiment Name: At_100uM_ABA_P Parameter: Plant Line Value: WS
  misc_feature: MA Experiment 20000166 PARAMETER Experiment Name: At_100uM_ABA_P Parameter: Timepoint (hr) Value: 1
  misc_feature: MA Experiment 20000166 PARAMETER Experiment Name: At_100uM_ABA_P Parameter: Tissue Value: Aerial
  misc_feature: MA Experiment 20000166 PARAMETER Experiment Name: At_100uM_ABA_P Parameter: Treatment Value: 100uM ABA vs. No Treatment
  misc_feature: MA Experiment ID: 20000179 Result: Up-regulated in Transcription
  misc_feature: MA Experiment 20000179 PARAMETER Experiment Name: At_Germinating_Seeds_P Parameter: Age (hr) Value: 6 vs. 0
  misc_feature: MA Experiment 20000179 PARAMETER Experiment Name: At_Germinating_Seeds_P Parameter: Tissue Value: Germinating Seeds
  misc_feature: MA Experiment ID: 20000180 Result: Up-regulated in Transcription
  misc_feature: MA Experiment 20000180 PARAMETER Experiment Name: At_Germinating_Seeds_P Parameter: Age (hr) Value: 24 vs. 0
  misc_feature: MA Experiment 20000180 PARAMETER Experiment Name: At_Germinating_Seeds_P Parameter: Tissue Value: Germinating Seeds
  misc_feature: MA Experiment ID: 20000182 Result: Down-regulated in Transcription
  misc_feature: MA Experiment 20000182 PARAMETER Experiment Name: At_2mM_SA_P Parameter: Age (day) Value: 14
  misc_feature: MA Experiment 20000182 PARAMETER Experiment Name: At_2mM_SA_P Parameter: Organism Value: A. thaliana
  misc_feature: MA Experiment 20000182 PARAMETER Experiment Name: At_2mM_SA_P Parameter: Plant Line Value: WS
  misc_feature: MA Experiment 20000182 PARAMETER Experiment Name: At_2mM_SA_P Parameter: Timepoint (hr) Value: 6
  misc_feature: MA Experiment 20000182 PARAMETER Experiment Name: At_2mM_SA_P Parameter: Tissue Value: Aerial
  misc_feature: MA Experiment 20000182 PARAMETER Experiment Name: At_2mM_SA_P Parameter: Treatment Value: 2mM SA vs. No Treatment
  misc_feature: MA Experiment ID: 20000185 Result: Down-regulated in Transcription
  misc_feature: MA Experiment 20000185 PARAMETER Experiment Name: At_Roots__P Parameter: Age (day) Value: 7 vs. 21
  misc_feature: MA Experiment 20000185 PARAMETER Experiment Name: At_Roots__P Parameter: Organism Value: A. thaliana
  misc_feature: MA Experiment 20000185 PARAMETER Experiment Name: At_Roots__P Parameter: Tissue Value: Roots vs. Whole Plant
  misc_feature: MA Experiment ID: 20000227 Result: Up-regulated in Transcription
  misc_feature: MA Experiment 20000227 PARAMETER Experiment Name: At_Root-Tips-vs-Tops_P Parameter: Tissue Value: Root Tips vs. Root Tops
  misc_feature: MA Experiment ID: 20000234 Result: Down-regulated in Transcription
  misc_feature: MA Experiment 20000234 PARAMETER Experiment Name: At_Siliques_P Parameter: Age (day) Value: 21
  misc_feature: MA Experiment 20000234 PARAMETER Experiment Name: At_Siliques_P Parameter: Organism Value: A. thaliana
  misc_feature: MA Experiment 20000234 PARAMETER Experiment Name: At_Siliques_P Parameter: Plant Line Value: WS
  misc_feature: MA Experiment 20000234 PARAMETER Experiment Name: At_Siliques_P Parameter: Tissue Value: Less Than 5mm Siliques vs. Whole Plant
  misc_feature: MA Experiment ID: 20000264 Result: Down-regulated in Transcription
  misc_feature: MA Experiment 20000264 PARAMETER Experiment Name: At_Open_Flower_P Parameter: Age (day) Value: 21
  misc_feature: MA Experiment 20000264 PARAMETER Experiment Name: At_Open_Flower_P Parameter: Plant Line Value: WS
  misc_feature: MA Experiment 20000264 PARAMETER Experiment Name: At_Open_Flower_P Parameter: Tissue Value: Open Flower vs. Whole Plant
  misc_feature: MA Experiment ID: 20000265 Result: Down-regulated in Transcription
  misc_feature: MA Experiment 20000265 PARAMETER Experiment Name: At_Open_Flower_P Parameter: Age (day) Value: 21
  misc_feature: MA Experiment 20000265 PARAMETER Experiment Name: At_Open_Flower_P Parameter: Plant Line Value: WS
  misc_feature: MA Experiment 20000265 PARAMETER Experiment Name: At_Open_Flower_P Parameter: Tissue Value: Closed Flower vs. Whole Plant
  misc_feature: MA Experiment ID: 20000267 Result: Down-regulated in Transcription
  misc_feature: MA Experiment 20000267 PARAMETER Experiment Name: At_Drought_P Parameter: Age (day) Value: 7
  misc_feature: MA Experiment 20000267 PARAMETER Experiment Name: At_Drought_P Parameter: Organism Value: A. thaliana
  misc_feature: MA Experiment 20000267 PARAMETER Experiment Name: At_Drought_P Parameter: Plant Line Value: WS
  misc_feature: MA Experiment 20000267 PARAMETER Experiment Name: At_Drought_P Parameter: Timepoint (hr) Value: 6
  misc_feature: MA Experiment 20000267 PARAMETER Experiment Name: At_Drought_P Parameter: Tissue Value: Whole Plant
  misc_feature: MA Experiment 20000267 PARAMETER Experiment Name: At_Drought_P Parameter: Treatment Value: Drought vs. No Drought
  misc_feature: MA Experiment ID: 20000268 Result: Down-regulated in Transcription
  misc_feature: MA Experiment 20000268 PARAMETER Experiment Name: At_100mM_NaCl__P Parameter: Age (day) Value: 14
  misc_feature: MA Experiment 20000268 PARAMETER Experiment Name: At_100mM_NaCl__P Parameter: Organism Value: A. thaliana
  misc_feature: MA Experiment 20000268 PARAMETER Experiment Name: At_100mM_NaCl__P Parameter: Plant Line Value: WS
  misc_feature: MA Experiment 20000268 PARAMETER Experiment Name: At_100mM_NaCl__P Parameter: Timepoint (hr) Value: 6
  misc_feature: MA Experiment 20000268 PARAMETER Experiment Name: At_100mM_NaCl__P Parameter: Tissue Value: Whole Plant
  misc_feature: MA Experiment 20000268 PARAMETER Experiment Name: At_100mM_NaCl__P Parameter: Treatment Value: 100mM NaCl vs. No Treatment
  misc_feature: MA Experiment ID: 20000286 Result: Down-regulated in Transcription
  misc_feature: MA Experiment 20000286 PARAMETER Experiment Name: At_Open_Flower_P Parameter: Age (day) Value: 21
  misc_feature: MA Experiment 20000286 PARAMETER Experiment Name: At_Open_Flower_P Parameter: Plant Line Value: WS
  misc_feature: MA Experiment 20000286 PARAMETER Experiment Name: At_Open_Flower_P Parameter: Tissue Value: Half Open vs. Whole Plant
  misc_feature: MA Experiment ID: 20000308 Result: Down-regulated in Transcription
  misc_feature: MA Experiment 20000308 PARAMETER Experiment Name: At_100mM_NaCl__P Parameter: Age (day) Value: 17
  misc_feature: MA Experiment 20000308 PARAMETER Experiment Name: At_100mM_NaCl__P Parameter: Organism Value: A. thaliana
  misc_feature: MA Experiment 20000308 PARAMETER Experiment Name: At_100mM_NaCl__P Parameter: Plant Line Value: WS
  misc_feature: MA Experiment 20000308 PARAMETER Experiment Name: At_100mM_NaCl__P Parameter: Timepoint (hr) Value: 72
  misc_feature: MA Experiment 20000308 PARAMETER Experiment Name: At_100mM_NaCl__P Parameter: Tissue Value: Whole Plant
  misc_feature: MA Experiment 20000308 PARAMETER Experiment Name: At_100mM_NaCl__P Parameter: Treatment Value: 100mM NaCl vs. No Treatment
  misc_feature: MA Experiment ID: 20000436 Result: Down-regulated in Transcription
  misc_feature: MA Experiment 20000436 PARAMETER Experiment Name: At_Drought_P Parameter: Age (day) Value: 7
  misc_feature: MA Experiment 20000436 PARAMETER Experiment Name: At_Drought_P Parameter: Organism Value: A. thaliana
  misc_feature: MA Experiment 20000436 PARAMETER Experiment Name: At_Drought_P Parameter: Plant Line Value: WS
  misc_feature: MA Experiment 20000436 PARAMETER Experiment Name: At_Drought_P Parameter: Timepoint (hr) Value: 12
  misc_feature: MA Experiment 20000436 PARAMETER Experiment Name: At_Drought_P Parameter: Tissue Value: Whole Plant
  misc_feature: MA Experiment 20000436 PARAMETER Experiment Name: At_Drought_P Parameter: Treatment Value: Drought vs. No Drought
  misc_feature: MA Experiment ID: 20000437 Result: Down-regulated in Transcription
  misc_feature: MA Experiment 20000437 PARAMETER Experiment Name: At_Drought_P Parameter: Age (day) Value: 8
  misc_feature: MA Experiment 20000437 PARAMETER Experiment Name: At_Drought_P Parameter: Organism Value: A. thaliana
  misc_feature: MA Experiment 20000437 PARAMETER Experiment Name: At_Drought_P Parameter: Plant Line Value: WS
  misc_feature: MA Experiment 20000437 PARAMETER Experiment Name: At_Drought_P Parameter: Timepoint (hr) Value: 24
  misc_feature: MA Experiment 20000437 PARAMETER Experiment Name: At_Drought_P Parameter: Tissue Value: Whole Plant
  misc_feature: MA Experiment 20000437 PARAMETER Experiment Name: At_Drought_P Parameter: Treatment Value: Drought vs. No Drought
  misc_feature: MA Experiment ID: 20000439 Result: Down-regulated in Transcription
  misc_feature: MA Experiment 20000439 PARAMETER Experiment Name: At_Roots__P Parameter: Age (day) Value: 14 vs. 21
  misc_feature: MA Experiment 20000439 PARAMETER Experiment Name: At_Roots__P Parameter: Organism Value: A. thaliana
  misc_feature: MA Experiment 20000439 PARAMETER Experiment Name: At_Roots__P Parameter: Tissue Value: Roots vs. Whole Plant
  misc_feature: MA Experiment ID: 20000441 Result: Up-regulated in Transcription
  misc_feature: MA Experiment 20000441 PARAMETER Experiment Name: At_1uM_BR-BRZ__P Parameter: Tissue Value: Shoot Apices
  misc_feature: MA Experiment 20000441 PARAMETER Experiment Name: At_1uM_BR-BRZ__P Parameter: Treatment Value: 1uM BR vs. No Treatment
  misc_feature: MA Experiment ID: 20000443 Result: Up-regulated in Transcription
  misc_feature: MA Experiment 20000443 PARAMETER Experiment Name: At_1uM_BR-BRZ__P Parameter: Tissue Value: Shoot Apices
  misc_feature: MA Experiment 20000443 PARAMETER Experiment Name: At_1uM_BR-BRZ__P Parameter: Treatment Value: 1uM BRZ vs. No Treatment
  misc_feature: MA Experiment ID: 20000460 Result: Down-regulated in Transcription
  misc_feature: MA Experiment 20000460 PARAMETER Experiment Name: At_10percent_PEG_P Parameter: Age (day) Value: 12
  misc_feature: MA Experiment 20000460 PARAMETER Experiment Name: At_10percent_PEG_P Parameter: Organism Value: A. thaliana
  misc_feature: MA Experiment 20000460 PARAMETER Experiment Name: At_10percent_PEG_P Parameter: Plant Line Value: WS
  misc_feature: MA Experiment 20000460 PARAMETER Experiment Name: At_10percent_PEG_P Parameter: Timepoint (day) Value: 12
  misc_feature: MA Experiment 20000460 PARAMETER Experiment Name: At_10percent_PEG_P Parameter: Tissue Value: Whole Plant
  misc_feature: MA Experiment 20000460 PARAMETER Experiment Name: At_10percent_PEG_P Parameter: Treatment Value: 10percent PEG vs. No Treatment
  misc_feature: MA Experiment ID: 20000794 Result: Down-regulated in Transcription
  misc_feature: MA Experiment 20000794 PARAMETER Experiment Name: At_Petals_P Parameter: Age (day) Value: 23-25 days
  misc_feature: MA Experiment 20000794 PARAMETER Experiment Name: At_Petals_P Parameter: Plant Line Value: WS
  misc_feature: MA Experiment 20000794 PARAMETER Experiment Name: At_Petals_P Parameter: Tissue Value: Petals vs. Whole plant
  misc_feature: MA Experiment ID: 20001248 Result: Up-regulated in Transcription
  misc_feature: MA Experiment 20001248 PARAMETER Experiment Name: At_Far-red-induction_P Parameter: Age (day) Value: 7
  misc_feature: MA Experiment 20001248 PARAMETER Experiment Name: At_Far-red-induction_P Parameter: Light Value: Far-red vs. White
  misc_feature: MA Experiment 20001248 PARAMETER Experiment Name: At_Far-red-induction_P Parameter: Organism Value: A. thaliana
  misc_feature: MA Experiment 20001248 PARAMETER Experiment Name: At_Far-red-induction_P Parameter: Plant Line Value: Columbia
  misc_feature: MA Experiment 20001248 PARAMETER Experiment Name: At_Far-red-induction_P Parameter: Timepoint (hr) Value: 4
  misc_feature: MA Experiment 20001248 PARAMETER Experiment Name: At_Far-red-induction_P Parameter: Tissue Value: Whole Plant
  misc_feature: MA Experiment ID: 20001450 Result: Up-regulated in Transcription
  misc_feature: MA Experiment 20001450 PARAMETER Experiment Name: At_Far-red-induction_P Parameter: Age (day) Value: 7
  misc_feature: MA Experiment 20001450 PARAMETER Experiment Name: At_Far-red-induction_P Parameter: Light Value: Far-red vs. White
  misc_feature: MA Experiment 20001450 PARAMETER Experiment Name: At_Far-red-induction_P Parameter: Organism Value: A. thaliana
  misc_feature: MA Experiment 20001450 PARAMETER Experiment Name: At_Far-red-induction_P Parameter: Plant Line Value: Columbia
  misc_feature: MA Experiment 20001450 PARAMETER Experiment Name: At_Far-red-induction_P Parameter: Timepoint (hr) Value: 8
  misc_feature: MA Experiment 20001450 PARAMETER Experiment Name: At_Far-red-induction_P Parameter: Tissue Value: Whole Plant
  misc_feature: MA Experiment ID: 20001554 Result: Down-regulated in Transcription
  misc_feature: MA Experiment 20001554 PARAMETER Experiment Name: At_Drought_Soil_Dry_P Parameter: Age (day) Value: 21
  misc_feature: MA Experiment 20001554 PARAMETER Experiment Name: At_Drought_Soil_Dry_P Parameter: Organism Value: A. thaliana
  misc_feature: MA Experiment 20001554 PARAMETER Experiment Name: At_Drought_Soil_Dry_P Parameter: Plant Line Value: WS
  misc_feature: MA Experiment 20001554 PARAMETER Experiment Name: At_Drought_Soil_Dry_P Parameter: Post Timepoint (hr) Value: None
  misc_feature: MA Experiment 20001554 PARAMETER Experiment Name: At_Drought_Soil_Dry_P Parameter: Post-Treatment Value: None
  misc_feature: MA Experiment 20001554 PARAMETER Experiment Name: At_Drought_Soil_Dry_P Parameter: Timepoint (day) Value: 7
  misc_feature: MA Experiment 20001554 PARAMETER Experiment Name: At_Drought_Soil_Dry_P Parameter: Treatment Value: Drought vs. No Drought
  misc_feature: MA Experiment ID: 20001555 Result: Down-regulated in Transcription
  misc_feature: MA Experiment 20001555 PARAMETER Experiment Name: At_Drought_Soil_Dry_P Parameter: Age (day) Value: 24
  misc_feature: MA Experiment 20001555 PARAMETER Experiment Name: At_Drought_Soil_Dry_P Parameter: Organism Value: A. thaliana
  misc_feature: MA Experiment 20001555 PARAMETER Experiment Name: At_Drought_Soil_Dry_P Parameter: Plant Line Value: WS
  misc_feature: MA Experiment 20001555 PARAMETER Experiment Name: At_Drought_Soil_Dry_P Parameter: Post Timepoint (hr) Value: None
  misc_feature: MA Experiment 20001555 PARAMETER Experiment Name: At_Drought_Soil_Dry_P Parameter: Post-Treatment Value: None
  misc_feature: MA Experiment 20001555 PARAMETER Experiment Name: At_Drought_Soil_Dry_P Parameter: Timepoint (day) Value: 10
  misc_feature: MA Experiment 20001555 PARAMETER Experiment Name: At_Drought_Soil_Dry_P Parameter: Treatment Value: Drought vs. No Drought
  misc_feature: MA Experiment ID: 20001556 Result: Down-regulated in Transcription
  misc_feature: MA Experiment 20001556 PARAMETER Experiment Name: At_Drought_Soil_Dry_P Parameter: Age (day) Value: 26
  misc_feature: MA Experiment 20001556 PARAMETER Experiment Name: At_Drought_Soil_Dry_P Parameter: Organism Value: A. thaliana
  misc_feature: MA Experiment 20001556 PARAMETER Experiment Name: At_Drought_Soil_Dry_P Parameter: Plant Line Value: WS
  misc_feature: MA Experiment 20001556 PARAMETER Experiment Name: At_Drought_Soil_Dry_P Parameter: Post Timepoint (hr) Value: None
  misc_feature: MA Experiment 20001556 PARAMETER Experiment Name: At_Drought_Soil_Dry_P Parameter: Post-Treatment Value: None
  misc_feature: MA Experiment 20001556 PARAMETER Experiment Name: At_Drought_Soil_Dry_P Parameter: Timepoint (day) Value: 12
  misc_feature: MA Experiment 20001556 PARAMETER Experiment Name: At_Drought_Soil_Dry_P Parameter: Treatment Value: Drought vs. No Drought
  misc_feature: MA Experiment ID: 20001559 Result: Down-regulated in Transcription
  misc_feature: MA Experiment 20001559 PARAMETER Experiment Name: At_Drought_Soil_Dry_P Parameter: Age (day) Value: 28
  misc_feature: MA Experiment 20001559 PARAMETER Experiment Name: At_Drought_Soil_Dry_P Parameter: Organism Value: A. thaliana
  misc_feature: MA Experiment 20001559 PARAMETER Experiment Name: At_Drought_Soil_Dry_P Parameter: Plant Line Value: WS
  misc_feature: MA Experiment 20001559 PARAMETER Experiment Name: At_Drought_Soil_Dry_P Parameter: Post Timepoint (hr) Value: 29
  misc_feature: MA Experiment 20001559 PARAMETER Experiment Name: At_Drought_Soil_Dry_P Parameter: Post-Treatment Value: Re-Water vs. No Drought
  misc_feature: MA Experiment 20001559 PARAMETER Experiment Name: At_Drought_Soil_Dry_P Parameter: Timepoint (day) Value: 14
  misc_feature: MA Experiment 20001559 PARAMETER Experiment Name: At_Drought_Soil_Dry_P Parameter: Treatment Value: Drought vs. No Drought
  misc_feature: MA Experiment ID: 20001756 Result: Up-regulated in Transcription
  misc_feature: MA Experiment 20001756 PARAMETER Experiment Name: At_50mM_NH4NO3_L-to-H_P Parameter: Timepoint (hr) Value: 4
  misc_feature: MA Experiment 20001756 PARAMETER Experiment Name: At_50mM_NH4NO3_L-to-H_P Parameter: Tissue Value: Leaf
  misc_feature: MA Experiment 20001756 PARAMETER Experiment Name: At_50mM_NH4NO3_L-to-H_P Parameter: Treatment Value: 50mM NH4NO3 vs 100mM Mannitol
  misc_feature: MA Experiment ID: 20001757 Result: Up-regulated in Transcription
  misc_feature: MA Experiment 20001757 PARAMETER Experiment Name: At_50mM_NH4NO3_L-to-H_P Parameter: Timepoint (hr) Value: 6
  misc_feature: MA Experiment 20001757 PARAMETER Experiment Name: At_50mM_NH4NO3_L-to-H_P Parameter: Tissue Value: Leaf
  misc_feature: MA Experiment 20001757 PARAMETER Experiment Name: At_50mM_NH4NO3_L-to-H_P Parameter: Treatment Value: 50mM NH4NO3 vs 100mM Mannitol
  misc_feature: MA Experiment ID: 20001768 Result: Down-regulated in Transcription
  misc_feature: MA Experiment 20001768 PARAMETER Experiment Name: At_Far-red-enriched-adult_P Parameter: Age (day) Value: 28
  misc_feature: MA Experiment 20001768 PARAMETER Experiment Name: At_Far-red-enriched-adult_P Parameter: Light Value: Far-red enriched vs. White
  misc_feature: MA Experiment 20001768 PARAMETER Experiment Name: At_Far-red-enriched-adult_P Parameter: Organism Value: A. thaliana
  misc_feature: MA Experiment 20001768 PARAMETER Experiment Name: At_Far-red-enriched-adult_P Parameter: Plant Line Value: Columbia
  misc_feature: MA Experiment 20001768 PARAMETER Experiment Name: At_Far-red-enriched-adult_P Parameter: Timepoint (hr) Value: 1
  misc_feature: MA Experiment 20001768 PARAMETER Experiment Name: At_Far-red-enriched-adult_P Parameter: Tissue Value: Aerial
  misc_feature: MA Experiment ID: 20001904 Result: Down-regulated in Transcription
  misc_feature: MA Experiment 20001904 PARAMETER Experiment Name: At_Drought_Reproduction_P Parameter: Age (day) Value: 37
  misc_feature: MA Experiment 20001904 PARAMETER Experiment Name: At_Drought_Reproduction_P Parameter: Organism Value: A. thaliana
  misc_feature: MA Experiment 20001904 PARAMETER Experiment Name: At_Drought_Reproduction_P Parameter: Plant Line Value: WS
  misc_feature: MA Experiment 20001904 PARAMETER Experiment Name: At_Drought_Reproduction_P Parameter: Timepoint (day) Value: 7
  misc_feature: MA Experiment 20001904 PARAMETER Experiment Name: At_Drought_Reproduction_P Parameter: Tissue Value: Rosettes
  misc_feature: MA Experiment 20001904 PARAMETER Experiment Name: At_Drought_Reproduction_P Parameter: Treatment Value: Drought vs. No Drought
  misc_feature: MA Experiment ID: 20001906 Result: Down-regulated in Transcription
  misc_feature: MA Experiment 20001906 PARAMETER Experiment Name: At_Drought_Reproduction_P Parameter: Age (day) Value: 35
  misc_feature: MA Experiment 20001906 PARAMETER Experiment Name: At_Drought_Reproduction_P Parameter: Organism Value: A. thaliana
  misc_feature: MA Experiment 20001906 PARAMETER Experiment Name: At_Drought_Reproduction_P Parameter: Plant Line Value: WS
  misc_feature: MA Experiment 20001906 PARAMETER Experiment Name: At_Drought_Reproduction_P Parameter: Timepoint (day) Value: 5
  misc_feature: MA Experiment 20001906 PARAMETER Experiment Name: At_Drought_Reproduction_P Parameter: Tissue Value: Siliques
  misc_feature: MA Experiment 20001906 PARAMETER Experiment Name: At_Drought_Reproduction_P Parameter: Treatment Value: Drought vs. No Drought
  misc_feature: MA Experiment ID: 20001910 Result: Down-regulated in Transcription
  misc_feature: MA Experiment 20001910 PARAMETER Experiment Name: At_Drought_Reproduction_P Parameter: Age (day) Value: 37
  misc_feature: MA Experiment 20001910 PARAMETER Experiment Name: At_Drought_Reproduction_P Parameter: Organism Value: A. thaliana
  misc_feature: MA Experiment 20001910 PARAMETER Experiment Name: At_Drought_Reproduction_P Parameter: Plant Line Value: WS
  misc_feature: MA Experiment 20001910 PARAMETER Experiment Name: At_Drought_Reproduction_P Parameter: Timepoint (day) Value: 7
  misc_feature: MA Experiment 20001910 PARAMETER Experiment Name: At_Drought_Reproduction_P Parameter: Tissue Value: Flowers
  misc_feature: MA Experiment 20001910 PARAMETER Experiment Name: At_Drought_Reproduction_P Parameter: Treatment Value: Drought vs. No Drought
  misc_feature: MA Experiment ID: 20001911 Result: Down-regulated in Transcription
  misc_feature: MA Experiment 20001911 PARAMETER Experiment Name: At_Drought_Reproduction_P Parameter: Age (day) Value: 40
  misc_feature: MA Experiment 20001911 PARAMETER Experiment Name: At_Drought_Reproduction_P Parameter: Organism Value: A. thaliana
  misc_feature: MA Experiment 20001911 PARAMETER Experiment Name: At_Drought_Reproduction_P Parameter: Plant Line Value: WS
  misc_feature: MA Experiment 20001911 PARAMETER Experiment Name: At_Drought_Reproduction_P Parameter: Timepoint (day) Value: 10
  misc_feature: MA Experiment 20001911 PARAMETER Experiment Name: At_Drought_Reproduction_P Parameter: Tissue Value: Flowers
  misc_feature: MA Experiment 20001911 PARAMETER Experiment Name: At_Drought_Reproduction_P Parameter: Treatment Value: Drought vs. No Drought

SEQ ID NO: 30237 - protein, 153 aa, Arabidopsis thaliana; identical to SEQ ID NO: 23437
  peptide (1)..(153): Ceres Seq. ID no. 12561633
  misc_feature (71)..(152): Pfam Name: Protease inhibitor/seed storage/LTP family Pfam Description: Protease inhibitor/seed storage/LTP family
  misc_feature (71)..(152): Pfam Name: Protease inhibitor/seed storage/LTP family Pfam Description: Protease inhibitor/seed storage/LTP family
  misc_feature (71)..(152): Pfam Name: Protease inhibitor/seed storage/LTP family Pfam Description: Protease inhibitor/seed storage/LTP family
  misc_feature (20)..(152): Homolog of NCBI NO: 15221484 NR Description: similar to 14KD proline-rich protein DC2.15
  misc_feature (48)..(153): Homolog of NCBI NO: 7488729 NR Description: CIC protein, cold-inducible - alfalfa
  misc_feature (20)..(153): Homolog of NCBI NO: 10798752 NR Description: P-rich protein EIG-I30 [Nicotiana tabacum]
  misc_feature (35)..(152): Homolog of NCBI NO: 2129871 NR Description: proline-rich protein, 14K - kidney bean
  misc_feature (20)..(152): Homolog of NCBI NO: 10798758 NR Description: P-rich protein Nt-SubC29 [Nicotiana tabacum]
  misc_feature (20)..(152): Homolog of NCBI NO: 15221484 NR Description: similar to 14KD proline-rich protein DC2.15
  misc_feature (20)..(153): Homolog of NCBI NO: 10798752 NR Description: P-rich protein EIG-I30 [Nicotiana tabacum]
  misc_feature (20)..(152): Homolog of NCBI NO: 10798758 NR Description: P-rich protein Nt-SubC29 [Nicotiana tabacum]
  misc_feature (35)..(152): Homolog of NCBI NO: 2129871 NR Description: proline-rich protein, 14K - kidney bean
  misc_feature (20)..(153): Homolog of NCBI NO: 10798752 NR Description: P-rich protein EIG-I30 [Nicotiana tabacum]
  misc_feature (48)..(153): Homolog of NCBI NO: 7488729 NR Description: CIC protein, cold-inducible - alfalfa
  misc_feature (20)..(152): Homolog of NCBI NO: 15221484 NR Description: similar to 14KD proline-rich protein DC2.15
  misc_feature (20)..(153): Homolog of NCBI NO: 18406723 NR Description: expressed protein
  misc_feature (20)..(153): Homolog of NCBI NO: 481236 NR Description: hypothetical protein - Madagascar periwinkle
  misc_feature (20)..(153): Homolog of NCBI NO: 4454097 NR Description: hybrid proline-rich protein [Catharanthus roseus]
  misc_feature (20)..(153): Homolog of NCBI NO: 7484770 NR Description: extensin like protein - black poplar
  misc_feature (20)..(153): Homolog of NCBI NO: 112697 NR Description: 14 KD PROLINE-RICH PROTEIN DC2.15 PRECURSOR
  misc_feature (20)..(153): Homolog of NCBI NO: 18406723 NR Description: expressed protein
  misc_feature (20)..(153): Homolog of NCBI NO: 481236 NR Description: hypothetical protein - Madagascar periwinkle
  misc_feature (20)..(153): Homolog of NCBI NO: 4454097 NR Description: hybrid proline-rich protein [Catharanthus roseus]
  misc_feature (20)..(153): Homolog of NCBI NO: 7484770 NR Description: extensin like protein - black poplar
  misc_feature (20)..(153): Homolog of NCBI NO: 112697 NR Description: 14 KD PROLINE-RICH PROTEIN DC2.15 PRECURSOR
  misc_feature (20)..(152): Homolog of NCBI NO: 10798758 NR Description: P-rich protein Nt-SubC29 [Nicotiana tabacum]
  misc_feature (35)..(152): Homolog of NCBI NO: 2129871 NR Description: proline-rich protein, 14K - kidney bean
  misc_feature (48)..(153): Homolog of NCBI NO: 7488729 NR Description: CIC protein, cold-inducible - alfalfa
  misc_feature (20)..(153): Homolog of NCBI NO: 112697 NR Description: 14 KD PROLINE-RICH PROTEIN DC2.15 PRECURSOR
  misc_feature (20)..(153): Homolog of NCBI NO: 7484770 NR Description: extensin like protein - black poplar
  misc_feature (20)..(153): Homolog of NCBI NO: 4454097 NR Description: hybrid proline-rich protein [Catharanthus roseus]
  misc_feature (20)..(153): Homolog of NCBI NO: 481236 NR Description: hypothetical protein - Madagascar periwinkle
  misc_feature (20)..(153): Homolog of NCBI NO: 18406723 NR Description: expressed protein

SEQ ID NO: 30238 - protein, 134 aa, Arabidopsis thaliana; identical to SEQ ID NO: 23438
  peptide (1)..(134): Ceres Seq. ID no. 12561634
  misc_feature (52)..(133): Pfam Name: Protease inhibitor/seed storage/LTP family Pfam Description: Protease inhibitor/seed storage/LTP family
  misc_feature (52)..(133): Pfam Name: Protease inhibitor/seed storage/LTP family Pfam Description: Protease inhibitor/seed storage/LTP family
  misc_feature (52)..(133): Pfam Name: Protease inhibitor/seed storage/LTP family Pfam Description: Protease inhibitor/seed storage/LTP family
  misc_feature (1)..(133): Homolog of NCBI NO: 15221484 NR Description: similar to 14KD proline-rich protein DC2.15
  misc_feature (29)..(134): Homolog of NCBI NO: 7488729 NR Description: CIC protein, cold-inducible - alfalfa
  misc_feature (1)..(134): Homolog of NCBI NO: 10798752 NR Description: P-rich protein EIG-I30 [Nicotiana tabacum]
  misc_feature (16)..(133): Homolog of NCBI NO: 2129871 NR Description: proline-rich protein, 14K - kidney bean
  misc_feature (1)..(133): Homolog of NCBI NO: 10798758 NR Description: P-rich protein Nt-SubC29 [Nicotiana tabacum]
  misc_feature (1)..(133): Homolog of NCBI NO: 15221484 NR Description: similar to 14KD proline-rich protein DC2.15
  misc_feature (1)..(134): Homolog of NCBI NO: 10798752 NR Description: P-rich protein EIG-I30 [Nicotiana tabacum]
  misc_feature (1)..(133): Homolog of NCBI NO: 10798758 NR Description: P-rich protein Nt-SubC29 [Nicotiana tabacum]
  misc_feature (16)..(133): Homolog of NCBI NO: 2129871 NR Description: proline-rich protein, 14K - kidney bean
  misc_feature (1)..(134): Homolog of NCBI NO: 10798752 NR Description: P-rich protein EIG-I30 [Nicotiana tabacum]
  misc_feature (29)..(134): Homolog of NCBI NO: 7488729 NR Description: CIC protein, cold-inducible - alfalfa
  misc_feature (1)..(133): Homolog of NCBI NO: 15221484 NR Description: similar to 14KD proline-rich protein DC2.15
  misc_feature (1)..(134): Homolog of NCBI NO: 18406723 NR Description: expressed protein
  misc_feature (1)..(134): Homolog of NCBI NO: 481236 NR Description: hypothetical protein - Madagascar periwinkle
  misc_feature (1)..(134): Homolog of NCBI NO: 4454097 NR Description: hybrid proline-rich protein [Catharanthus roseus]
  misc_feature (1)..(134): Homolog of NCBI NO: 7484770 NR Description: extensin like protein - black poplar
  misc_feature (1)..(134): Homolog of NCBI NO: 112697 NR Description: 14 KD PROLINE-RICH PROTEIN DC2.15 PRECURSOR
  misc_feature (1)..(134): Homolog of NCBI NO: 18406723 NR Description: expressed protein
  misc_feature (1)..(134): Homolog of NCBI NO: 481236 NR Description: hypothetical protein - Madagascar periwinkle
  misc_feature (1)..(134): Homolog of NCBI NO: 4454097 NR Description: hybrid proline-rich protein [Catharanthus roseus]
  misc_feature (1)..(134): Homolog of NCBI NO: 7484770 NR Description: extensin like protein - black poplar
  misc_feature (1)..(134): Homolog of NCBI NO: 112697 NR Description: 14 KD PROLINE-RICH PROTEIN DC2.15 PRECURSOR
  misc_feature (1)..(133): Homolog of NCBI NO: 10798758 NR Description: P-rich protein Nt-SubC29 [Nicotiana tabacum]
  misc_feature (16)..(133): Homolog of NCBI NO: 2129871 NR Description: proline-rich protein, 14K - kidney bean
  misc_feature (29)..(134): Homolog of NCBI NO: 7488729 NR Description: CIC protein, cold-inducible - alfalfa
  misc_feature (1)..(134): Homolog of NCBI NO: 112697 NR Description: 14 KD PROLINE-RICH PROTEIN DC2.15 PRECURSOR
  misc_feature (1)..(134): Homolog of NCBI NO: 7484770 NR Description: extensin like protein - black poplar
  misc_feature (1)..(134): Homolog of NCBI NO: 4454097 NR Description: hybrid proline-rich protein [Catharanthus roseus]
  misc_feature (1)..(134): Homolog of NCBI NO: 481236 NR Description: hypothetical protein - Madagascar periwinkle
  misc_feature (1)..(134): Homolog of NCBI NO: 18406723 NR Description: expressed protein

SEQ ID NO: 30239 - DNA, 2764 bp, Arabidopsis thaliana; identical to SEQ ID NO: 27071
  misc_feature (1)..(2764): Ceres Seq. ID no. 13491797
  misc_feature: MA Experiment ID: 108435 Result: Down-regulated in Transcription
  misc_feature: MA Experiment 108435 PARAMETER Experiment Name: At_stm_Mutants_cDNA_P Parameter: Plant Line Value: wt Landsburg vs stm
  misc_feature: MA Experiment 108435 PARAMETER Experiment Name: At_stm_Mutants_cDNA_P Parameter: Tissue Value: Shoot Apical Meristem Region
  misc_feature: MA Experiment ID: 20000069 Result: Up-regulated in Transcription
  misc_feature: MA Experiment 20000069 PARAMETER Experiment Name: At_100uM_ABA_Mutants_cDNA_P Parameter: Plant Line Value: CS23
  misc_feature: MA Experiment 20000069 PARAMETER Experiment Name: At_100uM_ABA_Mutants_cDNA_P Parameter: Timepoint (hr) Value: 6
  misc_feature: MA Experiment 20000069 PARAMETER Experiment Name: At_100uM_ABA_Mutants_cDNA_P Parameter: Tissue Value: Aerial
  misc_feature: MA Experiment 20000069 PARAMETER Experiment Name: At_100uM_ABA_Mutants_cDNA_P Parameter: Treatment Value: 100uM ABA vs. No Treatment
  misc_feature: MA Experiment ID: 20000070 Result: Up-regulated in Transcription
  misc_feature: MA Experiment 20000070 PARAMETER Experiment Name: At_100uM_ABA_Mutants_cDNA_P Parameter: Plant Line Value: CS24
  misc_feature: MA Experiment 20000070 PARAMETER Experiment Name: At_100uM_ABA_Mutants_cDNA_P Parameter: Timepoint (hr) Value: 6
  misc_feature: MA Experiment 20000070 PARAMETER Experiment Name: At_100uM_ABA_Mutants_cDNA_P Parameter: Tissue Value: Aerial
  misc_feature: MA Experiment 20000070 PARAMETER Experiment Name: At_100uM_ABA_Mutants_cDNA_P Parameter: Treatment Value: 100uM ABA vs. No Treatment
  misc_feature: MA Experiment ID: 20000071 Result: Up-regulated in Transcription
  misc_feature: MA Experiment 20000071 PARAMETER Experiment Name: At_100uM_ABA_Mutants_cDNA_P Parameter: Plant Line Value: CS8104
  misc_feature: MA Experiment 20000071 PARAMETER Experiment Name: At_100uM_ABA_Mutants_cDNA_P Parameter: Timepoint (hr) Value: 6
  misc_feature: MA Experiment 20000071 PARAMETER Experiment Name: At_100uM_ABA_Mutants_cDNA_P Parameter: Tissue Value: Aerial
  misc_feature: MA Experiment 20000071 PARAMETER Experiment Name: At_100uM_ABA_Mutants_cDNA_P Parameter: Treatment Value: 100uM ABA vs. No Treatment
  misc_feature: MA Experiment ID: 20000072 Result: Up-regulated in Transcription
  misc_feature: MA Experiment 20000072 PARAMETER Experiment Name: At_100uM_ABA_Mutants_cDNA_P Parameter: Plant Line Value: CS8105
  misc_feature: MA Experiment 20000072 PARAMETER Experiment Name: At_100uM_ABA_Mutants_cDNA_P Parameter: Timepoint (hr) Value: 6
  misc_feature: MA Experiment 20000072 PARAMETER Experiment Name: At_100uM_ABA_Mutants_cDNA_P Parameter: Tissue Value: Aerial
  misc_feature: MA Experiment 20000072 PARAMETER Experiment Name: At_100uM_ABA_Mutants_cDNA_P Parameter: Treatment Value: 100uM ABA vs. No Treatment
  misc_feature: MA Experiment ID: 20000086 Result: Up-regulated in Transcription
  misc_feature: MA Experiment 20000086 PARAMETER Experiment Name: At_100uM_ABA_Mutants_cDNA_P Parameter: Plant Line Value: CS22
  misc_feature: MA Experiment 20000086 PARAMETER Experiment Name: At_100uM_ABA_Mutants_cDNA_P Parameter: Timepoint (hr) Value: 6
  misc_feature: MA Experiment 20000086 PARAMETER Experiment Name: At_100uM_ABA_Mutants_cDNA_P Parameter: Tissue Value: Aerial
  misc_feature: MA Experiment 20000086 PARAMETER Experiment Name: At_100uM_ABA_Mutants_cDNA_P Parameter: Treatment Value: 100uM ABA vs. No Treatment
  misc_feature: MA Experiment ID: 20000087 Result: Up-regulated in Transcription
  misc_feature: MA Experiment 20000087 PARAMETER Experiment Name: At_100uM_ABA_Mutants_cDNA_P Parameter: Plant Line Value: WS
  misc_feature: MA Experiment 20000087 PARAMETER Experiment Name: At_100uM_ABA_Mutants_cDNA_P Parameter: Timepoint (hr) Value: 6
  misc_feature: MA Experiment 20000087 PARAMETER Experiment Name: At_100uM_ABA_Mutants_cDNA_P Parameter: Tissue Value: Aerial
  misc_feature: MA Experiment 20000087 PARAMETER Experiment Name: At_100uM_ABA_Mutants_cDNA_P Parameter: Treatment Value: 100uM ABA vs. No Treatment
  misc_feature: MA Experiment ID: 20000088 Result: Up-regulated in Transcription
  misc_feature: MA Experiment 20000088 PARAMETER Experiment Name: At_100uM_ABA_Mutants_cDNA_P Parameter: Plant Line Value: Landsberg
  misc_feature: MA Experiment 20000088 PARAMETER Experiment Name: At_100uM_ABA_Mutants_cDNA_P Parameter: Timepoint (hr) Value: 6
  misc_feature: MA Experiment 20000088 PARAMETER Experiment Name: At_100uM_ABA_Mutants_cDNA_P Parameter: Tissue Value: Aerial
  misc_feature: MA Experiment 20000088 PARAMETER Experiment Name: At_100uM_ABA_Mutants_cDNA_P Parameter: Treatment Value: 100uM ABA vs. No Treatment
  misc_feature: MA Experiment ID: 20000089 Result: Up-regulated in Transcription
  misc_feature: MA Experiment ID: 20000090 Result: Up-regulated in Transcription
  misc_feature: MA Experiment ID: 20000112 Result: Down-regulated in Transcription
  misc_feature: MA Experiment 20000112 PARAMETER Experiment Name: At_42deg_Heat_cDNA_P Parameter: Temperature (deg C) Value: 42 vs. 22
  misc_feature: MA Experiment 20000112 PARAMETER Experiment Name: At_42deg_Heat_cDNA_P Parameter: Timepoint (hr) Value: 2
  misc_feature: MA Experiment 20000112 PARAMETER Experiment Name: At_42deg_Heat_cDNA_P Parameter: Tissue Value: Aerial
  misc_feature: MA Experiment ID: 20000113 Result: Down-regulated in Transcription
  misc_feature: MA Experiment 20000113 PARAMETER Experiment Name: At_42deg_Heat_cDNA_P Parameter: Temperature (deg C) Value: 42 vs. 22
  misc_feature: MA Experiment 20000113 PARAMETER Experiment Name: At_42deg_Heat_cDNA_P Parameter: Timepoint (hr) Value: 8
  misc_feature: MA Experiment 20000113 PARAMETER Experiment Name: At_42deg_Heat_cDNA_P Parameter: Tissue Value: Aerial
  misc_feature: MA Experiment ID: 20000117 Result: Up-regulated in Transcription
  misc_feature: MA Experiment 20000117 PARAMETER Experiment Name: At_100uM_ABA_Mutants_cDNA_P Parameter: Plant Line Value: Columbia
  misc_feature: MA Experiment 20000117 PARAMETER Experiment Name: At_100uM_ABA_Mutants_cDNA_P Parameter: Timepoint (hr) Value: 6
  misc_feature: MA Experiment 20000117 PARAMETER Experiment Name: At_100uM_ABA_Mutants_cDNA_P Parameter: Tissue Value: Aerial
  misc_feature: MA Experiment 20000117 PARAMETER Experiment Name: At_100uM_ABA_Mutants_cDNA_P Parameter: Treatment Value: 100uM ABA vs. No Treatment
  misc_feature: MA Experiment ID: 20000173 Result: Down-regulated in Transcription
  misc_feature: MA Experiment 20000173 PARAMETER Experiment Name: At_42deg_Heat_P Parameter: Age (day) Value: 14
  misc_feature: MA Experiment 20000173 PARAMETER Experiment Name: At_42deg_Heat_P Parameter: Organism Value: A. thaliana
  misc_feature: MA Experiment 20000173 PARAMETER Experiment Name: At_42deg_Heat_P Parameter: Plant Line Value: WS
  misc_feature: MA Experiment 20000173 PARAMETER Experiment Name: At_42deg_Heat_P Parameter: Temperature (deg C) Value: 42 vs. 22
  misc_feature: MA Experiment 20000173 PARAMETER Experiment Name: At_42deg_Heat_P Parameter: Timepoint (hr) Value: 6
  misc_feature: MA Experiment 20000173 PARAMETER Experiment Name: At_42deg_Heat_P Parameter: Tissue Value: Aerial
  misc_feature: MA Experiment ID: 20000182 Result: Down-regulated in Transcription
  misc_feature: MA Experiment 20000182 PARAMETER Experiment Name: At_2mM_SA_P Parameter: Age (day) Value: 14
  misc_feature: MA Experiment 20000182 PARAMETER Experiment Name: At_2mM_SA_P Parameter: Organism Value: A. thaliana
  misc_feature: MA Experiment 20000182 PARAMETER Experiment Name: At_2mM_SA_P Parameter: Plant Line Value: WS
  misc_feature: MA Experiment 20000182 PARAMETER Experiment Name: At_2mM_SA_P Parameter: Timepoint (hr) Value: 6
  misc_feature: MA Experiment 20000182 PARAMETER Experiment Name: At_2mM_SA_P Parameter: Tissue Value: Aerial
  misc_feature: MA Experiment 20000182 PARAMETER Experiment Name: At_2mM_SA_P Parameter: Treatment Value: 2mM SA vs. No Treatment
  misc_feature: MA Experiment ID: 20000184 Result: Down-regulated in Transcription
  misc_feature: MA Experiment 20000184 PARAMETER Experiment Name: At_Shoots__P Parameter: Age (day) Value: 7
  misc_feature: MA Experiment 20000184 PARAMETER Experiment Name: At_Shoots__P Parameter: Tissue Value: Shoots vs. Whole Plant
  misc_feature: MA Experiment ID: 20000437 Result: Up-regulated in Transcription
  misc_feature: MA Experiment 20000437 PARAMETER Experiment Name: At_Drought_P Parameter: Age (day) Value: 8
  misc_feature: MA Experiment 20000437 PARAMETER Experiment Name: At_Drought_P Parameter: Organism Value: A. thaliana
  misc_feature: MA Experiment 20000437 PARAMETER Experiment Name: At_Drought_P Parameter: Plant Line Value: WS
  misc_feature: MA Experiment 20000437 PARAMETER Experiment Name: At_Drought_P Parameter: Timepoint (hr) Value: 24
  misc_feature: MA Experiment 20000437 PARAMETER Experiment Name: At_Drought_P Parameter: Tissue Value: Whole Plant
  misc_feature: MA Experiment 20000437 PARAMETER Experiment Name: At_Drought_P Parameter: Treatment Value: Drought vs. No Drought
  misc_feature: MA Experiment ID: 20000438 Result: Down-regulated in Transcription
  misc_feature: MA Experiment 20000438 PARAMETER Experiment Name: At_Shoots__P Parameter: Age (day) Value: 14
  misc_feature: MA Experiment 20000438 PARAMETER Experiment Name: At_Shoots__P Parameter: Tissue Value: Shoots vs. Whole Plant
  misc_feature: MA Experiment ID: 20001451 Result: Down-regulated in Transcription
  misc_feature: MA Experiment 20001451 PARAMETER Experiment Name: At_Far-red-induction_P Parameter: Age (day) Value: 7
  misc_feature: MA Experiment 20001451 PARAMETER Experiment Name: At_Far-red-induction_P Parameter: Light Value: Far-red vs. White
  misc_feature: MA Experiment 20001451 PARAMETER Experiment Name: At_Far-red-induction_P Parameter: Organism Value: A. thaliana
  misc_feature: MA Experiment 20001451 PARAMETER Experiment Name: At_Far-red-induction_P Parameter: Plant Line Value: Columbia
  misc_feature: MA Experiment 20001451 PARAMETER Experiment Name: At_Far-red-induction_P Parameter: Timepoint (hr) Value: 24
  misc_feature: MA Experiment 20001451 PARAMETER Experiment Name: At_Far-red-induction_P Parameter: Tissue Value: Whole Plant
  misc_feature: MA Experiment ID: 20001555 Result: Up-regulated in Transcription
  misc_feature: MA Experiment 20001555 PARAMETER Experiment Name: At_Drought_Soil_Dry_P Parameter: Age (day) Value: 24
  misc_feature: MA Experiment 20001555 PARAMETER Experiment Name: At_Drought_Soil_Dry_P Parameter: Organism Value: A. thaliana
  misc_feature: MA Experiment 20001555 PARAMETER Experiment Name: At_Drought_Soil_Dry_P Parameter: Plant Line Value: WS
  misc_feature: MA Experiment 20001555 PARAMETER Experiment Name: At_Drought_Soil_Dry_P Parameter: Post Timepoint (hr) Value: None
  misc_feature: MA Experiment 20001555 PARAMETER Experiment Name: At_Drought_Soil_Dry_P Parameter: Post-Treatment Value: None
  misc_feature: MA Experiment 20001555 PARAMETER Experiment Name: At_Drought_Soil_Dry_P Parameter: Timepoint (day) Value: 10
  misc_feature: MA Experiment 20001555 PARAMETER Experiment Name: At_Drought_Soil_Dry_P Parameter: Treatment Value: Drought vs. No Drought
  misc_feature: MA Experiment ID: 20001558 Result: Down-regulated in Transcription
  misc_feature: MA Experiment 20001558 PARAMETER Experiment Name: At_Drought_Soil_Dry_P Parameter: Age (day) Value: 27
  misc_feature: MA Experiment 20001558 PARAMETER Experiment Name: At_Drought_Soil_Dry_P Parameter: Organism Value: A. thaliana
  misc_feature: MA Experiment 20001558 PARAMETER Experiment Name: At_Drought_Soil_Dry_P Parameter: Plant Line Value: WS
  misc_feature: MA Experiment 20001558 PARAMETER Experiment Name: At_Drought_Soil_Dry_P Parameter: Post Timepoint (hr) Value: 6
  misc_feature: MA Experiment 20001558 PARAMETER Experiment Name: At_Drought_Soil_Dry_P Parameter: Post-Treatment Value: Re-Water vs. No Drought
  misc_feature: MA Experiment 20001558 PARAMETER Experiment Name: At_Drought_Soil_Dry_P Parameter: Timepoint (day) Value: 13
  misc_feature: MA Experiment 20001558 PARAMETER Experiment Name: At_Drought_Soil_Dry_P Parameter: Treatment Value: Drought vs. No Drought

SEQ ID NO: 30240 - protein, 873 aa, Arabidopsis thaliana; identical to SEQ ID NO: 27072
  peptide (1)..(873): Ceres Seq. ID no. 13491798
  misc_feature (175)..(860): Homolog of NCBI NO: 283000 NR Description: 1,4-alpha-glucan branching enzyme (EC 2.4.1.18) I
  misc_feature (175)..(854): Homolog of NCBI NO: 11037532 NR Description: starch branching enyzyme 1 [Triticum aestivum]
  misc_feature (175)..(854): Homolog of NCBI NO: 4586238 NR Description: starch branching enzyme I [Triticum aestivum]
  misc_feature (175)..(854): Homolog of NCBI NO: 4586237 NR Description: starch branching enzyme I [Triticum aestivum]
  misc_feature (175)..(854): Homolog of NCBI NO: 4586236 NR Description: starch branching enzyme I [Triticum aestivum]
  misc_feature (175)..(826): Homolog of NCBI NO: 1169912 NR Description: 1,4-alpha-glucan branching enzyme (Starch
  misc_feature (175)..(864): Homolog of NCBI NO: 5441248 NR Description: branching enzyme 3 [Phaseolus vulgaris]
  misc_feature (175)..(854): Homolog of NCBI NO: 7433851 NR Description: 1,4-alpha-glucan branching enzyme (EC 2.4.1.18) I
  misc_feature (175)..(873): Homolog of NCBI NO: 1771261 NR Description: 1,4-alpha-glucan branching enzyme [Manihot
  misc_feature (109)..(853): Homolog of NCBI NO: 3822022 NR Description: starch branching enzyme IIb [Hordeum vulgare]
  misc_feature (175)..(860): Homolog of NCBI NO: 283000 NR Description: 1,4-alpha-glucan branching enzyme (EC 2.4.1.18) I
  misc_feature (175)..(854): Homolog of NCBI NO: 11037532 NR Description: starch branching enyzyme 1 [Triticum aestivum]
  misc_feature (175)..(854): Homolog of NCBI NO: 4586238 NR Description: starch branching enzyme I [Triticum aestivum]
  misc_feature (175)..(854): Homolog of NCBI NO: 4586237 NR Description: starch branching enzyme I [Triticum aestivum]
  misc_feature (175)..(854): Homolog of NCBI NO: 4586236 NR Description: starch branching enzyme I [Triticum aestivum]
  misc_feature (175)..(826): Homolog of NCBI NO: 1169912 NR Description: 1,4-alpha-glucan branching enzyme (Starch
  misc_feature (175)..(864): Homolog of NCBI NO: 5441248 NR Description: branching enzyme 3 [Phaseolus vulgaris]
  misc_feature (175)..(854): Homolog of NCBI NO: 7433851 NR Description: 1,4-alpha-glucan branching enzyme (EC 2.4.1.18) I
  misc_feature (175)..(873): Homolog of NCBI NO: 1771261 NR Description: 1,4-alpha-glucan branching enzyme [Manihot
  misc_feature (109)..(853): Homolog of NCBI NO: 3822022 NR Description: starch branching enzyme IIb [Hordeum vulgare]

SEQ ID NO: 30241 - protein, 858 aa, Arabidopsis thaliana; identical to SEQ ID NO: 27073
  peptide (1)..(858): Ceres Seq. ID no. 13491799
  misc_feature (160)..(845): Homolog of NCBI NO: 283000 NR Description: 1,4-alpha-glucan branching enzyme (EC 2.4.1.18) I
  misc_feature (160)..(839): Homolog of NCBI NO: 4586238 NR Description: starch branching enzyme I [Triticum aestivum]
  misc_feature (160)..(839): Homolog of NCBI NO: 11037532 NR Description: starch branching enyzyme 1 [Triticum aestivum]
  misc_feature (160)..(839): Homolog of NCBI NO: 4586237 NR Description: starch branching enzyme I [Triticum aestivum]
  misc_feature (160)..(839): Homolog of NCBI NO: 4586236 NR Description: starch branching enzyme I [Triticum aestivum]
  misc_feature (160)..(811): Homolog of NCBI NO: 1169912 NR Description: 1,4-alpha-glucan branching enzyme (Starch
  misc_feature (160)..(849): Homolog of NCBI NO: 5441248 NR Description: branching enzyme 3 [Phaseolus vulgaris]
  misc_feature (160)..(839): Homolog of NCBI NO: 7433851 NR Description: 1,4-alpha-glucan branching enzyme (EC 2.4.1.18) I
  misc_feature (160)..(858): Homolog of NCBI NO: 1771261 NR Description: 1,4-alpha-glucan branching enzyme [Manihot
  misc_feature (94)..(838): Homolog of NCBI NO: 3822022 NR Description: starch branching enzyme IIb [Hordeum vulgare]
  misc_feature (160)..(845): Homolog of NCBI NO: 283000 NR Description: 1,4-alpha-glucan branching enzyme (EC 2.4.1.18) I
  misc_feature (160)..(839): Homolog of NCBI NO: 4586238 NR Description: starch branching enzyme I [Triticum aestivum]
  misc_feature (160)..(839): Homolog of NCBI NO: 11037532 NR Description: starch branching enyzyme 1 [Triticum aestivum]
  misc_feature (160)..(839): Homolog of NCBI NO: 4586237 NR Description: starch branching enzyme I [Triticum aestivum]
  misc_feature (160)..(839): Homolog of NCBI NO: 4586236 NR Description: starch branching enzyme I [Triticum aestivum]
  misc_feature (160)..(811): Homolog of NCBI NO: 1169912 NR Description: 1,4-alpha-glucan branching enzyme (Starch
  misc_feature (160)..(849): Homolog of NCBI NO: 5441248 NR Description: branching enzyme 3 [Phaseolus vulgaris]
  misc_feature (160)..(839): Homolog of NCBI NO: 7433851 NR Description: 1,4-alpha-glucan branching enzyme (EC 2.4.1.18) I
  misc_feature (160)..(858): Homolog of NCBI NO: 1771261 NR Description: 1,4-alpha-glucan branching enzyme [Manihot
  misc_feature (94)..(838): Homolog of NCBI NO: 3822022 NR Description: starch branching enzyme IIb [Hordeum vulgare]

SEQ ID NO: 30242 - protein, 721 aa, Arabidopsis thaliana; identical to SEQ ID NO: 27074
  peptide (1)..(721): Ceres Seq. ID no. 13491800
  misc_feature (23)..(708): Homolog of NCBI NO: 283000 NR Description: 1,4-alpha-glucan branching enzyme (EC 2.4.1.18) I
  misc_feature (23)..(702): Homolog of NCBI NO: 4586237 NR Description: starch branching enzyme I [Triticum aestivum]
  misc_feature (23)..(702): Homolog of NCBI NO: 11037532 NR Description: starch branching enyzyme 1 [Triticum aestivum]
  misc_feature (23)..(702): Homolog of NCBI NO: 4586238 NR Description: starch branching enzyme I [Triticum aestivum]
  misc_feature (23)..(702): Homolog of NCBI NO: 4586236 NR Description: starch branching enzyme I [Triticum aestivum]
  misc_feature (23)..(674): Homolog of NCBI NO: 1169912 NR Description: 1,4-alpha-glucan branching enzyme (Starch
  misc_feature (23)..(712): Homolog of NCBI NO: 5441248 NR Description: branching enzyme 3 [Phaseolus vulgaris]
  misc_feature (23)..(702): Homolog of NCBI NO: 7433851 NR Description: 1,4-alpha-glucan branching enzyme (EC 2.4.1.18) I
  misc_feature (23)..(721): Homolog of NCBI NO: 1771261 NR Description: 1,4-alpha-glucan branching enzyme [Manihot
  misc_feature (1)..(701): Homolog of NCBI NO: 3822022 NR Description: starch branching enzyme IIb [Hordeum vulgare]
  misc_feature (23)..(708): Homolog of NCBI NO: 283000 NR Description: 1,4-alpha-glucan branching enzyme (EC 2.4.1.18) I
  misc_feature (23)..(702): Homolog of NCBI NO: 4586237 NR Description: starch branching enzyme I [Triticum aestivum]
  misc_feature (23)..(702): Homolog of NCBI NO: 11037532 NR Description: starch branching enyzyme 1 [Triticum aestivum]
  misc_feature (23)..(702): Homolog of NCBI NO: 4586238 NR Description: starch branching enzyme I [Triticum aestivum]
  misc_feature (23)..(702): Homolog of NCBI NO: 4586236 NR Description: starch branching enzyme I [Triticum aestivum]
  misc_feature (23)..(674): Homolog of NCBI NO: 1169912 NR Description: 1,4-alpha-glucan branching enzyme (Starch
  misc_feature (23)..(712): Homolog of NCBI NO: 5441248 NR Description: branching enzyme 3 [Phaseolus vulgaris]
  misc_feature (23)..(702): Homolog of NCBI NO: 7433851 NR Description: 1,4-alpha-glucan branching enzyme (EC 2.4.1.18) I
  misc_feature (23)..(721): Homolog of NCBI NO: 1771261 NR Description: 1,4-alpha-glucan branching enzyme [Manihot
  misc_feature (1)..(701): Homolog of NCBI NO: 3822022 NR Description: starch branching enzyme IIb [Hordeum vulgare]

SEQ ID NO: 30243 - DNA, 1515 bp, Arabidopsis thaliana
  misc_feature (1)..(1515): Ceres Seq. ID no. 12334769
  misc_feature: MA Experiment ID: 108434 Result: Down-regulated in Transcription
  misc_feature: MA Experiment 108434 PARAMETER Experiment Name: At_Root_Tips_cDNA_P Parameter: Tissue Value: Root Tips
  misc_feature: MA Experiment ID: 108668 Result: Up-regulated in Transcription
  misc_feature: MA Experiment 108668 PARAMETER Experiment Name: At_2mM_SA_cDNA_P Parameter: Plant Line Value: WS
  misc_feature: MA Experiment 108668 PARAMETER Experiment Name: At_2mM_SA_cDNA_P Parameter: Timepoint (hr) Value: 6
  misc_feature: MA Experiment 108668 PARAMETER Experiment Name: At_2mM_SA_cDNA_P Parameter: Treatment Value: 2mM SA vs. No Treatment
  misc_feature: MA Experiment ID: 20000111 Result: Down-regulated in Transcription
  misc_feature: MA Experiment 20000111 PARAMETER Experiment Name: At_42deg_Heat_cDNA_P Parameter: Temperature (deg C) Value: 42 vs. 22
  misc_feature: MA Experiment 20000111 PARAMETER Experiment Name: At_42deg_Heat_cDNA_P Parameter: Timepoint (hr) Value: 6
  misc_feature: MA Experiment 20000111 PARAMETER Experiment Name: At_42deg_Heat_cDNA_P Parameter: Tissue Value: Aerial
  misc_feature: MA Experiment ID: 20000113 Result: Down-regulated in Transcription
  misc_feature: MA Experiment 20000113 PARAMETER Experiment Name: At_42deg_Heat_cDNA_P Parameter: Temperature (deg C) Value: 42 vs. 22
  misc_feature: MA Experiment 20000113 PARAMETER Experiment Name: At_42deg_Heat_cDNA_P Parameter: Timepoint (hr) Value: 8
  misc_feature: MA Experiment 20000113 PARAMETER Experiment Name: At_42deg_Heat_cDNA_P Parameter: Tissue Value: Aerial
  misc_feature: MA Experiment ID: 20000182 Result: Up-regulated in Transcription
  misc_feature: MA Experiment 20000182 PARAMETER Experiment Name: At_2mM_SA_P Parameter: Age (day) Value: 14
  misc_feature: MA Experiment 20000182 PARAMETER Experiment Name: At_2mM_SA_P Parameter: Organism Value: A. thaliana
  misc_feature: MA Experiment 20000182 PARAMETER Experiment Name: At_2mM_SA_P Parameter: Plant Line Value: WS
  misc_feature: MA Experiment 20000182 PARAMETER Experiment Name: At_2mM_SA_P Parameter: Timepoint (hr) Value: 6
  misc_feature: MA Experiment 20000182 PARAMETER Experiment Name: At_2mM_SA_P Parameter: Tissue Value: Aerial
  misc_feature: MA Experiment 20000182 PARAMETER Experiment Name: At_2mM_SA_P Parameter: Treatment Value: 2mM SA vs. No Treatment
  misc_feature: MA Experiment ID: 20000496 Result: Up-regulated in Transcription
  misc_feature: MA Experiment 20000496 PARAMETER Experiment Name: At_Guard_Cells_P Parameter: Harvest Date Value: 7/19/2002
  misc_feature: MA Experiment 20000496 PARAMETER Experiment Name: At_Guard_Cells_P Parameter: Organism Value: Canola
  misc_feature: MA Experiment 20000496 PARAMETER Experiment Name: At_Guard_Cells_P Parameter: Tissue Value: Guard Cells vs. Leaves
taacatagatatctgaaatttccctcgatttgattagtgggatcaccaataccaagataaaatctgaagtttagttcattgactcaatagtatttgagtcttggggctcgaaatgattttgattttgatttcttaccgatcttcgagtttccaaagctaagcacttttatcaaatttagggtctttttacttttccaaattatatttttctgtttttggggacgaatttggctttctttctatataacccgcgagcgagacagagaccttgaccctcacctaaacctcaaaaaccaaattttgaccccaaaagccatctcttttagcaatcagattactttgaaactttctctgggtatctgagatttcttcattatttatataaatcatctaatcgaaatctactgcgacgatcggcgaagaatcggaaacacaaaaatggggtgttgcgcgagcaatacagctggtggttcaaaggctaatcggatctcacgctggcgatctacaggcattgttggtctccgcgactccaaattgaagacatttcctgatgaagtgattgaaatggagagagcagtgcgaacacttgatctaacacacaataagattgctgatgttcctggagaaatcagcaagttaatcaatatgcagcgtctgttaatagctgataatctagttgagcgccttccggggaatctagggaagcttcaatctctcaaagttttgatgcttgatggaaaccgcatcagctgtttgcctgatgaattgggccagttggtaaggcttgagcaactatcaatctcaagaaatatgctcatatacttgcccgatactattggtagtctccgcaatctactgctgttgaatgtctcaaataacagattgaaatcccttcctgaatcagtagggagctgtgcttctttagaagaagtacaggctaatgccttgcagataacgttgttgaagagcttcctgcatcactctgcaatctgattcagttaaagtcgctttccttagacaataatcaagtgaaccagattccagatggattgctgatacattgcaagagtctgcaaaacctttctttgcataacaatcctatttccatggatcagtttcagctgatggaaggataccaagactttgaagagaggagaaagaagaaatttgataagcaaatcgattcgaatgtgatgatgggctctaaagcacttgatgtaggcgttgataaatgaaaactgtcttcacatctccttactttgtcggttcggtgaatgaggatcatcgtttcgtgtaagaaatattgttgtaaaactctctctctctctttctctcgtctgcaagatttagaatctctgttactgtcacaccaattcttatgaacacatacatatgtacgtttgtatactctatcaaggcgtgtctgtatatgtatatgtgcgtgtgtgtatacaaatcatataggcagaccgattcttggctttggcccttatattgagatgacgattctacttc

SEQ ID NO: 30244 - protein, 184 aa, Arabidopsis thaliana
  peptide (1)..(184): Ceres Seq. ID no. 12334770
  misc_feature (28)..(174): Homolog of NCBI NO: 24215147 NR Description: putative outermembrane protein
  misc_feature (15)..(173): Homolog of NCBI NO: 24215150 NR Description: putative outermembrane protein
  misc_feature (25)..(175): Homolog of NCBI NO: 24215152 NR Description: Leucine-rich repeat containing protein
  misc_feature (28)..(175): Homolog of NCBI NO: 24216021 NR Description: Leucine-rich repeat containing protein
  misc_feature (25)..(175): Homolog of NCBI NO: 24216021 NR Description: Leucine-rich repeat containing protein
  misc_feature (15)..(169): Homolog of NCBI NO: 7445541 NR Description: hypothetical protein At2g30100 [imported] -
  misc_feature (15)..(169): Homolog of NCBI NO: 30684470 NR Description: unknown protein, leucine-rich repeat -related
  misc_feature (1)..(181): Homolog of NCBI NO: 37534990 NR Description: putative leucine-rich repeat protein
  misc_feature (1)..(168): Homolog of NCBI NO: 11357392 NR Description: hypothetical protein F13G24.110 - Arabidopsis
  misc_feature (1)..(168): Homolog of NCBI NO: 22326653 NR Description: putative protein
MGCCASNTAGGSKANRISRWRSTGIVGLRDSKLKTFPDEVIEMERAVRTLDLTHNKIADVPGEISKLINMQRLLIADNLVERLPGNLGKLQSLKVLMLDGNRISCLPDELGQLVRLEQLSISRNMLIYLPDTIGSLRNLLLLNVSNNRLKSLPESVGSCASLEEVQANALQITLLKSFLHHSAI

SEQ ID NO: 30245 - protein, 142 aa, Arabidopsis thaliana
  peptide (1)..(142): Ceres Seq. ID no. 12334771
  misc_feature (1)..(132): Homolog of NCBI NO: 24215147 NR Description: putative outermembrane protein
  misc_feature (1)..(131): Homolog of NCBI NO: 24215150 NR Description: putative outermembrane protein
  misc_feature (1)..(133): Homolog of NCBI NO: 24215152 NR Description: Leucine-rich repeat containing protein
  misc_feature (1)..(133): Homolog of NCBI NO: 24216021 NR Description: Leucine-rich repeat containing protein
  misc_feature (1)..(133): Homolog of NCBI NO: 24216021 NR Description: Leucine-rich repeat containing protein
  misc_feature (1)..(127): Homolog of NCBI NO: 7445541 NR Description: hypothetical protein At2g30100 [imported] -
  misc_feature (1)..(127): Homolog of NCBI NO: 30684470 NR Description: unknown protein, leucine-rich repeat -related
  misc_feature (1)..(139): Homolog of NCBI NO: 37534990 NR Description: putative leucine-rich repeat protein
  misc_feature (1)..(126): Homolog of NCBI NO: 11357392 NR Description: hypothetical protein F13G24.110 - Arabidopsis
  misc_feature (1)..(126): Homolog of NCBI NO: 22326653 NR Description: putative protein
MERAVRTLDLTHNKIADVPGEISKLINMQRLLIADNLVERLPGNLGKLQSLKVLMLDGNRISCLPDELGQLVRLEQLSISRNMLIYLPDTIGSLRNLLLLNVSNNRLKSLPESVGSCASLEEVQANALQITLLKSFLHHSAI

SEQ ID NO: 30246 - protein, 115 aa, Arabidopsis thaliana
  peptide (1)..(115): Ceres Seq. ID no. 12334772
  misc_feature (1)..(105): Homolog of NCBI NO: 24215147 NR Description: putative outermembrane protein
  misc_feature (1)..(104): Homolog of NCBI NO: 24215150 NR Description: putative outermembrane protein
  misc_feature (1)..(106): Homolog of NCBI NO: 24215152 NR Description: Leucine-rich repeat containing protein
  misc_feature (1)..(106): Homolog of NCBI NO: 24216021 NR Description: Leucine-rich repeat containing protein
  misc_feature (1)..(106): Homolog of NCBI NO: 24216021 NR Description: Leucine-rich repeat containing protein
  misc_feature (1)..(100): Homolog of NCBI NO: 7445541 NR Description: hypothetical protein At2g30100 [imported] -
  misc_feature (1)..(100): Homolog of NCBI NO: 30684470 NR Description: unknown protein, leucine-rich repeat -related
  misc_feature (1)..(112): Homolog of NCBI NO: 37534990 NR Description: putative leucine-rich repeat protein
  misc_feature (1)..(99): Homolog of NCBI NO: 11357392 NR Description: hypothetical protein F13G24.110 - Arabidopsis
  misc_feature (1)..(99): Homolog of NCBI NO: 22326653 NR Description: putative protein
MQRLLIADNLVERLPGNLGKLQSLKVLMLDGNRISCLPDELGQLVRLEQLSISRNMLIYLPDTIGSLRNLLLLNVSNNRLKSLPESVGSCASLEEVQANALQITLLKSFLHHSAI

SEQ ID NO: 30247 - DNA, 1758 bp, Arabidopsis thaliana
  misc_feature (1)..(1758): Ceres Seq. ID no. 12324212
  misc_feature: MA Experiment ID: 108433 Result: Down-regulated in Transcription
  misc_feature: MA Experiment 108433 PARAMETER Experiment Name: At_rhl_Mutant2_cDNA_P Parameter: Age (day) Value: 7
  misc_feature: MA Experiment 108433 PARAMETER Experiment Name: At_rhl_Mutant2_cDNA_P Parameter: Organism Value: A. thaliana
  misc_feature: MA Experiment 108433 PARAMETER Experiment Name: At_rhl_Mutant2_cDNA_P Parameter: Plant Line Value: rhl Mutant vs. wt landsburg
  misc_feature: MA Experiment 108433 PARAMETER Experiment Name: At_rhl_Mutant2_cDNA_P Parameter: Tissue Value: Roots
  misc_feature: MA Experiment ID: 108462 Result: Up-regulated in Transcription
  misc_feature: MA Experiment 108462 PARAMETER Experiment Name: At_Germinating_Seeds_cDNA_P Parameter: Age (day) Value: 2 vs. 0
  misc_feature: MA Experiment 108462 PARAMETER Experiment Name: At_Germinating_Seeds_cDNA_P Parameter: Tissue Value: Germinating Seeds
  misc_feature: MA Experiment ID: 108463 Result: Up-regulated in Transcription
  misc_feature: MA Experiment 108463 PARAMETER Experiment Name: At_Germinating_Seeds_cDNA_P Parameter: Age (day) Value: 3 vs. 0
  misc_feature: MA Experiment 108463 PARAMETER Experiment Name: At_Germinating_Seeds_cDNA_P Parameter: Tissue Value: Germinating Seeds
  misc_feature: MA Experiment ID: 108464 Result: Up-regulated in Transcription
  misc_feature: MA Experiment 108464 PARAMETER Experiment Name: At_Germinating_Seeds_cDNA_P Parameter: Age (day) Value: 4 vs. 0
  misc_feature: MA Experiment 108464 PARAMETER Experiment Name: At_Germinating_Seeds_cDNA_P Parameter: Tissue Value: Germinating Seeds
  misc_feature: MA Experiment ID: 108577 Result: Down-regulated in Transcription
  misc_feature: MA Experiment 108577 PARAMETER Experiment Name: At_42deg_Heat_cDNA_P Parameter: Temperature (deg C) Value: 42 vs. 22
  misc_feature: MA Experiment 108577 PARAMETER Experiment Name: At_42deg_Heat_cDNA_P Parameter: Timepoint (hr) Value: 6
  misc_feature: MA Experiment 108577 PARAMETER Experiment Name: At_42deg_Heat_cDNA_P Parameter: Tissue Value: Aerial
  misc_feature: MA Experiment ID: 108579 Result: Down-regulated in Transcription
  misc_feature: MA Experiment 108579 PARAMETER Experiment Name: At_4deg_Cold_cDNA_P Parameter: Temperature (deg C) Value: 4 vs. 22
  misc_feature: MA Experiment 108579 PARAMETER Experiment Name: At_4deg_Cold_cDNA_P Parameter: Timepoint (hr) Value: 6
  misc_feature: MA Experiment 108579 PARAMETER Experiment Name: At_4deg_Cold_cDNA_P Parameter: Tissue Value: Aerial
  misc_feature: MA Experiment ID: 20000090 Result: Down-regulated in Transcription
  misc_feature: MA Experiment ID: 20000173 Result: Down-regulated in Transcription
  misc_feature: MA Experiment 20000173 PARAMETER Experiment Name: At_42deg_Heat_P Parameter: Age (day) Value: 14
  misc_feature: MA Experiment 20000173 PARAMETER Experiment Name: At_42deg_Heat_P Parameter: Organism Value: A. thaliana
  misc_feature: MA Experiment 20000173 PARAMETER Experiment Name: At_42deg_Heat_P Parameter: Plant Line Value: WS
  misc_feature: MA Experiment 20000173 PARAMETER Experiment Name: At_42deg_Heat_P Parameter: Temperature (deg C) Value: 42 vs. 22
  misc_feature: MA Experiment 20000173 PARAMETER Experiment Name: At_42deg_Heat_P Parameter: Timepoint (hr) Value: 6
  misc_feature: MA Experiment 20000173 PARAMETER Experiment Name: At_42deg_Heat_P Parameter: Tissue Value: Aerial
  misc_feature: MA Experiment ID: 20000214 Result: Down-regulated in Transcription
  misc_feature: MA Experiment 20000214 PARAMETER Experiment Name: At_4deg_Cold_P Parameter: Timepoint (hr) Value: 6
  misc_feature: MA Experiment ID: 20001450 Result: Up-regulated in Transcription
  misc_feature: MA Experiment 20001450 PARAMETER Experiment Name: At_Far-red-induction_P Parameter: Age (day) Value: 7
  misc_feature: MA Experiment 20001450 PARAMETER Experiment Name: At_Far-red-induction_P Parameter: Light Value: Far-red vs. White
  misc_feature: MA Experiment 20001450 PARAMETER Experiment Name: At_Far-red-induction_P Parameter: Organism Value: A. thaliana
  misc_feature: MA Experiment 20001450 PARAMETER Experiment Name: At_Far-red-induction_P Parameter: Plant Line Value: Columbia
  misc_feature: MA Experiment 20001450 PARAMETER Experiment Name: At_Far-red-induction_P Parameter: Timepoint (hr) Value: 8
  misc_feature: MA Experiment 20001450 PARAMETER Experiment Name: At_Far-red-induction_P Parameter: Tissue Value: Whole Plant
  misc_feature: MA Experiment ID: 20001451 Result: Up-regulated in Transcription
  misc_feature: MA Experiment 20001451 PARAMETER Experiment Name: At_Far-red-induction_P Parameter: Age (day) Value: 7
  misc_feature: MA Experiment 20001451 PARAMETER Experiment Name: At_Far-red-induction_P Parameter: Light Value: Far-red vs. White
  misc_feature: MA Experiment 20001451 PARAMETER Experiment Name: At_Far-red-induction_P Parameter: Organism Value: A. thaliana
  misc_feature: MA Experiment 20001451 PARAMETER Experiment Name: At_Far-red-induction_P Parameter: Plant Line Value: Columbia
  misc_feature: MA Experiment 20001451 PARAMETER Experiment Name: At_Far-red-induction_P Parameter: Timepoint (hr) Value: 24
  misc_feature: MA Experiment 20001451 PARAMETER Experiment Name: At_Far-red-induction_P Parameter: Tissue Value: Whole Plant
  misc_feature: MA Experiment ID: 20001555 Result: Down-regulated in Transcription
  misc_feature: MA Experiment 20001555 PARAMETER Experiment Name: At_Drought_Soil_Dry_P Parameter: Age (day) Value: 24
  misc_feature: MA Experiment 20001555 PARAMETER Experiment Name: At_Drought_Soil_Dry_P Parameter: Organism Value: A. thaliana
  misc_feature: MA Experiment 20001555 PARAMETER Experiment Name: At_Drought_Soil_Dry_P Parameter: Plant Line Value: WS
  misc_feature: MA Experiment 20001555 PARAMETER Experiment Name: At_Drought_Soil_Dry_P Parameter: Post Timepoint (hr) Value: None
  misc_feature: MA Experiment 20001555 PARAMETER Experiment Name: At_Drought_Soil_Dry_P Parameter: Post-Treatment Value: None
  misc_feature: MA Experiment 20001555 PARAMETER Experiment Name: At_Drought_Soil_Dry_P Parameter: Timepoint (day) Value: 10
  misc_feature: MA Experiment 20001555 PARAMETER Experiment Name: At_Drought_Soil_Dry_P Parameter: Treatment Value: Drought vs. No Drought
  misc_feature: MA Experiment ID: 20001556 Result: Down-regulated in Transcription
  misc_feature: MA Experiment 20001556 PARAMETER Experiment Name: At_Drought_Soil_Dry_P Parameter: Age (day) Value: 26
  misc_feature: MA Experiment 20001556 PARAMETER Experiment Name: At_Drought_Soil_Dry_P Parameter: Organism Value: A. thaliana
  misc_feature: MA Experiment 20001556 PARAMETER Experiment Name: At_Drought_Soil_Dry_P Parameter: Plant Line Value: WS
  misc_feature: MA Experiment 20001556 PARAMETER Experiment Name: At_Drought_Soil_Dry_P Parameter: Post Timepoint (hr) Value: None
  misc_feature: MA Experiment 20001556 PARAMETER Experiment Name: At_Drought_Soil_Dry_P Parameter: Post-Treatment Value: None
  misc_feature: MA Experiment 20001556 PARAMETER Experiment Name: At_Drought_Soil_Dry_P Parameter: Timepoint (day) Value: 12
  misc_feature: MA Experiment 20001556 PARAMETER Experiment Name: At_Drought_Soil_Dry_P Parameter: Treatment Value: Drought vs. No Drought
  misc_feature: MA Experiment ID: 20001557 Result: Down-regulated in Transcription
  misc_feature: MA Experiment 20001557 PARAMETER Experiment Name: At_Drought_Soil_Dry_P Parameter: Age (day) Value: 27
  misc_feature: MA Experiment 20001557 PARAMETER Experiment Name: At_Drought_Soil_Dry_P Parameter: Organism Value: A. thaliana
  misc_feature: MA Experiment 20001557 PARAMETER Experiment Name: At_Drought_Soil_Dry_P Parameter: Plant Line Value: WS
  misc_feature: MA Experiment 20001557 PARAMETER Experiment Name: At_Drought_Soil_Dry_P Parameter: Post Timepoint (hr) Value: 3
  misc_feature: MA Experiment 20001557 PARAMETER Experiment Name: At_Drought_Soil_Dry_P Parameter: Post-Treatment Value: Re-Water vs. No Drought
  misc_feature: MA Experiment 20001557 PARAMETER Experiment Name: At_Drought_Soil_Dry_P Parameter: Timepoint (day) Value: 13
  misc_feature: MA Experiment 20001557 PARAMETER Experiment Name: At_Drought_Soil_Dry_P Parameter: Treatment Value: Drought vs. No Drought
  misc_feature: MA Experiment ID: 20001559 Result: Down-regulated in Transcription
  misc_feature: MA Experiment 20001559 PARAMETER Experiment Name: At_Drought_Soil_Dry_P Parameter: Age (day) Value: 28
  misc_feature: MA Experiment 20001559 PARAMETER Experiment Name: At_Drought_Soil_Dry_P Parameter: Organism Value: A. thaliana
  misc_feature: MA Experiment 20001559 PARAMETER Experiment Name: At_Drought_Soil_Dry_P Parameter: Plant Line Value: WS
  misc_feature: MA Experiment 20001559 PARAMETER Experiment Name: At_Drought_Soil_Dry_P Parameter: Post Timepoint (hr) Value: 29
  misc_feature: MA Experiment 20001559 PARAMETER Experiment Name: At_Drought_Soil_Dry_P Parameter: Post-Treatment Value: Re-Water vs. No Drought
  misc_feature: MA Experiment 20001559 PARAMETER Experiment Name: At_Drought_Soil_Dry_P Parameter: Timepoint (day) Value: 14
  misc_feature: MA Experiment 20001559 PARAMETER Experiment Name: At_Drought_Soil_Dry_P Parameter: Treatment Value: Drought vs. No Drought
cttcctctggtctttttttcttttgttgcgacttttcttcttcttcttcctcaggaacttaagtttctgagtccatgaagatgccagtggcattggtctggctactggcattcactattctactgatcagtggggaaggcaataatgccatctgcaaggagaattttaagttagaccctagacctcatagtgtttcgatcctcgagtttggagcggttggtgatgggaagacgctcaacactattgctttccagaacgctgttttctatctcaagtcttttgcggataaaggcggtgctcagctttatgttccaccagggaaatggctcaccggaagcttcaatctcacaagccatctcactctcttcttggagaaaggagcaacaattcttgcatcaccggatccgtcgcattgggacgttgtcagtcctctaccgtcctatggtcgcggaattgaacttcctggaaagcggtacagaagtttgatcaatggagacaatctaatagacgtagtcatcaccggtgaaaatgggacatttgacggtcaaggtgcggcatggtgggagtggcttgagtccgggtccttgaactatagccgacctcatatcatcgaattcgtctcctctaaacacatcctcatatcgaatctaaccttcttaaacgcgcccgcaatcaacattcaccctgtttattgcagtcagattcatatccgcaaagttttgatcgaaacatccgttgattctccccacgttcttggagttgccccagattcttcggacaatgtttgtatcgaggactcaacaatcaacgttggccacgacgcggtttctctcaagagtggttgggaccaatacggtatacactacggccgtccaaccaccgctgttcatattcggaatctcagattaaagtctcccaccggtgctggaatctccttcgggagcgagatgtcaggcggagtctcggatgtgaccgttgagcgtcttaacatacacagctcactcataggtgtagccttcagaaccaccagaggcagaggaggatacatccgtaatatcacaatctccgacgtcgatctcacaagcgttgacacagccatagtagccaacggacacaccgggtcacacccggatgataaattcgaccgggacgcactcccagtcgtgacacacattgttatgcggaatttcaccggagttgatataggagtagccgggaatctcaccgggatcggagaatctcccttcacgtcgatatgcctcgcggatattcatttacaaacgcgatcagaagaatcttggatatgctccaacgtctctggtttctcagacgacgtatcaccggagccttgtcaagaactcatgagttctccttcgtcttgcttcgccggtggtagcatatacgagggtgatgcgacggctcagtcgtattacagttggtaattatagtaaaataaaatggtgatgaagaagaagaagaagaaaaagaagaagagagtgcatgaggttacgatacgattggattttcgaattttttttgtcaataagttcataaaatttgttgtcagagagcgagaggaagaagataaaaaaagaaaaattacgttttaaggtggtgagtttcaagaacagagcgagcttttctattgtattaatgtacagcttccatttctttcattcatggtgtaacaaaattcatctttttttctttctgtgaagaagaaaataaaaaattatatgtgaaatgattagttatggc

SEQ ID NO: 30248 - protein, 455 aa, Arabidopsis thaliana
  peptide (1)..(455): Ceres Seq. ID no. 12324213
  misc_feature (72)..(426): Pfam Name: Glycosyl hydrolases family 28 Pfam Description: Glycosyl hydrolases family 28
  misc_feature (22)..(437): Homolog of NCBI NO: 11263971 NR Description: hypothetical protein T17J13.70 - Arabidopsis
  misc_feature (22)..(437): Homolog of NCBI NO: 18412253 NR Description: polygalacturonase, putative
  misc_feature (1)..(441): Homolog of NCBI NO: 40714685 NR Description: putative polygalacturonase
  misc_feature (68)..(429): Homolog of NCBI NO: 21593399 NR Description: polygalacturonase-like protein [Arabidopsis
  misc_feature (68)..(429): Homolog of NCBI NO: 18397713 NR Description: polygalacturonase, putative
  misc_feature (1)..(434): Homolog of NCBI NO: 22327662 NR Description: Expressed protein
  misc_feature (3)..(429): Homolog of NCBI NO: 30679999 NR Description: polygalacturonase, putative [Arabidopsis
  misc_feature (3)..(455): Homolog of NCBI NO: 7939578 NR Description: polygalacturonase-like protein [Arabidopsis
  misc_feature (3)..(455): Homolog of NCBI NO: 21553827 NR Description: polygalacturonase, putative [Arabidopsis thaliana]
  misc_feature (1)..(455): Homolog of NCBI NO: 15228881 NR Description: polygalacturonase, putative
MKMPVALVWLLAFTILLISGEGNNAICKENFKLDPRPHSVSILEFGAVGDGKTLNTIAFQNAVFYLKSFADKGGAQLYVPPGKWLTGSFNLTSHLTLFLEKGATILASPDPSHWDVVSPLPSYGRGIELPGKRYRSLINGDNLIDVVITGENGTFDGQGAAWWEWLESGSLNYSRPHIIEFVSSKHILISNLTFLNAPAINIHPVYCSQIHIRKVLIETSVDSPHVLGVAPDSSDNVCIEDSTINVGHDAVSLKSGWDQYGIHYGRPTTAVHIRNLRLKSPTGAGISFGSEMSGGVSDVTVERLNIHSSLIGVAFRTTRGRGGYIRNITISDVDLTSVDTAIVANGHTGSHPDDKFDRDALPVVTHIVMRNFTGVDIGVAGNLTGIGESPFTSICLADIHLQTRSEESWICSNVSGFSDDVSPEPCQELMSSPSSCFAGGSIYEGDATAQSYYSW

SEQ ID NO: 30249 - protein, 453 aa, Arabidopsis thaliana
  peptide (1)..(453): Ceres Seq. ID no. 12324214
  misc_feature (70)..(424): Pfam Name: Glycosyl hydrolases family 28 Pfam Description: Glycosyl hydrolases family 28
  misc_feature (20)..(435): Homolog of NCBI NO: 11263971 NR Description: hypothetical protein T17J13.70 - Arabidopsis
  misc_feature (20)..(435): Homolog of NCBI NO: 18412253 NR Description: polygalacturonase, putative
  misc_feature (1)..(439): Homolog of NCBI NO: 40714685 NR Description: putative polygalacturonase
  misc_feature (66)..(427): Homolog of NCBI NO: 21593399 NR Description: polygalacturonase-like protein [Arabidopsis
  misc_feature (66)..(427): Homolog of NCBI NO: 18397713 NR Description: polygalacturonase, putative
  misc_feature (1)..(432): Homolog of NCBI NO: 22327662 NR Description: Expressed protein
  misc_feature (1)..(427): Homolog of NCBI NO: 30679999 NR Description: polygalacturonase, putative [Arabidopsis
  misc_feature (1)..(453): Homolog of NCBI NO: 7939578 NR Description: polygalacturonase-like protein [Arabidopsis
  misc_feature (1)..(453): Homolog of NCBI NO: 21553827 NR Description: polygalacturonase, putative [Arabidopsis thaliana]
  misc_feature (1)..(453): Homolog of NCBI NO: 15228881 NR Description: polygalacturonase, putative
MPVALVWLLAFTILLISGEGNNAICKENFKLDPRPHSVSILEFGAVGDGKTLNTIAFQNAVFYLKSFADKGGAQLYVPPGKWLTGSFNLTSHLTLFLEKGATILASPDPSHWDVVSPLPSYGRGIELPGKRYRSLINGDNLIDVVITGENGTFDGQGAAWWEWLESGSLNYSRPHIIEFVSSKHILISNLTFLNAPAINIHPVYCSQIHIRKVLIETSVDSPHVLGVAPDSSDNVCIEDSTINVGHDAVSLKSGWDQYGIHYGRPTTAVHIRNLRLKSPTGAGISFGSEMSGGVSDVTVERLNIHSSLIGVAFRTTRGRGGYIRNITISDVDLTSVDTAIVANGHTGSHPDDKFDRDALPVVTHIVMRNFTGVDIGVAGNLTGIGESPFTSICLADIHLQTRSEESWICSNVSGFSDDVSPEPCQELMSSPSSCFAGGSIYEGDATAQSYYSW

SEQ ID NO: 30250 - DNA, 1235 bp, Arabidopsis thaliana
  misc_feature (1)..(1235): Ceres Seq. ID no. 12371716
  misc_feature: MA Experiment ID: 108668 Result: Up-regulated in Transcription
  misc_feature: MA Experiment 108668 PARAMETER Experiment Name: At_2mM_SA_cDNA_P Parameter: Plant Line Value: WS
  misc_feature: MA Experiment 108668 PARAMETER Experiment Name: At_2mM_SA_cDNA_P Parameter: Timepoint (hr) Value: 6
  misc_feature: MA Experiment 108668 PARAMETER Experiment Name: At_2mM_SA_cDNA_P Parameter: Treatment Value: 2mM SA vs. No Treatment
  misc_feature: MA Experiment ID: 20000072 Result: Up-regulated in Transcription
  misc_feature: MA Experiment 20000072 PARAMETER Experiment Name: At_100uM_ABA_Mutants_cDNA_P Parameter: Plant Line Value: CS8105
  misc_feature: MA Experiment 20000072 PARAMETER Experiment Name: At_100uM_ABA_Mutants_cDNA_P Parameter: Timepoint (hr) Value: 6
  misc_feature: MA Experiment 20000072 PARAMETER Experiment Name: At_100uM_ABA_Mutants_cDNA_P Parameter: Tissue Value: Aerial
  misc_feature: MA Experiment 20000072 PARAMETER Experiment Name: At_100uM_ABA_Mutants_cDNA_P Parameter: Treatment Value: 100uM ABA vs. No Treatment
  misc_feature: MA Experiment ID: 20000171 Result: Down-regulated in Transcription
  misc_feature: MA Experiment 20000171 PARAMETER Experiment Name: At_42deg_Heat_P Parameter: Age (day) Value: 14
  misc_feature: MA Experiment 20000171 PARAMETER Experiment Name: At_42deg_Heat_P Parameter: Organism Value: A. thaliana
  misc_feature: MA Experiment 20000171 PARAMETER Experiment Name: At_42deg_Heat_P Parameter: Plant Line Value: WS
  misc_feature: MA Experiment 20000171 PARAMETER Experiment Name: At_42deg_Heat_P Parameter: Temperature (deg C) Value: 42 vs. 22
  misc_feature: MA Experiment 20000171 PARAMETER Experiment Name: At_42deg_Heat_P Parameter: Timepoint (hr) Value: 1
  misc_feature: MA Experiment 20000171 PARAMETER Experiment Name: At_42deg_Heat_P Parameter: Tissue Value: Aerial
  misc_feature: MA Experiment ID: 20000173 Result: Down-regulated in Transcription
  misc_feature: MA Experiment 20000173 PARAMETER Experiment Name: At_42deg_Heat_P Parameter: Age (day) Value: 14
  misc_feature: MA Experiment 20000173 PARAMETER Experiment Name: At_42deg_Heat_P Parameter: Organism Value: A. thaliana
  misc_feature: MA Experiment 20000173 PARAMETER Experiment Name: At_42deg_Heat_P Parameter: Plant Line Value: WS
  misc_feature: MA Experiment 20000173 PARAMETER Experiment Name: At_42deg_Heat_P Parameter: Temperature (deg C) Value: 42 vs. 22
  misc_feature: MA Experiment 20000173 PARAMETER Experiment Name: At_42deg_Heat_P Parameter: Timepoint (hr) Value: 6
  misc_feature: MA Experiment 20000173 PARAMETER Experiment Name: At_42deg_Heat_P Parameter: Tissue Value: Aerial
  misc_feature: MA Experiment ID: 20000180 Result: Up-regulated in Transcription
  misc_feature: MA Experiment 20000180 PARAMETER Experiment Name: At_Germinating_Seeds_P Parameter: Age (hr) Value: 24 vs. 0
  misc_feature: MA Experiment 20000180 PARAMETER Experiment Name: At_Germinating_Seeds_P Parameter: Tissue Value: Germinating Seeds
  misc_feature: MA Experiment ID: 20000182 Result: Up-regulated in Transcription
  misc_feature: MA Experiment 20000182 PARAMETER Experiment Name: At_2mM_SA_P Parameter: Age (day) Value: 14
  misc_feature: MA Experiment 20000182 PARAMETER Experiment Name: At_2mM_SA_P Parameter: Organism Value: A. thaliana
  misc_feature: MA Experiment 20000182 PARAMETER Experiment Name: At_2mM_SA_P Parameter: Plant Line Value: WS
  misc_feature: MA Experiment 20000182 PARAMETER Experiment Name: At_2mM_SA_P Parameter: Timepoint (hr) Value: 6
  misc_feature: MA Experiment 20000182 PARAMETER Experiment Name: At_2mM_SA_P Parameter: Tissue Value: Aerial
  misc_feature: MA Experiment 20000182 PARAMETER Experiment Name: At_2mM_SA_P Parameter: Treatment Value: 2mM SA vs. No Treatment
  misc_feature: MA Experiment ID: 20000185 Result: Down-regulated in Transcription
  misc_feature: MA Experiment 20000185 PARAMETER Experiment Name: At_Roots__P Parameter: Age (day) Value: 7 vs. 21
  misc_feature: MA Experiment 20000185 PARAMETER Experiment Name: At_Roots__P Parameter: Organism Value: A. thaliana
  misc_feature: MA Experiment 20000185 PARAMETER Experiment Name: At_Roots__P Parameter: Tissue Value: Roots vs. Whole Plant
  misc_feature: MA Experiment ID: 20000213 Result: Up-regulated in Transcription
  misc_feature: MA Experiment 20000213 PARAMETER Experiment Name: At_4deg_Cold_P Parameter: Timepoint (hr) Value: 2
  misc_feature: MA Experiment ID: 20000227 Result: Up-regulated in Transcription
  misc_feature: MA Experiment 20000227 PARAMETER Experiment Name: At_Root-Tips-vs-Tops_P Parameter: Tissue Value: Root Tips vs. Root Tops
  misc_feature: MA Experiment ID: 20000265 Result: Down-regulated in Transcription
  misc_feature: MA Experiment 20000265 PARAMETER Experiment Name: At_Open_Flower_P Parameter: Age (day) Value: 21
  misc_feature: MA Experiment 20000265 PARAMETER Experiment Name: At_Open_Flower_P Parameter: Plant Line Value: WS
  misc_feature: MA Experiment 20000265 PARAMETER Experiment Name: At_Open_Flower_P Parameter: Tissue Value: Closed Flower vs. Whole Plant
  misc_feature: MA Experiment ID: 20000438 Result: Down-regulated in Transcription
  misc_feature: MA Experiment 20000438 PARAMETER Experiment Name: At_Shoots__P Parameter: Age (day) Value: 14
  misc_feature: MA Experiment 20000438 PARAMETER Experiment Name: At_Shoots__P Parameter: Tissue Value: Shoots vs. Whole Plant
  misc_feature: MA Experiment ID: 20000439 Result: Down-regulated in Transcription
  misc_feature: MA Experiment 20000439 PARAMETER Experiment Name: At_Roots__P Parameter: Age (day) Value: 14 vs. 21
  misc_feature: MA Experiment 20000439 PARAMETER Experiment Name: At_Roots__P Parameter: Organism Value: A. thaliana
  misc_feature: MA Experiment 20000439 PARAMETER Experiment Name: At_Roots__P Parameter: Tissue Value: Roots vs. Whole Plant
  misc_feature: MA Experiment ID: 20000455 Result: Down-regulated in Transcription
  misc_feature: MA Experiment 20000455 PARAMETER Experiment Name: At_100uM_ABA_P Parameter: Age (day) Value: 16
  misc_feature: MA Experiment 20000455 PARAMETER Experiment Name: At_100uM_ABA_P Parameter: Organism Value: A. thaliana
  misc_feature: MA Experiment 20000455 PARAMETER Experiment Name: At_100uM_ABA_P Parameter: Plant Line Value: WS
  misc_feature: MA Experiment 20000455 PARAMETER Experiment Name: At_100uM_ABA_P Parameter: Timepoint (hr) Value: 48
  misc_feature: MA Experiment 20000455 PARAMETER Experiment Name: At_100uM_ABA_P Parameter: Tissue Value: Aerial
  misc_feature: MA Experiment 20000455 PARAMETER Experiment Name: At_100uM_ABA_P Parameter: Treatment Value: 100uM ABA vs. No Treatment
  misc_feature: MA Experiment ID: 20000460 Result: Up-regulated in Transcription
  misc_feature: MA Experiment 20000460 PARAMETER Experiment Name: At_10percent_PEG_P Parameter: Age (day) Value: 12
  misc_feature: MA Experiment 20000460 PARAMETER Experiment Name: At_10percent_PEG_P Parameter: Organism Value: A. thaliana
  misc_feature: MA Experiment 20000460 PARAMETER Experiment Name: At_10percent_PEG_P Parameter: Plant Line Value: WS
  misc_feature: MA Experiment 20000460 PARAMETER Experiment Name: At_10percent_PEG_P Parameter: Timepoint (day) Value: 12
  misc_feature: MA Experiment 20000460 PARAMETER Experiment Name: At_10percent_PEG_P Parameter: Tissue Value: Whole Plant
  misc_feature: MA Experiment 20000460 PARAMETER Experiment Name: At_10percent_PEG_P Parameter: Treatment Value: 10percent PEG vs. No Treatment
  misc_feature: MA Experiment ID: 20000495 Result: Down-regulated in Transcription
  misc_feature: MA Experiment 20000495 PARAMETER Experiment Name: At_Guard_Cells_P Parameter: Harvest Date Value: 8/2/2002
  misc_feature: MA Experiment 20000495 PARAMETER Experiment Name: At_Guard_Cells_P Parameter: Organism Value: A. thaliana
  misc_feature: MA Experiment 20000495 PARAMETER Experiment Name: At_Guard_Cells_P Parameter: Tissue Value: Guard Cells vs. Leaves
  misc_feature: MA Experiment ID: 20000527 Result: Up-regulated in Transcription
  misc_feature: MA Experiment 20000527 PARAMETER Experiment Name: At_10percent_PEG_P Parameter: Age (day) Value: 20
  misc_feature: MA Experiment 20000527 PARAMETER Experiment Name: At_10percent_PEG_P Parameter: Organism Value: A. thaliana
  misc_feature: MA Experiment 20000527 PARAMETER Experiment Name: At_10percent_PEG_P Parameter: Plant Line Value: WS
  misc_feature: MA Experiment 20000527 PARAMETER Experiment Name: At_10percent_PEG_P Parameter: Timepoint (day) Value: 20
  misc_feature: MA Experiment 20000527 PARAMETER Experiment Name: At_10percent_PEG_P Parameter: Tissue Value: Whole Plant
  misc_feature: MA Experiment 20000527 PARAMETER Experiment Name: At_10percent_PEG_P Parameter: Treatment Value: 10percent PEG vs. No Treatment
  misc_feature: MA Experiment ID: 20000709 Result: Up-regulated in Transcription
  misc_feature: MA Experiment 20000709 PARAMETER Experiment Name: At_15mM_NH4NO3_L-to-H_P Parameter: Age (hr) Value: 14
  misc_feature: MA Experiment 20000709 PARAMETER Experiment Name: At_15mM_NH4NO3_L-to-H_P Parameter: Organism Value: A. thaliana
  misc_feature: MA Experiment 20000709 PARAMETER Experiment Name: At_15mM_NH4NO3_L-to-H_P Parameter: Plant Line Value: WS
  misc_feature: MA Experiment 20000709 PARAMETER Experiment Name: At_15mM_NH4NO3_L-to-H_P Parameter: Timepoint (hr) Value: 4
  misc_feature: MA Experiment 20000709 PARAMETER Experiment Name: At_15mM_NH4NO3_L-to-H_P Parameter: Tissue Value: Aerial
  misc_feature: MA Experiment 20000709 PARAMETER Experiment Name: At_15mM_NH4NO3_L-to-H_P Parameter: Treatment Value: 15mM NH4NO3 vs. 30mM Mannitol
  misc_feature: MA Experiment ID: 20001247 Result: Up-regulated in Transcription
  misc_feature: MA Experiment 20001247 PARAMETER Experiment Name: At_Far-red-induction_P Parameter: Age (day) Value: 7
  misc_feature: MA Experiment 20001247 PARAMETER Experiment Name: At_Far-red-induction_P Parameter: Light Value: Far-red vs. White
  misc_feature: MA Experiment 20001247 PARAMETER Experiment Name: At_Far-red-induction_P Parameter: Organism Value: A. thaliana
  misc_feature: MA Experiment 20001247 PARAMETER Experiment Name: At_Far-red-induction_P Parameter: Plant Line Value: Columbia
  misc_feature: MA Experiment 20001247 PARAMETER Experiment Name: At_Far-red-induction_P Parameter: Timepoint (hr) Value: 1
  misc_feature: MA Experiment 20001247 PARAMETER Experiment Name: At_Far-red-induction_P Parameter: Tissue Value: Whole Plant
  misc_feature: MA Experiment ID: 20001554 Result: Down-regulated in Transcription
  misc_feature: MA Experiment 20001554 PARAMETER Experiment Name: At_Drought_Soil_Dry_P Parameter: Age (day) Value: 21
  misc_feature: MA Experiment 20001554 PARAMETER Experiment Name: At_Drought_Soil_Dry_P Parameter: Organism Value: A. thaliana
  misc_feature: MA Experiment 20001554 PARAMETER Experiment Name: At_Drought_Soil_Dry_P Parameter: Plant Line Value: WS
  misc_feature: MA Experiment 20001554 PARAMETER Experiment Name: At_Drought_Soil_Dry_P Parameter: Post Timepoint (hr) Value: None
  misc_feature: MA Experiment 20001554 PARAMETER Experiment Name: At_Drought_Soil_Dry_P Parameter: Post-Treatment Value: None
  misc_feature: MA Experiment 20001554 PARAMETER Experiment Name: At_Drought_Soil_Dry_P Parameter: Timepoint (day) Value: 7
  misc_feature: MA Experiment 20001554 PARAMETER Experiment Name: At_Drought_Soil_Dry_P Parameter: Treatment Value: Drought vs. No Drought
  misc_feature: MA Experiment ID: 20001555 Result: Down-regulated in Transcription
  misc_feature: MA Experiment 20001555 PARAMETER Experiment Name: At_Drought_Soil_Dry_P Parameter: Age (day) Value: 24
  misc_feature: MA Experiment 20001555 PARAMETER Experiment Name: At_Drought_Soil_Dry_P Parameter: Organism Value: A. thaliana
  misc_feature: MA Experiment 20001555 PARAMETER Experiment Name: At_Drought_Soil_Dry_P Parameter: Plant Line Value: WS
  misc_feature: MA Experiment 20001555 PARAMETER Experiment Name: At_Drought_Soil_Dry_P Parameter: Post Timepoint (hr) Value: None
  misc_feature: MA Experiment 20001555 PARAMETER Experiment Name: At_Drought_Soil_Dry_P Parameter: Post-Treatment Value: None
  misc_feature: MA Experiment 20001555 PARAMETER Experiment Name: At_Drought_Soil_Dry_P Parameter: Timepoint (day) Value: 10
  misc_feature: MA Experiment 20001555 PARAMETER Experiment Name: At_Drought_Soil_Dry_P Parameter: Treatment Value: Drought vs. No Drought
  misc_feature: MA Experiment ID: 20001556 Result: Down-regulated in Transcription
  misc_feature: MA Experiment 20001556 PARAMETER Experiment Name: At_Drought_Soil_Dry_P Parameter: Age (day) Value: 26
  misc_feature: MA Experiment 20001556 PARAMETER Experiment Name: At_Drought_Soil_Dry_P Parameter: Organism Value: A. thaliana
  misc_feature: MA Experiment 20001556 PARAMETER Experiment Name: At_Drought_Soil_Dry_P Parameter: Plant Line Value: WS
  misc_feature: MA Experiment 20001556 PARAMETER Experiment Name: At_Drought_Soil_Dry_P Parameter: Post Timepoint (hr) Value: None
  misc_feature: MA Experiment 20001556 PARAMETER Experiment Name: At_Drought_Soil_Dry_P Parameter: Post-Treatment Value: None
  misc_feature: MA Experiment 20001556 PARAMETER Experiment Name: At_Drought_Soil_Dry_P Parameter: Timepoint (day) Value: 12
  misc_feature: MA Experiment 20001556 PARAMETER Experiment Name: At_Drought_Soil_Dry_P Parameter: Treatment Value: Drought vs. No Drought
  misc_feature: MA Experiment ID: 20001557 Result: Up-regulated in Transcription
  misc_feature: MA Experiment 20001557 PARAMETER Experiment Name: At_Drought_Soil_Dry_P Parameter: Age (day) Value: 27
  misc_feature: MA Experiment 20001557 PARAMETER Experiment Name: At_Drought_Soil_Dry_P Parameter: Organism Value: A. thaliana
  misc_feature: MA Experiment 20001557 PARAMETER Experiment Name: At_Drought_Soil_Dry_P Parameter: Plant Line Value: WS
  misc_feature: MA Experiment 20001557 PARAMETER Experiment Name: At_Drought_Soil_Dry_P Parameter: Post Timepoint (hr) Value: 3
  misc_feature: MA Experiment 20001557 PARAMETER Experiment Name: At_Drought_Soil_Dry_P Parameter: Post-Treatment Value: Re-Water vs. No Drought
  misc_feature: MA Experiment 20001557 PARAMETER Experiment Name: At_Drought_Soil_Dry_P Parameter: Timepoint (day) Value: 13
  misc_feature: MA Experiment 20001557 PARAMETER Experiment Name: At_Drought_Soil_Dry_P Parameter: Treatment Value: Drought vs. No Drought
  misc_feature: MA Experiment ID: 20001774 Result: Down-regulated in Transcription
  misc_feature: MA Experiment 20001774 PARAMETER Experiment Name: At_Far-red-enriched-adult_P Parameter: Age (day) Value: 31
  misc_feature: MA Experiment 20001774 PARAMETER Experiment Name: At_Far-red-enriched-adult_P Parameter: Light Value: Far-red enriched vs. White
  misc_feature: MA Experiment 20001774 PARAMETER Experiment Name: At_Far-red-enriched-adult_P Parameter: Organism Value: A. thaliana
  misc_feature: MA Experiment 20001774 PARAMETER Experiment Name: At_Far-red-enriched-adult_P Parameter: Plant Line Value: Columbia
  misc_feature: MA Experiment 20001774 PARAMETER Experiment Name: At_Far-red-enriched-adult_P Parameter: Timepoint (hr) Value: 72
  misc_feature: MA Experiment 20001774 PARAMETER Experiment Name: At_Far-red-enriched-adult_P Parameter: Tissue Value: Aerial
  misc_feature: MA Experiment ID: 20001905 Result: Up-regulated in Transcription
  misc_feature: MA Experiment 20001905 PARAMETER Experiment Name: At_Drought_Reproduction_P Parameter: Age (day) Value: 40
  misc_feature: MA Experiment 20001905 PARAMETER Experiment Name: At_Drought_Reproduction_P Parameter: Organism Value: A. thaliana
  misc_feature: MA Experiment 20001905 PARAMETER Experiment Name: At_Drought_Reproduction_P Parameter: Plant Line Value: WS
  misc_feature: MA Experiment 20001905 PARAMETER Experiment Name: At_Drought_Reproduction_P Parameter: Timepoint (day) Value: 10
  misc_feature: MA Experiment 20001905 PARAMETER Experiment Name: At_Drought_Reproduction_P Parameter: Tissue Value: Rosettes
  misc_feature: MA Experiment 20001905 PARAMETER Experiment Name: At_Drought_Reproduction_P Parameter: Treatment Value: Drought vs. No Drought
  misc_feature: MA Experiment ID: 20001911 Result: Down-regulated in Transcription
  misc_feature: MA Experiment 20001911 PARAMETER Experiment Name: At_Drought_Reproduction_P Parameter: Age (day) Value: 40
  misc_feature: MA Experiment 20001911 PARAMETER Experiment Name: At_Drought_Reproduction_P Parameter: Organism Value: A. thaliana
  misc_feature: MA Experiment 20001911 PARAMETER Experiment Name: At_Drought_Reproduction_P Parameter: Plant Line Value: WS
  misc_feature: MA Experiment 20001911 PARAMETER Experiment Name: At_Drought_Reproduction_P Parameter: Timepoint (day) Value: 10
  misc_feature: MA Experiment 20001911 PARAMETER Experiment Name: At_Drought_Reproduction_P Parameter: Tissue Value: Flowers
  misc_feature: MA Experiment 20001911 PARAMETER Experiment Name: At_Drought_Reproduction_P Parameter: Treatment Value: Drought vs. No Drought
attaagttctcttgatgatgtctggttcaagattagcctctagactaataatcatcttctcaataatctccacatctttcttcaccgttgaatcgattcgactattccctgattcattcgacgatgcatcttcagatttcatggaagctccagcatatcaaaacggtcttgattgctctgttttagccaaaaacagactcttgttagcttgtgatccatcagctgttcatatagctatgactctagatccagcttacttgcgtggcacggtatctgcagtacattccatcctcaaacacacttcttgccctgaaaacatcttcttccacttcattgcttcgggtacaagtcagggttccctcgccaagaccctatcctctgtttttccttctttgagtttcaaagtctatacctttgaagaaaccacggtcaagaatctaatctcttcttctataagacaagctcttgatagtcctttgaattacgcaagaagctacttatccgagattctttcttcgtgtgttagtcgagtgatttatctcgattcggatgtgattgtggtcgatgatattcagaaactatggaagatttctttatccgggtcaagaacaatcggtgcaccagagtattgccacgcaaatttcaccaaatacttcacagatagtttctggtccgatcgaaaactctcgagcgtcttcgattccaagactccttgttatttcaacacaggagtgatggttattgatttagagcggtggagagaaggagattacacgagaaagatcgaaaactggatgaagattcagaaagaagataagagaatctacgaattgggttctttaccaccgtttcttctagtgtttggtggtgatattgaagctattgatcatcaatggaaccaacacggtctcggtggagacaacattgtgagtagttgtagatctttgcatcctggtccggttagtttgatacattggagtggtaaagggaagccatgggttaggcttgatgatggtaagccttgtccaattgattatctttgggctccttatgatcttcacaagtcacagaggcagtatcttcaatacaatcaagagttagaaattctttgatttattcatttttgggggttttggtatggtaaattttgtgaactcattacatggattctatgttttttgttattccttttttaatgtacatacaacataaatacatcgaggattttgttcaag

SEQ ID NO: 30251 - protein, 365 aa, Arabidopsis thaliana
  peptide (1)..(365): Ceres Seq. ID no. 12371717
  misc_feature (41)..(348): Homolog of NCBI NO: 38346630 NR Description: OSJNBa0074L08.24 [Oryza sativa (japonica
  misc_feature (32)..(350): Homolog of NCBI NO: 15217851 NR Description: hypothetical protein; protein id: At1g02720.1
  misc_feature (9)..(350): Homolog of NCBI NO: 21554300 NR Description: putative glycosyl transferase [Arabidopsis
  misc_feature (9)..(350): Homolog of NCBI NO: 15235247 NR Description: predicted glycosyl transferase
  misc_feature (1)..(349): Homolog of NCBI NO: 11281926 NR Description: hypothetical protein F26K9.90 - Arabidopsis
  misc_feature (1)..(349): Homolog of NCBI NO: 22331906 NR Description: putative protein
  misc_feature (42)..(350): Homolog of NCBI NO: 15221684 NR Description: putative glycosyl transferase; protein id:
  misc_feature (33)..(353): Homolog of NCBI NO: 18409445 NR Description: expressed protein
  misc_feature (11)..(350): Homolog of NCBI NO: 12003394 NR Description: Avr9/Cf-9 rapidly elicited protein 231 [Nicotiana
  misc_feature (1)..(365): Homolog of NCBI NO: 30689156 NR Description: galactinol synthase, putative [Arabidopsis
MMSGSRLASRLIIIFSIISTSFFTVESIRLFPDSFDDASSDFMEAPAYQNGLDCSVLAKNRLLLACDPSAVHIAMTLDPAYLRGTVSAVHSILKHTSCPENIFFHFIASGTSQGSLAKTLSSVFPSLSFKVYTFEETTVKNLISSSIRQALDSPLNYARSYLSEILSSCVSRVIYLDSDVIVVDDIQKLWKISLSGSRTIGAPEYCHANFTKYFTDSFWSDRKLSSVFDSKTPCYFNTGVMVIDLERWREGDYTRKIENWMKIQKEDKRIYELGSLPPFLLVFGGDIEAIDHQWNQHGLGGDNIVSSCRSLHPGPVSLIHWSGKGKPWVRLDDGKPCPIDYLWAPYDLHKSQRQYLQYNQELEIL

SEQ ID NO: 30252 - protein, 364 aa, Arabidopsis thaliana
  peptide (1)..(364): Ceres Seq. ID no. 12371718
  misc_feature (40)..(347): Homolog of NCBI NO: 38346630 NR Description: OSJNBa0074L08.24 [Oryza sativa (japonica
  misc_feature (31)..(349): Homolog of NCBI NO: 15217851 NR Description: hypothetical protein; protein id: At1g02720.1
  misc_feature (8)..(349): Homolog of NCBI NO: 21554300 NR Description: putative glycosyl transferase [Arabidopsis
  misc_feature (8)..(349): Homolog of NCBI NO: 15235247 NR Description: predicted glycosyl transferase
  misc_feature (1)..(348): Homolog of NCBI NO: 11281926 NR Description: hypothetical protein F26K9.90 - Arabidopsis
  misc_feature (1)..(348): Homolog of NCBI NO: 22331906 NR Description: putative protein
  misc_feature (41)..(349): Homolog of NCBI NO: 15221684 NR Description: putative glycosyl transferase; protein id:
  misc_feature (32)..(352): Homolog of NCBI NO: 18409445 NR Description: expressed protein
  misc_feature (10)..(349): Homolog of NCBI NO: 12003394 NR Description: Avr9/Cf-9 rapidly elicited protein 231 [Nicotiana
  misc_feature (1)..(364): Homolog of NCBI NO: 30689156 NR Description: galactinol synthase, putative [Arabidopsis
MSGSRLASRLIIIFSIISTSFFTVESIRLFPDSFDDASSDFMEAPAYQNGLDCSVLAKNRLLLACDPSAVHIAMTLDPAYLRGTVSAVHSILKHTSCPENIFFHFIASGTSQGSLAKTLSSVFPSLSFKVYTFEETTVKNLISSSIRQALDSPLNYARSYLSEILSSCVSRVIYLDSDVIVVDDIQKLWKISLSGSRTIGAPEYCHANFTKYFTDSFWSDRKLSSVFDSKTPCYFNTGVMVIDLERWREGDYTRKIENWMKIQKEDKRIYELGSLPPFLLVFGGDIEAIDHQWNQHGLGGDNIVSSCRSLHPGPVSLIHWSGKGKPWVRLDDGKPCPIDYLWAPYDLHKSQRQYLQYNQELEIL

SEQ ID NO: 30253 - protein, 323 aa, Arabidopsis thaliana
  peptide (1)..(323): Ceres Seq. ID no. 12371719
  misc_feature (1)..(306): Homolog of NCBI NO: 38346630 NR Description: OSJNBa0074L08.24 [Oryza sativa (japonica
  misc_feature (1)..(308): Homolog of NCBI NO: 15217851 NR Description: hypothetical protein; protein id: At1g02720.1
  misc_feature (1)..(308): Homolog of NCBI NO: 21554300 NR Description: putative glycosyl transferase [Arabidopsis
  misc_feature (1)..(308): Homolog of NCBI NO: 15235247 NR Description: predicted glycosyl transferase
  misc_feature (1)..(307): Homolog of NCBI NO: 11281926 NR Description: hypothetical protein F26K9.90 - Arabidopsis
  misc_feature (1)..(307): Homolog of NCBI NO: 22331906 NR Description: putative protein
  misc_feature (1)..(308): Homolog of NCBI NO: 15221684 NR Description: putative glycosyl transferase; protein id:
  misc_feature (1)..(311): Homolog of NCBI NO: 18409445 NR Description: expressed protein
  misc_feature (1)..(308): Homolog of NCBI NO: 12003394 NR Description: Avr9/Cf-9 rapidly elicited protein 231 [Nicotiana
  misc_feature (1)..(323): Homolog of NCBI NO: 30689156 NR Description: galactinol synthase, putative [Arabidopsis
MEAPAYQNGLDCSVLAKNRLLLACDPSAVHIAMTLDPAYLRGTVSAVHSILKHTSCPENIFFHFIASGTSQGSLAKTLSSVFPSLSFKVYTFEETTVKNLISSSIRQALDSPLNYARSYLSEILSSCVSRVIYLDSDVIVVDDIQKLWKISLSGSRTIGAPEYCHANFTKYFTDSFWSDRKLSSVFDSKTPCYFNTGVMVIDLERWREGDYTRKIENWMKIQKEDKRIYELGSLPPFLLVFGGDIEAIDHQWNQHGLGGDNIVSSCRSLHPGPVSLIHWSGKGKPWVRLDDGKPCPIDYLWAPYDLHKSQRQYLQYNQELEIL

SEQ ID NO: 30254 - DNA, 1325 bp, Arabidopsis thaliana
  misc_feature (1)..(1325): Ceres Seq. ID no. 13500101
  misc_feature: MA Experiment ID: 108434 Result: Down-regulated in Transcription
  misc_feature: MA Experiment 108434 PARAMETER Experiment Name: At_Root_Tips_cDNA_P Parameter: Tissue Value: Root Tips
  misc_feature: MA Experiment ID: 108462 Result: Up-regulated in Transcription
  misc_feature: MA Experiment 108462 PARAMETER Experiment Name: At_Germinating_Seeds_cDNA_P Parameter: Age (day) Value: 2 vs. 0
  misc_feature: MA Experiment 108462 PARAMETER Experiment Name: At_Germinating_Seeds_cDNA_P Parameter: Tissue Value: Germinating Seeds
  misc_feature: MA Experiment ID: 108464 Result: Up-regulated in Transcription
  misc_feature: MA Experiment 108464 PARAMETER Experiment Name: At_Germinating_Seeds_cDNA_P Parameter: Age (day) Value: 4 vs. 0
  misc_feature: MA Experiment 108464 PARAMETER Experiment Name: At_Germinating_Seeds_cDNA_P Parameter: Tissue Value: Germinating Seeds
  misc_feature: MA Experiment ID: 108488 Result: Down-regulated in Transcription
  misc_feature: MA Experiment ID: 108573 Result: Up-regulated in Transcription
  misc_feature: MA Experiment 108573 PARAMETER Experiment Name: At_Drought_cDNA_P Parameter: Timepoint (hr) Value: 6
  misc_feature: MA Experiment 108573 PARAMETER Experiment Name: At_Drought_cDNA_P Parameter: Tissue Value: Aerial
  misc_feature: MA Experiment 108573 PARAMETER Experiment Name: At_Drought_cDNA_P Parameter: Treatment Value: Drought vs. No Drought
  misc_feature: MA Experiment ID: 108595 Result: Up-regulated in Transcription
  misc_feature: MA Experiment 108595 PARAMETER Experiment Name: At_Ler-pi_Ovule_cDNA_P Parameter: Plant Line Value: null
  misc_feature: MA Experiment ID: 20000072 Result: Up-regulated in Transcription
  misc_feature: MA Experiment 20000072 PARAMETER Experiment Name: At_100uM_ABA_Mutants_cDNA_P Parameter: Plant Line Value: CS8105
  misc_feature: MA Experiment 20000072 PARAMETER Experiment Name: At_100uM_ABA_Mutants_cDNA_P Parameter: Timepoint (hr) Value: 6
  misc_feature: MA Experiment 20000072 PARAMETER Experiment Name: At_100uM_ABA_Mutants_cDNA_P Parameter: Tissue Value: Aerial
  misc_feature: MA Experiment 20000072 PARAMETER Experiment Name: At_100uM_ABA_Mutants_cDNA_P Parameter: Treatment Value: 100uM ABA vs. No Treatment
  misc_feature: MA Experiment ID: 20000117 Result: Up-regulated in Transcription
  misc_feature: MA Experiment 20000117 PARAMETER Experiment Name: At_100uM_ABA_Mutants_cDNA_P Parameter: Plant Line Value: Columbia
  misc_feature: MA Experiment 20000117 PARAMETER Experiment Name: At_100uM_ABA_Mutants_cDNA_P Parameter: Timepoint (hr) Value: 6
  misc_feature: MA Experiment 20000117 PARAMETER Experiment Name: At_100uM_ABA_Mutants_cDNA_P Parameter: Tissue Value: Aerial
  misc_feature: MA Experiment 20000117 PARAMETER Experiment Name: At_100uM_ABA_Mutants_cDNA_P Parameter: Treatment Value: 100uM ABA vs. No Treatment
  misc_feature: MA Experiment ID: 20000308 Result: Up-regulated in Transcription
  misc_feature: MA Experiment 20000308 PARAMETER Experiment Name: At_100mM_NaCl__P Parameter: Age (day) Value: 17
  misc_feature: MA Experiment 20000308 PARAMETER Experiment Name: At_100mM_NaCl__P Parameter: Organism Value: A. thaliana
  misc_feature: MA Experiment 20000308 PARAMETER Experiment Name: At_100mM_NaCl__P Parameter: Plant Line Value: WS
  misc_feature: MA Experiment 20000308 PARAMETER Experiment Name: At_100mM_NaCl__P Parameter: Timepoint (hr) Value: 72
  misc_feature: MA Experiment 20000308 PARAMETER Experiment Name: At_100mM_NaCl__P Parameter: Tissue Value: Whole Plant
  misc_feature: MA Experiment 20000308 PARAMETER Experiment Name: At_100mM_NaCl__P Parameter: Treatment Value: 100mM NaCl vs. No Treatment
  misc_feature: MA Experiment ID: 20000438 Result: Down-regulated in Transcription
  misc_feature: MA Experiment 20000438 PARAMETER Experiment Name: At_Shoots__P Parameter: Age (day) Value: 14
  misc_feature: MA Experiment 20000438 PARAMETER Experiment Name: At_Shoots__P Parameter: Tissue Value: Shoots vs. Whole Plant
  misc_feature: MA Experiment ID: 20000453 Result: Up-regulated in Transcription
  misc_feature: MA Experiment 20000453 PARAMETER Experiment Name: At_100uM_ABA_P Parameter: Age (day) Value: 15
  misc_feature: MA Experiment 20000453 PARAMETER Experiment Name: At_100uM_ABA_P Parameter: Organism Value: A. thaliana
  misc_feature: MA Experiment 20000453 PARAMETER Experiment Name: At_100uM_ABA_P Parameter: Plant Line Value: WS
  misc_feature: MA Experiment 20000453 PARAMETER Experiment Name: At_100uM_ABA_P Parameter: Timepoint (hr) Value: 24
  misc_feature: MA Experiment 20000453 PARAMETER Experiment Name: At_100uM_ABA_P Parameter: Tissue Value: Aerial
  misc_feature: MA Experiment 20000453 PARAMETER Experiment Name: At_100uM_ABA_P Parameter: Treatment Value: 100uM ABA vs. No Treatment
  misc_feature: MA Experiment ID: 20000527 Result: Down-regulated in Transcription
  misc_feature: MA Experiment 20000527 PARAMETER Experiment Name: At_10percent_PEG_P Parameter: Age (day) Value: 20
  misc_feature: MA Experiment 20000527 PARAMETER Experiment Name: At_10percent_PEG_P Parameter: Organism Value: A. thaliana
  misc_feature: MA Experiment 20000527 PARAMETER Experiment Name: At_10percent_PEG_P Parameter: Plant Line Value: WS
  misc_feature: MA Experiment 20000527 PARAMETER Experiment Name: At_10percent_PEG_P Parameter: Timepoint (day) Value: 20
  misc_feature: MA Experiment 20000527 PARAMETER Experiment Name: At_10percent_PEG_P Parameter: Tissue Value: Whole Plant
  misc_feature: MA Experiment 20000527 PARAMETER Experiment Name: At_10percent_PEG_P Parameter: Treatment Value: 10percent PEG vs. No Treatment
  misc_feature: MA Experiment ID: 20001904 Result: Up-regulated in Transcription
  misc_feature: MA Experiment 20001904 PARAMETER Experiment Name: At_Drought_Reproduction_P Parameter: Age (day) Value: 37
  misc_feature: MA Experiment 20001904 PARAMETER Experiment Name: At_Drought_Reproduction_P Parameter: Organism Value: A. thaliana
  misc_feature: MA Experiment 20001904 PARAMETER Experiment Name: At_Drought_Reproduction_P Parameter: Plant Line Value: WS
  misc_feature: MA Experiment 20001904 PARAMETER Experiment Name: At_Drought_Reproduction_P Parameter: Timepoint (day) Value: 7
  misc_feature: MA Experiment 20001904 PARAMETER Experiment Name: At_Drought_Reproduction_P Parameter: Tissue Value: Rosettes
  misc_feature: MA Experiment 20001904 PARAMETER Experiment Name: At_Drought_Reproduction_P Parameter: Treatment Value: Drought vs. No Drought
  misc_feature: MA Experiment ID: 20001905 Result: Up-regulated in Transcription
  misc_feature: MA Experiment 20001905 PARAMETER Experiment Name: At_Drought_Reproduction_P Parameter: Age (day) Value: 40
  misc_feature: MA Experiment 20001905 PARAMETER Experiment Name: At_Drought_Reproduction_P Parameter: Organism Value: A. thaliana
  misc_feature: MA Experiment 20001905 PARAMETER Experiment Name: At_Drought_Reproduction_P Parameter: Plant Line Value: WS
  misc_feature: MA Experiment 20001905 PARAMETER Experiment Name: At_Drought_Reproduction_P Parameter: Timepoint (day) Value: 10
  misc_feature: MA Experiment 20001905 PARAMETER Experiment Name: At_Drought_Reproduction_P Parameter: Tissue Value: Rosettes
  misc_feature: MA Experiment 20001905 PARAMETER Experiment Name: At_Drought_Reproduction_P Parameter: Treatment Value: Drought vs. No Drought
  misc_feature: MA Experiment ID: 20001910 Result: Up-regulated in Transcription
  misc_feature: MA Experiment 20001910 PARAMETER Experiment Name: At_Drought_Reproduction_P Parameter: Age (day) Value: 37
  misc_feature: MA Experiment 20001910 PARAMETER Experiment Name: At_Drought_Reproduction_P Parameter: Organism Value: A. thaliana
  misc_feature: MA Experiment 20001910 PARAMETER Experiment Name: At_Drought_Reproduction_P Parameter: Plant Line Value: WS
  misc_feature: MA Experiment 20001910 PARAMETER Experiment Name: At_Drought_Reproduction_P Parameter: Timepoint (day) Value: 7
  misc_feature: MA Experiment 20001910 PARAMETER Experiment Name: At_Drought_Reproduction_P Parameter: Tissue Value: Flowers
  misc_feature: MA Experiment 20001910 PARAMETER Experiment Name: At_Drought_Reproduction_P Parameter: Treatment Value: Drought vs. No Drought
  misc_feature: MA Experiment ID: 20001911 Result: Up-regulated in Transcription
  misc_feature: MA Experiment 20001911 PARAMETER Experiment Name: At_Drought_Reproduction_P Parameter: Age (day) Value: 40
  misc_feature: MA Experiment 20001911 PARAMETER Experiment Name: At_Drought_Reproduction_P Parameter: Organism Value: A. thaliana
  misc_feature: MA Experiment 20001911 PARAMETER Experiment Name: At_Drought_Reproduction_P Parameter: Plant Line Value: WS
  misc_feature: MA Experiment 20001911 PARAMETER Experiment Name: At_Drought_Reproduction_P Parameter: Timepoint (day) Value: 10
  misc_feature: MA Experiment 20001911 PARAMETER Experiment Name: At_Drought_Reproduction_P Parameter: Tissue Value: Flowers
  misc_feature: MA Experiment 20001911 PARAMETER Experiment Name: At_Drought_Reproduction_P Parameter: Treatment Value: Drought vs. No Drought
accttattattttatatatatatatgtgcatatacacccacatagagatcattcgtgtactaattttaccttcatagacttaattaagatacgatcatggcgtcgtttgtctttgtgatttctcttcttcttctctctttttcgtcggctgttttctccgatgatgcttcttttcagaaacttccggtgcctgacaagaggtcaggccctgaatctttcgcctttgactctaccggcggattctacaccggagtctccggtggtaaaatcctcaagtacgttcctgggaagggttatgtcgattttgcccagatcacagattcctcgaactcggcatggtgcaacggagcattaggaaccgctttcgccggaaagtgtggtcgaccagcgggaatagccttaaacagcaaaacaggtgatctctatgtcgccgatgctccgttgggtcttcacgttatctctcccgcaggaggtttggccacaaagctggccgacagtgttgacggaaagcctttcaagtttcttgacggtcttgatgttgatcccaccaccggcgtcgtctacttcacttccttcagttccaagtttggaccccgggaagtgttaatcgcagtgggattaaaagacgcgagcggaaagctgttcaaatacgacccagcgaccaaagccgtgactgagttaatggaaggtctaagtggtgctgctggttgtgcagtgagctcagatggttcattcgtgctagttagcgagttcataaagagtaacatcaagaaatattggattaaagggcccaaagctggaactattgaagacttctcaagtcttgtctcgaaccccgacaacatcaggagggtaggttctaccggaaatttctgggtcgcctctgtcgtgaacaaggttgttatgcctaccgaccctagggcggtcaaactagacgctaatggaaaagtgctccagaccattttcctcaagaatgagtttgggaatactttgcttagtgaagtcaacgagttcaacggccatctttacatcggaactcttactggacctttcgccggagtcatgaaactttaaattggtatcaactatatggttctttggtgattaccatttttgatatcattttgaaaggtctgtttacagttattttaaccataataatatcccctcaaatgtcctgcttgttacgtgggtgacacaattgttcggtgattccttgaataggctactactacttattgtttcatattttcgaagagattatctctagttcttaaggctttggttttctttgttttcaccctttgttttacttcataaagacg

SEQ ID NO: 30255 - protein, 325 aa, Arabidopsis thaliana
  peptide (1)..(325): Ceres Seq. ID no. 13500102
  misc_feature (276)..(325): Homolog of NCBI NO: 30694556 NR Description: strictosidine synthase-related [Arabidopsis
  misc_feature (276)..(325): Homolog of NCBI NO: 11280567 NR Description: hypothetical protein F24I3.110 - Arabidopsis
  misc_feature (36)..(262): Homolog of NCBI NO: 30694556 NR Description: strictosidine synthase-related [Arabidopsis
  misc_feature (36)..(262): Homolog of NCBI NO: 11280567 NR Description: hypothetical protein F24I3.110 - Arabidopsis
  misc_feature (1)..(311): Homolog of NCBI NO: 1754987 NR Description: strictosidine synthase
  misc_feature (1)..(325): Homolog of NCBI NO: 30698979 NR Description: strictosidine synthase family [Arabidopsis
  misc_feature (1)..(325): Homolog of NCBI NO: 21431845 NR Description: Strictosidine synthase 3 precursor (SS-3)
  misc_feature (1)..(325): Homolog of NCBI NO: 1754983 NR Description: strictosidine synthase
  misc_feature (1)..(325): Homolog of NCBI NO: 15221106 NR Description: strictosidine synthase family [Arabidopsis
  misc_feature (1)..(325): Homolog of NCBI NO: 15221105 NR Description: strictosidine synthase family [Arabidopsis
MASFVFVISLLLLSFSSAVFSDDASFQKLPVPDKRSGPESFAFDSTGGFYTGVSGGKILKYVPGKGYVDFAQITDSSNSAWCNGALGTAFAGKCGRPAGIALNSKTGDLYVADAPLGLHVISPAGGLATKLADSVDGKPFKFLDGLDVDPTTGVVYFTSFSSKFGPREVLIAVGLKDASGKLFKYDPATKAVTELMEGLSGAAGCAVSSDGSFVLVSEFIKSNIKKYWIKGPKAGTIEDFSSLVSNPDNIRRVGSTGNFWVASVVNKVVMPTDPRAVKLDANGKVLQTIFLKNEFGNTLLSEVNEFNGHLYIGTLTGPFAGVMKL

SEQ ID NO: 30256 - DNA, 1628 bp, Arabidopsis thaliana
  misc_feature (1)..(1628): Ceres Seq. ID no. 12395605
  misc_feature: MA Experiment ID: 108573 Result: Up-regulated in Transcription
  misc_feature: MA Experiment 108573 PARAMETER Experiment Name: At_Drought_cDNA_P Parameter: Timepoint (hr) Value: 6
  misc_feature: MA Experiment 108573 PARAMETER Experiment Name: At_Drought_cDNA_P Parameter: Tissue Value: Aerial
  misc_feature: MA Experiment 108573 PARAMETER Experiment Name: At_Drought_cDNA_P Parameter: Treatment Value: Drought vs. No Drought
  misc_feature: MA Experiment ID: 20000087 Result: Down-regulated in Transcription
  misc_feature: MA Experiment 20000087 PARAMETER Experiment Name: At_100uM_ABA_Mutants_cDNA_P Parameter: Plant Line Value: WS
  misc_feature: MA Experiment 20000087 PARAMETER Experiment Name: At_100uM_ABA_Mutants_cDNA_P Parameter: Timepoint (hr) Value: 6
  misc_feature: MA Experiment 20000087 PARAMETER Experiment Name: At_100uM_ABA_Mutants_cDNA_P Parameter: Tissue Value: Aerial
  misc_feature: MA Experiment 20000087 PARAMETER Experiment Name: At_100uM_ABA_Mutants_cDNA_P Parameter: Treatment Value: 100uM ABA vs. No Treatment
  misc_feature: MA Experiment ID: 20000089 Result: Down-regulated in Transcription
  misc_feature: MA Experiment ID: 20000090 Result: Down-regulated in Transcription
  misc_feature: MA Experiment ID: 20000173 Result: Up-regulated in Transcription
  misc_feature: MA Experiment 20000173 PARAMETER Experiment Name: At_42deg_Heat_P Parameter: Age (day) Value: 14
  misc_feature: MA Experiment 20000173 PARAMETER Experiment Name: At_42deg_Heat_P Parameter: Organism Value: A. thaliana
  misc_feature: MA Experiment 20000173 PARAMETER Experiment Name: At_42deg_Heat_P Parameter: Plant Line Value: WS
  misc_feature: MA Experiment 20000173 PARAMETER Experiment Name: At_42deg_Heat_P Parameter: Temperature (deg C) Value: 42 vs. 22
  misc_feature: MA Experiment 20000173 PARAMETER Experiment Name: At_42deg_Heat_P Parameter: Timepoint (hr) Value: 6
  misc_feature: MA Experiment 20000173 PARAMETER Experiment Name: At_42deg_Heat_P Parameter: Tissue Value: Aerial
  misc_feature: MA Experiment ID: 20000224 Result: Down-regulated in Transcription
atttttctcgaacaccgaaaacactttcgaaccctaaaagacagaacactgtgtcaattttcattacctgggaacaaaacgcaaaatcaaagacaataattttttccccgagagagaaaatgcagaggttgaagcagcagcagcagcagcaacaagttatgatgcagcaagctcttatgcagcaacagtctctctaccatcctggtctccttgccccgccacagatagaaccaatcccaagtggaaatctcccccctggttttgatccaagtacttgccgcagtgtgtacgttggaaacatccatattcaggtgacggaacctctgcttcaagaggtttttgctggcactggtcctgtagaaagctgtaaactaattaggaaagaaaagtcttcttatgggtttgtgcactactttgatcgaagatcggctggtcttgcaatcctttctctcaatggaaggcatttgtttgggcaacctatcaaggttaactgggcttatgcgagtggccagagggaggatacatcaagtcacttcaatatatttgttggggatttgagtccggaggttactgatgcaatgctgtttacttgcttctctgtctacccgacttgctcggatgcaagagttatgtgggatcagaaaactgggcgttcaagaggatttggatttgtttccttccgtaaccaacaggatgcccagactgcaatagatgagataactgggaaatggcttggttccaggcagatacgttgcaactgggcgacaaagggagccacttctggtgaggacaaacagagctctgattccaaaagcgtcgtggaacttaccagtggtgtctcggaggatggtaaagatactactaatggtgaagctcctgagaacaatgctcagtacacaactgtttacgtcggtaatcttgctccagaggtgtcccaggttgatcttcaccgccacttccattcccttggtgctggggtcatagaggaagtccgtgttcaaagagacaaaggtttcggatttgtgagatactctactcatgtagaggcagccctcgctattcagatgggaaacacacattcctaccttagtggcaggcaaatgaagtgttcttggggaagcaagccaactccagcaggaacagcttcaaacccgcttcctccaccagctcctgcaccaatcccgggattctcagcgagtgatctcttggcttacgagaggcaactagcgatgagcaagatggcaggaatgaatccgatgatgcatcacccgcagggacaacatgcttttaaacaagctgcaatgggagccactggttcaaaccaggcaatatatgacggtggttaccagaacgcgcagcagctcatgtactaccagtaagatcttcctcggagccgttacttgagcgaagagttctttcttttcttcttttttgttatgtaacgtctttattgtatctttttcttttcttctaacttatgttcttgttataatgttatcatgtagctgtgggtttgtggtttgtgttccacgttttttcttttgttaactactacggtttacgtttttgcacatcttcaacttctttctctttctctttctctaacttaatcttatttattgggtcgc

SEQ ID NO: 30257 - protein, 458 aa, Arabidopsis thaliana
  peptide (1)..(458): Ceres Seq. ID no. 12395606
  misc_feature (180)..(251): Pfam Name: RNA recognition motif. (a.k.a. RRM, RBD, or RNP domain) Pfam Description: RNA recognition motif. (a.k.a. RRM, RBD, or RNP
  misc_feature (39)..(457): Homolog of NCBI NO: 6996560 NR Description: oligouridylate binding protein [Nicotiana
  misc_feature (39)..(458): Homolog of NCBI NO: 30695647 NR Description: oligouridylate binding protein (UBP1), putative
  misc_feature (39)..(458): Homolog of NCBI NO: 15221031 NR Description: oligouridylate binding protein (UBP1), putative
  misc_feature (35)..(458): Homolog of NCBI NO: 15231783 NR Description: oligouridylate binding protein (UBP1), putative
  misc_feature (35)..(458): Homolog of NCBI NO: 21593280 NR Description: oligouridylate binding protein, putative
  misc_feature (40)..(75): Homolog of NCBI NO: 25402821 NR Description: protein F1L3.2 [imported] - Arabidopsis thaliana
  misc_feature (367)..(458): Homolog of NCBI NO: 25402821 NR Description: protein F1L3.2 [imported] - Arabidopsis thaliana
  misc_feature (240)..(368): Homolog of NCBI NO: 25402821 NR Description: protein F1L3.2 [imported] - Arabidopsis thaliana
  misc_feature (74)..(242): Homolog of NCBI NO: 25402821 NR Description: protein F1L3.2 [imported] - Arabidopsis thaliana
  misc_feature (40)..(458): Homolog of NCBI NO: 18394471 NR Description: oligouridylate binding protein (UBP1), putative
FSRTPKTLSNPKRQNTVSIFITWEQNAKSKTIIFSPREKMQRLKQQQQQQQVMMQQALMQQQSLYHPGLLAPPQIEPIPSGNLPPGFDPSTCRSVYVGNIHIQVTEPLLQEVFAGTGPVESCKLIRKEKSSYGFVHYFDRRSAGLAILSLNGRHLFGQPIKVNWAYASGQREDTSSHFNIFVGDLSPEVTDAMLFTCFSVYPTCSDARVMWDQKTGRSRGFGFVSFRNQQDAQTAIDEITGKWLGSRQIRCNWATKGATSGEDKQSSDSKSVVELTSGVSEDGKDTTNGEAPENNAQYTTVYVGNLAPEVSQVDLHRHFHSLGAGVIEEVRVQRDKGFGFVRYSTHVEAALAIQMGNTHSYLSGRQMKCSWGSKPTPAGTASNPLPPPAPAPIPGFSASDLLAYERQLAMSKMAGMNPMMHHPQGQHAFKQAAMGATGSNQAIYDGGYQNAQQLMYYQ

SEQ ID NO: 30258 - protein, 419 aa, Arabidopsis thaliana
  peptide (1)..(419): Ceres Seq. ID no. 12395607
  misc_feature (141)..(212): Pfam Name: RNA recognition motif. (a.k.a. RRM, RBD, or RNP domain) Pfam Description: RNA recognition motif. (a.k.a. RRM, RBD, or RNP
  misc_feature (1)..(418): Homolog of NCBI NO: 6996560 NR Description: oligouridylate binding protein [Nicotiana
  misc_feature (1)..(419): Homolog of NCBI NO: 30695647 NR Description: oligouridylate binding protein (UBP1), putative
  misc_feature (1)..(419): Homolog of NCBI NO: 15221031 NR Description: oligouridylate binding protein (UBP1), putative
  misc_feature (1)..(419): Homolog of NCBI NO: 15231783 NR Description: oligouridylate binding protein (UBP1), putative
  misc_feature (1)..(419): Homolog of NCBI NO: 21593280 NR Description: oligouridylate binding protein, putative
  misc_feature (1)..(36): Homolog of NCBI NO: 25402821 NR Description: protein F1L3.2 [imported] - Arabidopsis thaliana
  misc_feature (328)..(419): Homolog of NCBI NO: 25402821 NR Description: protein F1L3.2 [imported] - Arabidopsis thaliana
  misc_feature (201)..(329): Homolog of NCBI NO: 25402821 NR Description: protein F1L3.2 [imported] - Arabidopsis thaliana
  misc_feature (35)..(203): Homolog of NCBI NO: 25402821 NR Description: protein F1L3.2 [imported] - Arabidopsis thaliana
  misc_feature (1)..(419): Homolog of NCBI NO: 18394471 NR Description: oligouridylate binding protein (UBP1), putative
MQRLKQQQQQQQVMMQQALMQQQSLYHPGLLAPPQIEPIPSGNLPPGFDPSTCRSVYVGNIHIQVTEPLLQEVFAGTGPVESCKLIRKEKSSYGFVHYFDRRSAGLAILSLNGRHLFGQPIKVNWAYASGQREDTSSHFNIFVGDLSPEVTDAMLFTCFSVYPTCSDARVMWDQKTGRSRGFGFVSFRNQQDAQTAIDEITGKWLGSRQIRCNWATKGATSGEDKQSSDSKSVVELTSGVSEDGKDTTNGEAPENNAQYTTVYVGNLAPEVSQVDLHRHFHSLGAGVIEEVRVQRDKGFGFVRYSTHVEAALAIQMGNTHSYLSGRQMKCSWGSKPTPAGTASNPLPPPAPAPIPGFSASDLLAYERQLAMSKMAGMNPMMHHPQGQHAFKQAAMGATGSNQAIYDGGYQNAQQLMYYQ

SEQ ID NO: 30259 - protein, 406 aa, Arabidopsis thaliana
  peptide (1)..(406): Ceres Seq. ID no. 12395608
  misc_feature (128)..(199): Pfam Name: RNA recognition motif. (a.k.a. RRM, RBD, or RNP domain) Pfam Description: RNA recognition motif. (a.k.a. RRM, RBD, or RNP
  misc_feature (1)..(405): Homolog of NCBI NO: 6996560 NR Description: oligouridylate binding protein [Nicotiana
  misc_feature (1)..(406): Homolog of NCBI NO: 30695647 NR Description: oligouridylate binding protein (UBP1), putative
  misc_feature (1)..(406): Homolog of NCBI NO: 15221031 NR Description: oligouridylate binding protein (UBP1), putative
  misc_feature (1)..(406): Homolog of NCBI NO: 15231783 NR Description: oligouridylate binding protein (UBP1), putative
  misc_feature (1)..(406): Homolog of NCBI NO: 21593280 NR Description: oligouridylate binding protein, putative
  misc_feature (1)..(23): Homolog of NCBI NO: 25402821 NR Description: protein F1L3.2 [imported] - Arabidopsis thaliana
  misc_feature (315)..(406): Homolog of NCBI NO: 25402821 NR Description: protein F1L3.2 [imported] - Arabidopsis thaliana
  misc_feature (188)..(316): Homolog of NCBI NO: 25402821 NR Description: protein F1L3.2 [imported] - Arabidopsis thaliana
  misc_feature (22)..(190): Homolog of NCBI NO: 25402821 NR Description: protein F1L3.2 [imported] - Arabidopsis thaliana
  misc_feature (1)..(406): Homolog of NCBI NO: 18394471 NR Description: oligouridylate binding protein (UBP1), putative
MMQQALMQQQSLYHPGLLAPPQIEPIPSGNLPPGFDPSTCRSVYVGNIHIQVTEPLLQEVFAGTGPVESCKLIRKEKSSYGFVHYFDRRSAGLAILSLNGRHLFGQPIKVNWAYASGQREDTSSHFNIFVGDLSPEVTDAMLFTCFSVYPTCSDARVMWDQKTGRSRGFGFVSFRNQQDAQTAIDEITGKWLGSRQIRCNWATKGATSGEDKQSSDSKSVVELTSGVSEDGKDTTNGEAPENNAQYTTVYVGNLAPEVSQVDLHRHFHSLGAGVIEEVRVQRDKGFGFVRYSTHVEAALAIQMGNTHSYLSGRQMKCSWGSKPTPAGTASNPLPPPAPAPIPGFSASDLLAYERQLAMSKMAGMNPMMHHPQGQHAFKQAAMGATGSNQAIYDGGYQNAQQLMYYQ

SEQ ID NO: 30260 - DNA, 1823 bp, Arabidopsis thaliana
  misc_feature (1)..(1823): Ceres Seq. ID no. 12337378
  misc_feature: MA Experiment ID: 108461 Result: Down-regulated in Transcription
  misc_feature: MA Experiment 108461 PARAMETER Experiment Name: At_Germinating_Seeds_cDNA_P Parameter: Age (day) Value: 1 vs. 0
  misc_feature: MA Experiment 108461 PARAMETER Experiment Name: At_Germinating_Seeds_cDNA_P Parameter: Tissue Value: Germinating Seeds
  misc_feature: MA Experiment ID: 108464 Result: Down-regulated in Transcription
  misc_feature: MA Experiment 108464 PARAMETER Experiment Name: At_Germinating_Seeds_cDNA_P Parameter: Age (day) Value: 4 vs. 0
  misc_feature: MA Experiment 108464 PARAMETER Experiment Name: At_Germinating_Seeds_cDNA_P Parameter: Tissue Value: Germinating Seeds
  misc_feature: MA Experiment ID: 20000180 Result: Down-regulated in Transcription
  misc_feature: MA Experiment 20000180 PARAMETER Experiment Name: At_Germinating_Seeds_P Parameter: Age (hr) Value: 24 vs. 0
  misc_feature: MA Experiment 20000180 PARAMETER Experiment Name: At_Germinating_Seeds_P Parameter: Tissue Value: Germinating Seeds
aaatcttctgatgcacactagttcgaaggatcctttaatgggagagagaatgttctacttcttcttcttcttcttcttcttcttcttcttcctcctctctcgtcggatctctctgatttagtgatttttcaaatttcaagttttcttcacctttaattttgtgtctcgttgatctctctttggacattctgctttggattctggaggcttctcattagatctctattagtgggtttaggtcaagttcttgaaatggataaggagaaatctcctgcaccaccacctagtggaggtcttcctccaccatcgggtcgttactctgcgttttcacctaatggaagtagctttgcaatgaaagctgaatcatcttttcctcctttgactccaagtggaagcaatagctcagatgctaaccgattcagccatgatattagccgaatgccggataatccacctaagaacctaggccatcgccgagctcattcagagattcttactcttcctgatgacttaagctttgatagtgatcttggtgtggttggtgctgctgatggaccttctttctctgatgatactgacgaggacttactctatatgtatcttgatatggaaaaattcaattcttctgctacatcgacttctcaaatgggtgagccatcagaaccgacttggaggaatgaattagcctcgacttctaaccttcagagtacacccggtagctctagtgaaagaccgagaattagacaccaacacagccaatcgatggatggttcaacaactatcaagcctgagatgcttatgtcagggaatgaagatgtgtctggagttgactctaagaaagccatctctgctgctaaactttctgagcttgctctcattgatccaaaacgcgccaagaggatatgggcaaacagtcagtctgctgcgaggtcaaaagaaaggaagatgagatacattgcagagctcgagagaaaagtacagactttacaaacagaggccacatctctctcagcccagttgactctcttacagagagatacaaatggcctgggtgttgaaaacaatgagcttaaactgcgagtacaaactatggagcaacaggtccacctacaggatgctttaaatgatgcactaaaggaggaagtccagcatcttaaggtattgacggggcaaggtccatcaaatggtacatcaatgaactacggttcttttggatcaaaccagcaattctatcccaataatcagtcgatgcacactatcttagccgcacaacagttacagcagctccagatccagtcacagaaacagcaacaacaacaacagcaacaccagcaacaacaacagcagcagcagcagcaatttcactttcaacagcagcaactgtaccagcttcagcagcagcaacggcttcaacaacaggaacaacaaagcggggcttcagagctaagaagacccatgccttctcctggtcagaaagagagtgtgacatcgcctgatcgtgaaactcccttgacaaaagactgagtctagactgtgctaatgtccaatttagtaagttactcttggaaaatcttctttttcatcgcaggctcatggatttgggatttactgcattatagagttaaaaacaagacagcttagaagttgcggatttagaagttgttagtgaagcttttgttctcgtctgttggtagtttacaatcttctctttgtatgatcctaagctcttaaaaagttcttggatttggtcatttggttagaaatgggttcttagtccaagtctgtagtcgtttaaccatattcatattctttgccttttgttc

SEQ ID NO: 30261 - protein, 423 aa, Arabidopsis thaliana
  peptide (1)..(423): Ceres Seq. ID no. 12337379
  misc_feature (210)..(272): Pfam Name: bZIP transcription factor Pfam Description: bZIP transcription factor
  misc_feature (143)..(381): Homolog of NCBI NO: 34394739 NR Description: putative transcription activator RF2a
  misc_feature (157)..(381): Homolog of NCBI NO: 39579226 NR Description: bZIP transcription factor RF2b
  misc_feature (155)..(379): Homolog of NCBI NO: 2921823 NR Description: shoot-forming PKSF1 [Paulownia kawakamii]
  misc_feature (162)..(388): Homolog of NCBI NO: 21740783 NR Description: OSJNBa0067K08.24 [Oryza sativa (japonica
  misc_feature (5)..(368): Homolog of NCBI NO: 21740783 NR Description: OSJNBa0067K08.24 [Oryza sativa (japonica
  misc_feature (90)..(397): Homolog of NCBI NO: 7489564 NR Description: probable transcription activator RF2a - rice
  misc_feature (1)..(260): Homolog of NCBI NO: 30684938 NR Description: bZIP transcription factor (POSF21) [Arabidopsis
  misc_feature (1)..(410): Homolog of NCBI NO: 15224665 NR Description: bZIP transcription factor (POSF21)
  misc_feature (1)..(423): Homolog of NCBI NO: 15221391 NR Description: bZIP protein; protein id: At1g06070.1, supported
  misc_feature (1)..(423): Homolog of NCBI NO: 21553831 NR Description: transcriptional activator RF2a, putative
MDKEKSPAPPPSGGLPPPSGRYSAFSPNGSSFAMKAESSFPPLTPSGSNSSDANRFSHDISRMPDNPPKNLGHRRAHSEILTLPDDLSFDSDLGVVGAADGPSFSDDTDEDLLYMYLDMEKFNSSATSTSQMGEPSEPTWRNELASTSNLQSTPGSSSERPRIRHQHSQSMDGSTTIKPEMLMSGNEDVSGVDSKKAISAAKLSELALIDPKRAKRIWANSQSAARSKERKMRYIAELERKVQTLQTEATSLSAQLTLLQRDTNGLGVENNELKLRVQTMEQQVHLQDALNDALKEEVQHLKVLTGQGPSNGTSMNYGSFGSNQQFYPNNQSMHTILAAQQLQQLQIQSQKQQQQQQQHQQQQQQQQQQFHFQQQQLYQLQQQQRLQQQEQQSGASELRRPMPSPGQKESVTSPDRETPLTKD

SEQ ID NO: 30262 - protein, 390 aa, Arabidopsis thaliana
  peptide (1)..(390): Ceres Seq. ID no. 12337380
  misc_feature (177)..(239): Pfam Name: bZIP transcription factor Pfam Description: bZIP transcription factor
  misc_feature (110)..(348): Homolog of NCBI NO: 34394739 NR Description: putative transcription activator RF2a
  misc_feature (124)..(348): Homolog of NCBI NO: 39579226 NR Description: bZIP transcription factor RF2b
  misc_feature (122)..(346): Homolog of NCBI NO: 2921823 NR Description: shoot-forming PKSF1 [Paulownia kawakamii]
  misc_feature (129)..(355): Homolog of NCBI NO: 21740783 NR Description: OSJNBa0067K08.24 [Oryza sativa (japonica
  misc_feature (1)..(335): Homolog of NCBI NO: 21740783 NR Description: OSJNBa0067K08.24 [Oryza sativa (japonica
  misc_feature (57)..(364): Homolog of NCBI NO: 7489564 NR Description: probable transcription activator RF2a - rice
  misc_feature (1)..(227): Homolog of NCBI NO: 30684938 NR Description: bZIP transcription factor (POSF21) [Arabidopsis
  misc_feature (1)..(377): Homolog of NCBI NO: 15224665 NR Description: bZIP transcription factor (POSF21)
  misc_feature (1)..(390): Homolog of NCBI NO: 15221391 NR Description: bZIP protein; protein id: At1g06070.1, supported
  misc_feature (1)..(390): Homolog of NCBI NO: 21553831 NR Description: transcriptional activator RF2a, putative
MKAESSFPPLTPSGSNSSDANRFSHDISRMPDNPPKNLGHRRAHSEILTLPDDLSFDSDLGVVGAADGPSFSDDTDEDLLYMYLDMEKFNSSATSTSQMGEPSEPTWRNELASTSNLQSTPGSSSERPRIRHQHSQSMDGSTTIKPEMLMSGNEDVSGVDSKKAISAAKLSELALIDPKRAKRIWANSQSAARSKERKMRYIAELERKVQTLQTEATSLSAQLTLLQRDTNGLGVENNELKLRVQTMEQQVHLQDALNDALKEEVQHLKVLTGQGPSNGTSMNYGSFGSNQQFYPNNQSMHTILAAQQLQQLQIQSQKQQQQQQQHQQQQQQQQQQFHFQQQQLYQLQQQQRLQQQEQQSGASELRRPMPSPGQKESVTSPDRETPLTKD

SEQ ID NO: 30263 - protein, 361 aa, Arabidopsis thaliana
  peptide (1)..(361): Ceres Seq. ID no. 12337381
  misc_feature (148)..(210): Pfam Name: bZIP transcription factor Pfam Description: bZIP transcription factor
  misc_feature (81)..(319): Homolog of NCBI NO: 34394739 NR Description: putative transcription activator RF2a
  misc_feature (95)..(319): Homolog of NCBI NO: 39579226 NR Description: bZIP transcription factor RF2b
  misc_feature (93)..(317): Homolog of NCBI NO: 2921823 NR Description: shoot-forming PKSF1 [Paulownia kawakamii]
  misc_feature (100)..(326): Homolog of NCBI NO: 21740783 NR Description: OSJNBa0067K08.24 [Oryza sativa (japonica
  misc_feature (1)..(306): Homolog of NCBI NO: 21740783 NR Description: OSJNBa0067K08.24 [Oryza sativa (japonica
  misc_feature (28)..(335): Homolog of NCBI NO: 7489564 NR Description: probable transcription activator RF2a - rice
  misc_feature (1)..(198): Homolog of NCBI NO: 30684938 NR Description: bZIP transcription factor (POSF21) [Arabidopsis
  misc_feature (1)..(348): Homolog of NCBI NO: 15224665 NR Description: bZIP transcription factor (POSF21)
  misc_feature (1)..(361): Homolog of NCBI NO: 15221391 NR Description: bZIP protein; protein id: At1g06070.1, supported
  misc_feature (1)..(361): Homolog of NCBI NO: 21553831 NR Description: transcriptional activator RF2a, putative
MPDNPPKNLGHRRAHSEILTLPDDLSFDSDLGVVGAADGPSFSDDTDEDLLYMYLDMEKFNSSATSTSQMGEPSEPTWRNELASTSNLQSTPGSSSERPRIRHQHSQSMDGSTTIKPEMLMSGNEDVSGVDSKKAISAAKLSELALIDPKRAKRIWANSQSAARSKERKMRYIAELERKVQTLQTEATSLSAQLTLLQRDTNGLGVENNELKLRVQTMEQQVHLQDALNDALKEEVQHLKVLTGQGPSNGTSMNYGSFGSNQQFYPNNQSMHTILAAQQLQQLQIQSQKQQQQQQQHQQQQQQQQQQFHFQQQQLYQLQQQQRLQQQEQQSGASELRRPMPSPGQKESVTSPDRETPLTKD

SEQ ID NO: 30264 - DNA, 1663 bp, Arabidopsis thaliana
  misc_feature (1)..(1663): Ceres Seq. ID no. 13591657
  misc_feature: MA Experiment ID: 108579 Result: Down-regulated in Transcription
  misc_feature: MA Experiment 108579 PARAMETER Experiment Name: At_4deg_Cold_cDNA_P Parameter: Temperature (deg C) Value: 4 vs. 22
  misc_feature: MA Experiment 108579 PARAMETER Experiment Name: At_4deg_Cold_cDNA_P Parameter: Timepoint (hr) Value: 6
  misc_feature: MA Experiment 108579 PARAMETER Experiment Name: At_4deg_Cold_cDNA_P Parameter: Tissue Value: Aerial
gtcatcattatctctatctaataaatggcgttacaaaggcaactcctgaagagagctacttccgatatctatcaccgccgtgcgatctctctcctccgtactgatttctctacttctccttcgattgctgatgctccaccgcacattccgccgttcgttcaccagccacggccgtataaaggtccttccgccgatgaggttttacagaaacggaagaagtttctcggaccttctcttttccactactaccagaagcctcttaacatcgttgaagggaagatgcagtacttgtatgatgagagtggtaggcgatatctggatgcctttgctggaatagtcactgtgtcgtgcggtcactgccatccggatattcttaatgcgattacggaacagagcaagctacttcagcacgcgactactatttacctgcatcatgccattggtgattttgctgaagcattggctgccaagatgcccggaaatcttaaggttgtgtactttgtgaattctggctcagaagctaatgagctagcaatgatgatggctaggctttacactggtagccttgagatgatttccttgagaaatgcttatcatggtggaagttccaatactattggactaactgctcttaacacatggaagtacccattacctcagggggaaatccatcacgtagtaaatccagatccataccgtggagtttttggctctgatggttctctttatgctaaagatgttcaagaccacatcgagtatggtacctctggaaaagtagctggatttatcgcagagaccatccagggggtcggaggagctgtagaattggctcctggttacttaaagtcggtttatgaaattgttcgcaacgctggtggtgtatgcattgctgatgaagtccaaactggatttgggcgaacaggaagccactattggggtttccagactcaagatgtggttcctgacatagtcacaatggcaaagggaattggaaatggattgccattaggagctgtggtgactacaccagaaatcgcaagtgttttagctagcaagattctgttcaacacttttggtgggaacccggtttgttcagctggtggacttgcggttctaaacgttattgataaggagaaacgccaagaacattgtgctgaagttggttcacaccttatacaacgtttgaaagatgtgcagaaaagacatgatatcattggagacgtgagaggaagagggttaatggttgggattgagcttgtgagtgaccggaaagacaagacaccagccaaggctgaaacatctgtcttgtttgagcaacttagagaacttggcattctcgtcggaaaaggaggacttcatgggaacgttttcaggataaagccaccaatgtgtttcactaaagatgatgcagatttcttggtagatgcattggactattccatctccaggttgtgaacaaggatgaaacaaagccaacgagagtttttaaccatatgaaccgttttaatgtttccgcgtctttgtaacgaaaaccaagccaagtctcatctcctttgatttcagaataaataaataaaatttatttatttctcagtgttgctatgacataatacaaatacattagaaaagcccaattatttttgttttctttgttaaaattccc

SEQ ID NO: 30265 - protein, 476 aa, Arabidopsis thaliana
  peptide (1)..(476): Ceres Seq. ID no. 13591658
  misc_feature (69)..(476): Pfam Name: Aminotransferase class-III Pfam Description: Aminotransferase class-III
  misc_feature (69)..(476): Pfam Name: Aminotransferase class-III Pfam Description: Aminotransferase class-III
  misc_feature (69)..(476): Pfam Name: Aminotransferase class-III Pfam Description: Aminotransferase class-III
  misc_feature (132)..(466): Homolog of NCBI NO: 7434175 NR Description: hypothetical protein T19P19.50 - Arabidopsis
  misc_feature (1)..(229): Homolog of NCBI NO: 28574759 NR Description: CG11241-PA [Drosophila melanogaster]
  misc_feature (1)..(229): Homolog of NCBI NO: 16198011 NR Description: LD24726p [Drosophila melanogaster]
  misc_feature (232)..(474): Homolog of NCBI NO: 28574759 NR Description: CG11241-PA [Drosophila melanogaster]
  misc_feature (232)..(474): Homolog of NCBI NO: 16198011 NR Description: LD24726p [Drosophila melanogaster]
  misc_feature (132)..(466): Homolog of NCBI NO: 7434175 NR Description: hypothetical protein T19P19.50 - Arabidopsis
  misc_feature (1)..(229): Homolog of NCBI NO: 16198011 NR Description: LD24726p [Drosophila melanogaster]
  misc_feature (232)..(474): Homolog of NCBI NO: 16198011 NR Description: LD24726p [Drosophila melanogaster]
  misc_feature (232)..(474): Homolog of NCBI NO: 28574759 NR Description: CG11241-PA [Drosophila melanogaster]
  misc_feature (1)..(229): Homolog of NCBI NO: 16198011 NR Description: LD24726p [Drosophila melanogaster]
  misc_feature (1)..(229): Homolog of NCBI NO: 28574759 NR Description: CG11241-PA [Drosophila melanogaster]
  misc_feature (132)..(466): Homolog of NCBI NO: 7434175 NR Description: hypothetical protein T19P19.50 - Arabidopsis
  misc_feature (1)..(476): Homolog of NCBI NO: 5731259 NR Description: alanine:glyoxylate aminotransferase 2 homolog
  misc_feature (1)..(476): Homolog of NCBI NO: 18420498 NR Description: alanine--glyoxylate aminotransferase
  misc_feature (3)..(476): Homolog of NCBI NO: 15224499 NR Description: alanine--glyoxylate aminotransferase
  misc_feature (3)..(476): Homolog of NCBI NO: 15028237 NR Description: putative beta-alanine-pyruvate aminotransferase
  misc_feature (39)..(476): Homolog of NCBI NO: 15231974 NR Description: alanine--glyoxylate aminotransferase
  misc_feature (1)..(476): Homolog of NCBI NO: 5731259 NR Description: alanine:glyoxylate aminotransferase 2 homolog
  misc_feature (1)..(476): Homolog of NCBI NO: 18420498 NR Description: alanine--glyoxylate aminotransferase
  misc_feature (3)..(476): Homolog of NCBI NO: 15224499 NR Description: alanine--glyoxylate aminotransferase
  misc_feature (3)..(476): Homolog of NCBI NO: 15028237 NR Description: putative beta-alanine-pyruvate aminotransferase
  misc_feature (39)..(476): Homolog of NCBI NO: 15231974 NR Description: alanine--glyoxylate aminotransferase
  misc_feature (232)..(474): Homolog of NCBI NO: 16198011 NR Description: LD24726p [Drosophila melanogaster]
  misc_feature (232)..(474): Homolog of NCBI NO: 28574759 NR Description: CG11241-PA [Drosophila melanogaster]
  misc_feature (1)..(229): Homolog of NCBI NO: 28574759 NR Description: CG11241-PA [Drosophila melanogaster]
  misc_feature (39)..(476): Homolog of NCBI NO: 15231974 NR Description: alanine--glyoxylate aminotransferase
  misc_feature (3)..(476): Homolog of NCBI NO: 15028237 NR Description: putative beta-alanine-pyruvate aminotransferase
  misc_feature (3)..(476): Homolog of NCBI NO: 15224499 NR Description: alanine--glyoxylate aminotransferase
  misc_feature (1)..(476): Homolog of NCBI NO: 18420498 NR Description: alanine--glyoxylate aminotransferase
  misc_feature (1)..(476): Homolog of NCBI NO: 5731259 NR Description: alanine:glyoxylate aminotransferase 2 homolog
MALQRQLLKRATSDIYHRRAISLLRTDFSTSPSIADAPPHIPPFVHQPRPYKGPSADEVLQKRKKFLGPSLFHYYQKPLNIVEGKMQYLYDESGRRYLDAFAGIVTVSCGHCHPDILNAITEQSKLLQHATTIYLHHAIGDFAEALAAKMPGNLKVVYFVNSGSEANELAMMMARLYTGSLEMISLRNAYHGGSSNTIGLTALNTWKYPLPQGEIHHVVNPDPYRGVFGSDGSLYAKDVQDHIEYGTSGKVAGFIAETIQGVGGAVELAPGYLKSVYEIVRNAGGVCIADEVQTGFGRTGSHYWGFQTQDVVPDIVTMAKGIGNGLPLGAVVTTPEIASVLASKILFNTFGGNPVCSAGGLAVLNVIDKEKRQEHCAEVGSHLIQRLKDVQKRHDIIGDVRGRGLMVGIELVSDRKDKTPAKAETSVLFEQLRELGILVGKGGLHGNVFRIKPPMCFTKDDADFLVDALDYSISRL

SEQ ID NO: 30266 - protein, 391 aa, Arabidopsis thaliana
  peptide (1)..(391): Ceres Seq. ID no. 13591659
  misc_feature (1)..(391): Pfam Name: Aminotransferase class-III Pfam Description: Aminotransferase class-III
  misc_feature (1)..(391): Pfam Name: Aminotransferase class-III Pfam Description: Aminotransferase class-III
  misc_feature (1)..(391): Pfam Name: Aminotransferase class-III Pfam Description: Aminotransferase class-III
  misc_feature (47)..(381): Homolog of NCBI NO: 7434175 NR Description: hypothetical protein T19P19.50 - Arabidopsis
  misc_feature (1)..(144): Homolog of NCBI NO: 28574759 NR Description: CG11241-PA [Drosophila melanogaster]
  misc_feature (1)..(144): Homolog of NCBI NO: 16198011 NR Description: LD24726p [Drosophila melanogaster]
  misc_feature (147)..(389): Homolog of NCBI NO: 28574759 NR Description: CG11241-PA [Drosophila melanogaster]
  misc_feature (147)..(389): Homolog of NCBI NO: 16198011 NR Description: LD24726p [Drosophila melanogaster]
  misc_feature (47)..(381): Homolog of NCBI NO: 7434175 NR Description: hypothetical protein T19P19.50 - Arabidopsis
  misc_feature (1)..(144): Homolog of NCBI NO: 16198011 NR Description: LD24726p [Drosophila melanogaster]
  misc_feature (147)..(389): Homolog of NCBI NO: 16198011 NR Description: LD24726p [Drosophila melanogaster]
  misc_feature (147)..(389): Homolog of NCBI NO: 28574759 NR Description: CG11241-PA [Drosophila melanogaster]
  misc_feature (1)..(144): Homolog of NCBI NO: 16198011 NR Description: LD24726p [Drosophila melanogaster]
  misc_feature (1)..(144): Homolog of NCBI NO: 28574759 NR Description: CG11241-PA [Drosophila melanogaster]
  misc_feature (47)..(381): Homolog of NCBI NO: 7434175 NR Description: hypothetical protein T19P19.50 - Arabidopsis
  misc_feature (1)..(391): Homolog of NCBI NO: 5731259 NR Description: alanine:glyoxylate aminotransferase 2 homolog
  misc_feature (1)..(391): Homolog of NCBI NO: 18420498 NR Description: alanine--glyoxylate aminotransferase
  misc_feature (1)..(391): Homolog of NCBI NO: 15224499 NR Description: alanine--glyoxylate aminotransferase
  misc_feature (1)..(391): Homolog of NCBI NO: 15028237 NR Description: putative beta-alanine-pyruvate aminotransferase
  misc_feature (1)..(391): Homolog of NCBI NO: 15231974 NR Description: alanine--glyoxylate aminotransferase
  misc_feature (1)..(391): Homolog of NCBI NO: 5731259 NR Description: alanine:glyoxylate aminotransferase 2 homolog
  misc_feature (1)..(391): Homolog of NCBI NO: 18420498 NR Description: alanine--glyoxylate aminotransferase
  misc_feature (1)..(391): Homolog of NCBI NO: 15224499 NR Description: alanine--glyoxylate aminotransferase
  misc_feature (1)..(391): Homolog of NCBI NO: 15028237 NR Description: putative beta-alanine-pyruvate aminotransferase
  misc_feature (1)..(391): Homolog of NCBI NO: 15231974 NR Description: alanine--glyoxylate aminotransferase
  misc_feature (147)..(389): Homolog of NCBI NO: 16198011 NR Description: LD24726p [Drosophila melanogaster]
  misc_feature (147)..(389): Homolog of NCBI NO: 28574759 NR Description: CG11241-PA [Drosophila melanogaster]
  misc_feature (1)..(144): Homolog of NCBI NO: 28574759 NR Description: CG11241-PA [Drosophila melanogaster]
  misc_feature (1)..(391): Homolog of NCBI NO: 15231974 NR Description: alanine--glyoxylate aminotransferase
  misc_feature (1)..(391): Homolog of NCBI NO: 15028237 NR Description: putative beta-alanine-pyruvate aminotransferase
  misc_feature (1)..(391): Homolog of NCBI NO: 15224499 NR Description: alanine--glyoxylate aminotransferase
  misc_feature (1)..(391): Homolog of NCBI NO: 18420498 NR Description: alanine--glyoxylate aminotransferase
  misc_feature (1)..(391): Homolog of NCBI NO: 5731259 NR Description: alanine:glyoxylate aminotransferase 2 homolog
MQYLYDESGRRYLDAFAGIVTVSCGHCHPDILNAITEQSKLLQHATTIYLHHAIGDFAEALAAKMPGNLKVVYFVNSGSEANELAMMMARLYTGSLEMISLRNAYHGGSSNTIGLTALNTWKYPLPQGEIHHVVNPDPYRGVFGSDGSLYAKDVQDHIEYGTSGKVAGFIAETIQGVGGAVELAPGYLKSVYEIVRNAGGVCIADEVQTGFGRTGSHYWGFQTQDVVPDIVTMAKGIGNGLPLGAVVTTPEIASVLASKILFNTFGGNPVCSAGGLAVLNVIDKEKRQEHCAEVGSHLIQRLKDVQKRHDIIGDVRGRGLMVGIELVSDRKDKTPAKAETSVLFEQLRELGILVGKGGLHGNVFRIKPPMCFTKDDADFLVDALDYSISRL

SEQ ID NO: 30267 - protein, 327 aa, Arabidopsis thaliana
  peptide (1)..(327): Ceres Seq. ID no. 13591660
  misc_feature (1)..(327): Pfam Name: Aminotransferase class-III Pfam Description: Aminotransferase class-III
  misc_feature (1)..(327): Pfam Name: Aminotransferase class-III Pfam Description: Aminotransferase class-III
  misc_feature (1)..(327): Pfam Name: Aminotransferase class-III Pfam Description: Aminotransferase class-III
  misc_feature (1)..(317): Homolog of NCBI NO: 7434175 NR Description: hypothetical protein T19P19.50 - Arabidopsis
  misc_feature (1)..(80): Homolog of NCBI NO: 28574759 NR Description: CG11241-PA [Drosophila melanogaster]
  misc_feature (1)..(80): Homolog of NCBI NO: 16198011 NR Description: LD24726p [Drosophila melanogaster]
  misc_feature (83)..(325): Homolog of NCBI NO: 28574759 NR Description: CG11241-PA [Drosophila melanogaster]
  misc_feature (83)..(325): Homolog of NCBI NO: 16198011 NR Description: LD24726p [Drosophila melanogaster]
  misc_feature (1)..(317): Homolog of NCBI NO: 7434175 NR Description: hypothetical protein T19P19.50 - Arabidopsis
  misc_feature (1)..(80): Homolog of NCBI NO: 16198011 NR Description: LD24726p [Drosophila melanogaster]
  misc_feature (83)..(325): Homolog of NCBI NO: 16198011 NR Description: LD24726p [Drosophila melanogaster]
  misc_feature (83)..(325): Homolog of NCBI NO: 28574759 NR Description: CG11241-PA [Drosophila melanogaster]
  misc_feature (1)..(80): Homolog of NCBI NO: 16198011 NR Description: LD24726p [Drosophila melanogaster]
  misc_feature (1)..(80): Homolog of NCBI NO: 28574759 NR Description: CG11241-PA [Drosophila melanogaster]
  misc_feature (1)..(317): Homolog of NCBI NO: 7434175 NR Description: hypothetical protein T19P19.50 - Arabidopsis
  misc_feature (1)..(327): Homolog of NCBI NO: 5731259 NR Description: alanine:glyoxylate aminotransferase 2 homolog
  misc_feature (1)..(327): Homolog of NCBI NO: 18420498 NR Description: alanine--glyoxylate aminotransferase
  misc_feature (1)..(327): Homolog of NCBI NO: 15224499 NR Description: alanine--glyoxylate aminotransferase
  misc_feature (1)..(327): Homolog of NCBI NO: 15028237 NR Description: putative beta-alanine-pyruvate aminotransferase
  misc_feature (1)..(327): Homolog of NCBI NO: 15231974 NR Description: alanine--glyoxylate aminotransferase
  misc_feature (1)..(327): Homolog of NCBI NO: 5731259 NR Description: alanine:glyoxylate aminotransferase 2 homolog
  misc_feature (1)..(327): Homolog of NCBI NO: 18420498 NR Description: alanine--glyoxylate aminotransferase
  misc_feature (1)..(327): Homolog of NCBI NO: 15224499 NR Description: alanine--glyoxylate aminotransferase
  misc_feature (1)..(327): Homolog of NCBI NO: 15028237 NR Description: putative beta-alanine-pyruvate aminotransferase
  misc_feature (1)..(327): Homolog of NCBI NO: 15231974 NR Description: alanine--glyoxylate aminotransferase
  misc_feature (83)..(325): Homolog of NCBI NO: 16198011 NR Description: LD24726p [Drosophila melanogaster]
  misc_feature (83)..(325): Homolog of NCBI NO: 28574759 NR Description: CG11241-PA [Drosophila melanogaster]
  misc_feature (1)..(80): Homolog of NCBI NO: 28574759 NR Description: CG11241-PA [Drosophila melanogaster]
  misc_feature (1)..(327): Homolog of NCBI NO: 15231974 NR Description: alanine--glyoxylate aminotransferase
  misc_feature (1)..(327): Homolog of NCBI NO: 15028237 NR Description: putative beta-alanine-pyruvate aminotransferase
  misc_feature (1)..(327): Homolog of NCBI NO: 15224499 NR Description: alanine--glyoxylate aminotransferase
  misc_feature (1)..(327): Homolog of NCBI NO: 18420498 NR Description: alanine--glyoxylate aminotransferase
  misc_feature (1)..(327): Homolog of NCBI NO: 5731259 NR Description: alanine:glyoxylate aminotransferase 2 homolog
MPGNLKVVYFVNSGSEANELAMMMARLYTGSLEMISLRNAYHGGSSNTIGLTALNTWKYPLPQGEIHHVVNPDPYRGVFGSDGSLYAKDVQDHIEYGTSGKVAGFIAETIQGVGGAVELAPGYLKSVYEIVRNAGGVCIADEVQTGFGRTGSHYWGFQTQDVVPDIVTMAKGIGNGLPLGAVVTTPEIASVLASKILFNTFGGNPVCSAGGLAVLNVIDKEKRQEHCAEVGSHLIQRLKDVQKRHDIIGDVRGRGLMVGIELVSDRKDKTPAKAETSVLFEQLRELGILVGKGGLHGNVFRIKPPMCFTKDDADFLVDALDYSISRL

SEQ ID NO: 30268 - DNA, 1476 bp, Arabidopsis thaliana
  misc_feature (1)..(1476): Ceres Seq. ID no. 12422615
  misc_feature: MA Experiment ID: 108434 Result: Down-regulated in Transcription
  misc_feature: MA Experiment 108434 PARAMETER Experiment Name: At_Root_Tips_cDNA_P Parameter: Tissue Value: Root Tips
  misc_feature: MA Experiment ID: 108572 Result: Up-regulated in Transcription
  misc_feature: MA Experiment 108572 PARAMETER Experiment Name: At_Drought_cDNA_P Parameter: Timepoint (hr) Value: 1
  misc_feature: MA Experiment 108572 PARAMETER Experiment Name: At_Drought_cDNA_P Parameter: Tissue Value: Aerial
  misc_feature: MA Experiment 108572 PARAMETER Experiment Name: At_Drought_cDNA_P Parameter: Treatment Value: Drought vs. No Drought
  misc_feature: MA Experiment ID: 108573 Result: Up-regulated in Transcription
  misc_feature: MA Experiment 108573 PARAMETER Experiment Name: At_Drought_cDNA_P Parameter: Timepoint (hr) Value: 6
  misc_feature: MA Experiment 108573 PARAMETER Experiment Name: At_Drought_cDNA_P Parameter: Tissue Value: Aerial
  misc_feature: MA Experiment 108573 PARAMETER Experiment Name: At_Drought_cDNA_P Parameter: Treatment Value: Drought vs. No Drought
  misc_feature: MA Experiment ID: 108574 Result: Up-regulated in Transcription
  misc_feature: MA Experiment 108574 PARAMETER Experiment Name: At_Wounding__cDNA_P Parameter: Timepoint (hr) Value: 1
  misc_feature: MA Experiment 108574 PARAMETER Experiment Name: At_Wounding__cDNA_P Parameter: Tissue Value: Aerial
  misc_feature: MA Experiment 108574 PARAMETER Experiment Name: At_Wounding__cDNA_P Parameter: Treatment Value: Wounding vs. No Wounding
  misc_feature: MA Experiment ID: 108595 Result: Up-regulated in Transcription
  misc_feature: MA Experiment 108595 PARAMETER Experiment Name: At_Ler-pi_Ovule_cDNA_P Parameter: Plant Line Value: null
  misc_feature: MA Experiment ID: 108605 Result: Up-regulated in Transcription
  misc_feature: MA Experiment 108605 PARAMETER Experiment Name: At_100uM_ABA_cDNA_P Parameter: Timepoint (hr) Value: 6
  misc_feature: MA Experiment 108605 PARAMETER Experiment Name: At_100uM_ABA_cDNA_P Parameter: Tissue Value: Aerial
  misc_feature: MA Experiment 108605 PARAMETER Experiment Name: At_100uM_ABA_cDNA_P Parameter: Treatment Value: 100uM ABA vs. No Treatment
  misc_feature: MA Experiment ID: 108607 Result: Up-regulated in Transcription
  misc_feature: MA Experiment 108607 PARAMETER Experiment Name: At_100uM_ABA_cDNA_P Parameter: Timepoint (hr) Value: 4
  misc_feature: MA Experiment 108607 PARAMETER Experiment Name: At_100uM_ABA_cDNA_P Parameter: Tissue Value: Aerial
  misc_feature: MA Experiment 108607 PARAMETER Experiment Name: At_100uM_ABA_cDNA_P Parameter: Treatment Value: 100uM ABA vs. No Treatment
  misc_feature: MA Experiment ID: 20000111 Result: Down-regulated in Transcription
  misc_feature: MA Experiment 20000111 PARAMETER Experiment Name: At_42deg_Heat_cDNA_P Parameter: Temperature (deg C) Value: 42 vs. 22
  misc_feature: MA Experiment 20000111 PARAMETER Experiment Name: At_42deg_Heat_cDNA_P Parameter: Timepoint (hr) Value: 6
  misc_feature: MA Experiment 20000111 PARAMETER Experiment Name: At_42deg_Heat_cDNA_P Parameter: Tissue Value: Aerial
  misc_feature: MA Experiment ID: 20000112 Result: Down-regulated in Transcription
  misc_feature: MA Experiment 20000112 PARAMETER Experiment Name: At_42deg_Heat_cDNA_P Parameter: Temperature (deg C) Value: 42 vs. 22
  misc_feature: MA Experiment 20000112 PARAMETER Experiment Name: At_42deg_Heat_cDNA_P Parameter: Timepoint (hr) Value: 2
  misc_feature: MA Experiment 20000112 PARAMETER Experiment Name: At_42deg_Heat_cDNA_P Parameter: Tissue Value: Aerial
  misc_feature: MA Experiment ID: 20000113 Result: Down-regulated in Transcription
  misc_feature: MA Experiment 20000113 PARAMETER Experiment Name: At_42deg_Heat_cDNA_P Parameter: Temperature (deg C) Value: 42 vs. 22
  misc_feature: MA Experiment 20000113 PARAMETER Experiment Name: At_42deg_Heat_cDNA_P Parameter: Timepoint (hr) Value: 8
  misc_feature: MA Experiment 20000113 PARAMETER Experiment Name: At_42deg_Heat_cDNA_P Parameter: Tissue Value: Aerial
  misc_feature: MA Experiment ID: 20000144 Result: Down-regulated in Transcription
  misc_feature: MA Experiment 20000144 PARAMETER Experiment Name: At_42deg_Heat_cDNA_P Parameter: Temperature (deg C) Value: 42 vs. 22
  misc_feature: MA Experiment 20000144 PARAMETER Experiment Name: At_42deg_Heat_cDNA_P Parameter: Timepoint (hr) Value: 1
  misc_feature: MA Experiment 20000144 PARAMETER Experiment Name: At_42deg_Heat_cDNA_P Parameter: Tissue Value: Aerial
  misc_feature: MA Experiment ID: 20000169 Result: Up-regulated in Transcription
  misc_feature: MA Experiment 20000169 PARAMETER Experiment Name: At_100uM_ABA_P Parameter: Age (day) Value: 14
  misc_feature: MA Experiment 20000169 PARAMETER Experiment Name: At_100uM_ABA_P Parameter: Organism Value: A. thaliana
  misc_feature: MA Experiment 20000169 PARAMETER Experiment Name: At_100uM_ABA_P Parameter: Plant Line Value: WS
  misc_feature: MA Experiment 20000169 PARAMETER Experiment Name: At_100uM_ABA_P Parameter: Timepoint (hr) Value: 6
  misc_feature: MA Experiment 20000169 PARAMETER Experiment Name: At_100uM_ABA_P Parameter: Tissue Value: Aerial
  misc_feature: MA Experiment 20000169 PARAMETER Experiment Name: At_100uM_ABA_P Parameter: Treatment Value: 100uM ABA vs. No Treatment
  misc_feature: MA Experiment ID: 20000171 Result: Down-regulated in Transcription
  misc_feature: MA Experiment 20000171 PARAMETER Experiment Name: At_42deg_Heat_P Parameter: Age (day) Value: 14
  misc_feature: MA Experiment 20000171 PARAMETER Experiment Name: At_42deg_Heat_P Parameter: Organism Value: A. thaliana
  misc_feature: MA Experiment 20000171 PARAMETER Experiment Name: At_42deg_Heat_P Parameter: Plant Line Value: WS
  misc_feature: MA Experiment 20000171 PARAMETER Experiment Name: At_42deg_Heat_P Parameter: Temperature (deg C) Value: 42 vs. 22
  misc_feature: MA Experiment 20000171 PARAMETER Experiment Name: At_42deg_Heat_P Parameter: Timepoint (hr) Value: 1
  misc_feature: MA Experiment 20000171 PARAMETER Experiment Name: At_42deg_Heat_P Parameter: Tissue Value: Aerial
  misc_feature: MA Experiment ID: 20000180 Result: Down-regulated in Transcription
  misc_feature: MA Experiment 20000180 PARAMETER Experiment Name: At_Germinating_Seeds_P Parameter: Age (hr) Value: 24 vs. 0
  misc_feature: MA Experiment 20000180 PARAMETER Experiment Name: At_Germinating_Seeds_P Parameter: Tissue Value: Germinating Seeds
  misc_feature: MA Experiment ID: 20000184 Result: Down-regulated in Transcription
  misc_feature: MA Experiment 20000184 PARAMETER Experiment Name: At_Shoots__P Parameter: Age (day) Value: 7
  misc_feature: MA Experiment 20000184 PARAMETER Experiment Name: At_Shoots__P Parameter: Tissue Value: Shoots vs. Whole Plant
  misc_feature: MA Experiment ID: 20000185 Result: Down-regulated in Transcription
  misc_feature: MA Experiment 20000185 PARAMETER Experiment Name: At_Roots__P Parameter: Age (day) Value: 7 vs. 21
  misc_feature: MA Experiment 20000185 PARAMETER Experiment Name: At_Roots__P Parameter: Organism Value: A. thaliana
  misc_feature: MA Experiment 20000185 PARAMETER Experiment Name: At_Roots__P Parameter: Tissue Value: Roots vs. Whole Plant
  misc_feature: MA Experiment ID: 20000211 Result: Up-regulated in Transcription
  misc_feature: MA Experiment 20000211 PARAMETER Experiment Name: At_0.001percent_MeJA__P Parameter: Age (day) Value: 14
  misc_feature: MA Experiment 20000211 PARAMETER Experiment Name: At_0.001percent_MeJA__P Parameter: Organism Value: A. thaliana
  misc_feature: MA Experiment 20000211 PARAMETER Experiment Name: At_0.001percent_MeJA__P Parameter: Plant Line Value: WS
  misc_feature: MA Experiment 20000211 PARAMETER Experiment Name: At_0.001percent_MeJA__P Parameter: Timepoint (hr) Value: 1
  misc_feature: MA Experiment 20000211 PARAMETER Experiment Name: At_0.001percent_MeJA__P Parameter: Tissue Value: Aerial
  misc_feature: MA Experiment 20000211 PARAMETER Experiment Name: At_0.001percent_MeJA__P Parameter: Treatment Value: 0.001percent MeJA vs. No Treatment
  misc_feature: MA Experiment ID: 20000267 Result: Up-regulated in Transcription
  misc_feature: MA Experiment 20000267 PARAMETER Experiment Name: At_Drought_P Parameter: Age (day) Value: 7
  misc_feature: MA Experiment 20000267 PARAMETER Experiment Name: At_Drought_P Parameter: Organism Value: A. thaliana
  misc_feature: MA Experiment 20000267 PARAMETER Experiment Name: At_Drought_P Parameter: Plant Line Value: WS
  misc_feature: MA Experiment 20000267 PARAMETER Experiment Name: At_Drought_P Parameter: Timepoint (hr) Value: 6
  misc_feature: MA Experiment 20000267 PARAMETER Experiment Name: At_Drought_P Parameter: Tissue Value: Whole Plant
  misc_feature: MA Experiment 20000267 PARAMETER Experiment Name: At_Drought_P Parameter: Treatment Value: Drought vs. No Drought
  misc_feature: MA Experiment ID: 20000268 Result: Up-regulated in Transcription
  misc_feature: MA Experiment 20000268 PARAMETER Experiment Name: At_100mM_NaCl__P Parameter: Age (day) Value: 14
  misc_feature: MA Experiment 20000268 PARAMETER Experiment Name: At_100mM_NaCl__P Parameter: Organism Value: A. thaliana
  misc_feature: MA Experiment 20000268 PARAMETER Experiment Name: At_100mM_NaCl__P Parameter: Plant Line Value: WS
  misc_feature: MA Experiment 20000268 PARAMETER Experiment Name: At_100mM_NaCl__P Parameter: Timepoint (hr) Value: 6
  misc_feature: MA Experiment 20000268 PARAMETER Experiment Name: At_100mM_NaCl__P Parameter: Tissue Value: Whole Plant
  misc_feature: MA Experiment 20000268 PARAMETER Experiment Name: At_100mM_NaCl__P Parameter: Treatment Value: 100mM NaCl vs. No Treatment
  misc_feature: MA Experiment ID: 20000308 Result: Up-regulated in Transcription
  misc_feature: MA Experiment 20000308 PARAMETER Experiment Name: At_100mM_NaCl__P Parameter: Age (day) Value: 17
  misc_feature: MA Experiment 20000308 PARAMETER Experiment Name: At_100mM_NaCl__P Parameter: Organism Value: A. thaliana
  misc_feature: MA Experiment 20000308 PARAMETER Experiment Name: At_100mM_NaCl__P Parameter: Plant Line Value: WS
  misc_feature: MA Experiment 20000308 PARAMETER Experiment Name: At_100mM_NaCl__P Parameter: Timepoint (hr) Value: 72
  misc_feature: MA Experiment 20000308 PARAMETER Experiment Name: At_100mM_NaCl__P Parameter: Tissue Value: Whole Plant
  misc_feature: MA Experiment 20000308 PARAMETER Experiment Name: At_100mM_NaCl__P Parameter: Treatment Value: 100mM NaCl vs. No Treatment
  misc_feature: MA Experiment ID: 20000436 Result: Up-regulated in Transcription
  misc_feature: MA Experiment 20000436 PARAMETER Experiment Name: At_Drought_P Parameter: Age (day) Value: 7
  misc_feature: MA Experiment 20000436 PARAMETER Experiment Name: At_Drought_P Parameter: Organism Value: A. thaliana
  misc_feature: MA Experiment 20000436 PARAMETER Experiment Name: At_Drought_P Parameter: Plant Line Value: WS
  misc_feature: MA Experiment 20000436 PARAMETER Experiment Name: At_Drought_P Parameter: Timepoint (hr) Value: 12
  misc_feature: MA Experiment 20000436 PARAMETER Experiment Name: At_Drought_P Parameter: Tissue Value: Whole Plant
  misc_feature: MA Experiment 20000436 PARAMETER Experiment Name: At_Drought_P Parameter: Treatment Value: Drought vs. No Drought
  misc_feature: MA Experiment ID: 20000437 Result: Up-regulated in Transcription
  misc_feature: MA Experiment 20000437 PARAMETER Experiment Name: At_Drought_P Parameter: Age (day) Value: 8
  misc_feature: MA Experiment 20000437 PARAMETER Experiment Name: At_Drought_P Parameter: Organism Value: A. thaliana
  misc_feature: MA Experiment 20000437 PARAMETER Experiment Name: At_Drought_P Parameter: Plant Line Value: WS
  misc_feature: MA Experiment 20000437 PARAMETER Experiment Name: At_Drought_P Parameter: Timepoint (hr) Value: 24
  misc_feature: MA Experiment 20000437 PARAMETER Experiment Name: At_Drought_P Parameter: Tissue Value: Whole Plant
  misc_feature: MA Experiment 20000437 PARAMETER Experiment Name: At_Drought_P Parameter: Treatment Value: Drought vs. No Drought
  misc_feature: MA Experiment ID: 20000438 Result: Down-regulated in Transcription
  misc_feature: MA Experiment 20000438 PARAMETER Experiment Name: At_Shoots__P Parameter: Age (day) Value: 14
  misc_feature: MA Experiment 20000438 PARAMETER Experiment Name: At_Shoots__P Parameter: Tissue Value: Shoots vs. Whole Plant
  misc_feature: MA Experiment ID: 20000439 Result: Down-regulated in Transcription
  misc_feature: MA Experiment 20000439 PARAMETER Experiment Name: At_Roots__P Parameter: Age (day) Value: 14 vs. 21
  misc_feature: MA Experiment 20000439 PARAMETER Experiment Name: At_Roots__P Parameter: Organism Value: A. thaliana
  misc_feature: MA Experiment 20000439 PARAMETER Experiment Name: At_Roots__P Parameter: Tissue Value: Roots vs. Whole Plant
  misc_feature: MA Experiment ID: 20000451 Result: Up-regulated in Transcription
  misc_feature: MA Experiment 20000451 PARAMETER Experiment Name: At_CS6879_Shoots-Roots_P Parameter: Age (day) Value: 14
  misc_feature: MA Experiment 20000451 PARAMETER Experiment Name: At_CS6879_Shoots-Roots_P Parameter: Organism Value: A. thaliana
  misc_feature: MA Experiment 20000451 PARAMETER Experiment Name: At_CS6879_Shoots-Roots_P Parameter: Plant Line Value: CS6879 vs. WS
  misc_feature: MA Experiment 20000451 PARAMETER Experiment Name: At_CS6879_Shoots-Roots_P Parameter: Tissue Value: Roots
  misc_feature: MA Experiment ID: 20000495 Result: Down-regulated in Transcription
  misc_feature: MA Experiment 20000495 PARAMETER Experiment Name: At_Guard_Cells_P Parameter: Harvest Date Value: 8/2/2002
  misc_feature: MA Experiment 20000495 PARAMETER Experiment Name: At_Guard_Cells_P Parameter: Organism Value: A. thaliana
  misc_feature: MA Experiment 20000495 PARAMETER Experiment Name: At_Guard_Cells_P Parameter: Tissue Value: Guard Cells vs. Leaves
  misc_feature: MA Experiment ID: 20000573 Result: Down-regulated in Transcription
  misc_feature: MA Experiment 20000573 PARAMETER Experiment Name: At_100uM_ABA_Mutants__P Parameter: Organism Value: A. thaliana
  misc_feature: MA Experiment 20000573 PARAMETER Experiment Name: At_100uM_ABA_Mutants__P Parameter: Plant Line Value: CS22 vs. Ler wt
  misc_feature: MA Experiment 20000573 PARAMETER Experiment Name: At_100uM_ABA_Mutants__P Parameter: Timepoint (hr) Value: N/A
  misc_feature: MA Experiment 20000573 PARAMETER Experiment Name: At_100uM_ABA_Mutants__P Parameter: Tissue Value: Whole Plant
  misc_feature: MA Experiment 20000573 PARAMETER Experiment Name: At_100uM_ABA_Mutants__P Parameter: Treatment Value: None
  misc_feature: MA Experiment ID: 20000574 Result: Down-regulated in Transcription
  misc_feature: MA Experiment 20000574 PARAMETER Experiment Name: At_100uM_ABA_Mutants__P Parameter: Organism Value: A. thaliana
  misc_feature: MA Experiment 20000574 PARAMETER Experiment Name: At_100uM_ABA_Mutants__P Parameter: Plant Line Value: CS23 vs. Ler wt
  misc_feature: MA Experiment 20000574 PARAMETER Experiment Name: At_100uM_ABA_Mutants__P Parameter: Timepoint (hr) Value: N/A
  misc_feature: MA Experiment 20000574 PARAMETER Experiment Name: At_100uM_ABA_Mutants__P Parameter: Tissue Value: Whole Plant
  misc_feature: MA Experiment 20000574 PARAMETER Experiment Name: At_100uM_ABA_Mutants__P Parameter: Treatment Value: None
  misc_feature: MA Experiment ID: 20001247 Result: Down-regulated in Transcription
  misc_feature: MA Experiment 20001247 PARAMETER Experiment Name: At_Far-red-induction_P Parameter: Age (day) Value: 7
  misc_feature: MA Experiment 20001247 PARAMETER Experiment Name: At_Far-red-induction_P Parameter: Light Value: Far-red vs. White
  misc_feature: MA Experiment 20001247 PARAMETER Experiment Name: At_Far-red-induction_P Parameter: Organism Value: A. thaliana
  misc_feature: MA Experiment 20001247 PARAMETER Experiment Name: At_Far-red-induction_P Parameter: Plant Line Value: Columbia
  misc_feature: MA Experiment 20001247 PARAMETER Experiment Name: At_Far-red-induction_P Parameter: Timepoint (hr) Value: 1
  misc_feature: MA Experiment 20001247 PARAMETER Experiment Name: At_Far-red-induction_P Parameter: Tissue Value: Whole Plant
  misc_feature: MA Experiment ID: 20001248 Result: Down-regulated in Transcription
  misc_feature: MA Experiment 20001248 PARAMETER Experiment Name: At_Far-red-induction_P Parameter: Age (day) Value: 7
  misc_feature: MA Experiment 20001248 PARAMETER Experiment Name: At_Far-red-induction_P Parameter: Light Value: Far-red vs. White
  misc_feature: MA Experiment 20001248 PARAMETER Experiment Name: At_Far-red-induction_P Parameter: Organism Value: A. thaliana
  misc_feature: MA Experiment 20001248 PARAMETER Experiment Name: At_Far-red-induction_P Parameter: Plant Line Value: Columbia
  misc_feature: MA Experiment 20001248 PARAMETER Experiment Name: At_Far-red-induction_P Parameter: Timepoint (hr) Value: 4
  misc_feature: MA Experiment 20001248 PARAMETER Experiment Name: At_Far-red-induction_P Parameter: Tissue Value: Whole Plant
  misc_feature: MA Experiment ID: 20001450 Result: Down-regulated in Transcription
  misc_feature: MA Experiment 20001450 PARAMETER Experiment Name: At_Far-red-induction_P Parameter: Age (day) Value: 7
  misc_feature: MA Experiment 20001450 PARAMETER Experiment Name: At_Far-red-induction_P Parameter: Light Value: Far-red vs. White
  misc_feature: MA Experiment 20001450 PARAMETER Experiment Name: At_Far-red-induction_P Parameter: Organism Value: A. thaliana
  misc_feature: MA Experiment 20001450 PARAMETER Experiment Name: At_Far-red-induction_P Parameter: Plant Line Value: Columbia
  misc_feature: MA Experiment 20001450 PARAMETER Experiment Name: At_Far-red-induction_P Parameter: Timepoint (hr) Value: 8
  misc_feature: MA Experiment 20001450 PARAMETER Experiment Name: At_Far-red-induction_P Parameter: Tissue Value: Whole Plant
  misc_feature: MA Experiment ID: 20001451 Result: Down-regulated in Transcription
  misc_feature: MA Experiment 20001451 PARAMETER Experiment Name: At_Far-red-induction_P Parameter: Age (day) Value: 7
  misc_feature: MA Experiment 20001451 PARAMETER Experiment Name: At_Far-red-induction_P Parameter: Light Value: Far-red vs. White
  misc_feature: MA Experiment 20001451 PARAMETER Experiment Name: At_Far-red-induction_P Parameter: Organism Value: A. thaliana
  misc_feature: MA Experiment 20001451 PARAMETER Experiment Name: At_Far-red-induction_P Parameter: Plant Line Value: Columbia
  misc_feature: MA Experiment 20001451 PARAMETER Experiment Name: At_Far-red-induction_P Parameter: Timepoint (hr) Value: 24
  misc_feature: MA Experiment 20001451 PARAMETER Experiment Name: At_Far-red-induction_P Parameter: Tissue Value: Whole Plant
  misc_feature: MA Experiment ID: 20001556 Result: Up-regulated in Transcription
  misc_feature: MA Experiment 20001556 PARAMETER Experiment Name: At_Drought_Soil_Dry_P Parameter: Age (day) Value: 26
  misc_feature: MA Experiment 20001556 PARAMETER Experiment Name: At_Drought_Soil_Dry_P Parameter: Organism Value: A. thaliana
  misc_feature: MA Experiment 20001556 PARAMETER Experiment Name: At_Drought_Soil_Dry_P Parameter: Plant Line Value: WS
  misc_feature: MA Experiment 20001556 PARAMETER Experiment Name: At_Drought_Soil_Dry_P Parameter: Post Timepoint (hr) Value: None
  misc_feature: MA Experiment 20001556 PARAMETER Experiment Name: At_Drought_Soil_Dry_P Parameter: Post-Treatment Value: None
  misc_feature: MA Experiment 20001556 PARAMETER Experiment Name: At_Drought_Soil_Dry_P Parameter: Timepoint (day) Value: 12
  misc_feature: MA Experiment 20001556 PARAMETER Experiment Name: At_Drought_Soil_Dry_P Parameter: Treatment Value: Drought vs. No Drought
  misc_feature: MA Experiment ID: 20001757 Result: Down-regulated in Transcription
  misc_feature: MA Experiment 20001757 PARAMETER Experiment Name: At_50mM_NH4NO3_L-to-H_P Parameter: Timepoint (hr) Value: 6
  misc_feature: MA Experiment 20001757 PARAMETER Experiment Name: At_50mM_NH4NO3_L-to-H_P Parameter: Tissue Value: Leaf
  misc_feature: MA Experiment 20001757 PARAMETER Experiment Name: At_50mM_NH4NO3_L-to-H_P Parameter: Treatment Value: 50mM NH4NO3 vs 100mM Mannitol
  misc_feature: MA Experiment ID: 20001904 Result: Up-regulated in Transcription
  misc_feature: MA Experiment 20001904 PARAMETER Experiment Name: At_Drought_Reproduction_P Parameter: Age (day) Value: 37
  misc_feature: MA Experiment 20001904 PARAMETER Experiment Name: At_Drought_Reproduction_P Parameter: Organism Value: A. thaliana
  misc_feature: MA Experiment 20001904 PARAMETER Experiment Name: At_Drought_Reproduction_P Parameter: Plant Line Value: WS
  misc_feature: MA Experiment 20001904 PARAMETER Experiment Name: At_Drought_Reproduction_P Parameter: Timepoint (day) Value: 7
  misc_feature: MA Experiment 20001904 PARAMETER Experiment Name: At_Drought_Reproduction_P Parameter: Tissue Value: Rosettes
  misc_feature: MA Experiment 20001904 PARAMETER Experiment Name: At_Drought_Reproduction_P Parameter: Treatment Value: Drought vs. No Drought
  misc_feature: MA Experiment ID: 20001905 Result: Up-regulated in Transcription
  misc_feature: MA Experiment 20001905 PARAMETER Experiment Name: At_Drought_Reproduction_P Parameter: Age (day) Value: 40
  misc_feature: MA Experiment 20001905 PARAMETER Experiment Name: At_Drought_Reproduction_P Parameter: Organism Value: A. thaliana
  misc_feature: MA Experiment 20001905 PARAMETER Experiment Name: At_Drought_Reproduction_P Parameter: Plant Line Value: WS
  misc_feature: MA Experiment 20001905 PARAMETER Experiment Name: At_Drought_Reproduction_P Parameter: Timepoint (day) Value: 10
  misc_feature: MA Experiment 20001905 PARAMETER Experiment Name: At_Drought_Reproduction_P Parameter: Tissue Value: Rosettes
  misc_feature: MA Experiment 20001905 PARAMETER Experiment Name: At_Drought_Reproduction_P Parameter: Treatment Value: Drought vs. No Drought
gtgtatctctttctaccttctctgaacctatagagccaacgaaaccagaggacagtgaacaaagaattgtataattcgatctcagctcgttcctttgttgattctttactccgactattatgaggattgtacgtgcgacggagacgttctcggcggagcttaaagagttcatgtgcgccgctgtgcaaaggaggaaagacgacgacggattcagaggctctcgtggcggtggtaaatctagaaatgccatggatcttgattctgacgccggaaacagattggtttgtgttactggtggtgtttcttaccttggtcgtgccattgttaaacgtcttcttgttcatggatactccgttagaatcgtcgttgattgtccagaggacaaagagaaagtgagtgagatggaagctgacgctgaaacggcgtcgtttagcaacatgattacttcagtggtttctcgattaacagagatcgatagcttaattaaagcgtttgatggttgtgctggcgttttccacacttctgcgtttgttgatcctgctggagtctctggatattcgaaatcaatggcggagttagaagcaaaagtgagcgagagtgtaatcgaagcgtgtacaagaacagcctcagtgagaaaatgtgtcttcacatcatctctcttagcctgcgcttggcaaaaaaatccctgtaatagtcttgaccactctgttatcaatgaagaaagctggagcgatgaacaactctgcatcgataataagctttggtatgcacttggaaaactaaaagccgagaaagctgcgtggagaatagctgattcaaaaggattaaagcttgcaactatatgtcctgctcttataactggtcctgacttcttcaaccgtaactccacttcaaccttggcttatctcaaaggagcaaaagagatgtatagtaacggattattagcgacaatggatgtgaacaggttggctaaagctcacgtatgtttgtgggaaggtttgggtaataaaactgcgtttggtagatacatttgtttcgacaccattctctctagagatggtgctgaaaagcttgcaaaagatatcgatgttcaaatcgaaaagatttgcggtaacagcaacgattcagatgcaaacacagaaacagaagcttctttacaaatatcagataaaaagctattagatcttatgtcaagaactctacgaagttgctaccatgagagttagctaggcacgacgacaaaaattaaacagagcagttctaagctattgacgtaacgttttgctcttattcttttcttcttttaaattatgctttatttatttgtttagtgtaatgataaatcattatgaaataaaaaaaatgagaatcattgttatttgtaattgtacgaatgtggtttgcgtggagggtggttgttgtaaagggcggtagagttggtgttcgtggaaaatttataaattcttcctatttcgg

SEQ ID NO: 30269 - protein, 368 aa, Arabidopsis thaliana
  peptide (1)..(368): Ceres Seq. ID no. 12422616
  misc_feature (44)..(368): Homolog of NCBI NO: 2960364 NR Description: cinnamoyl CoA reductase [Populus balsamifera
  misc_feature (55)..(319): Homolog of NCBI NO: 17978649 NR Description: cinnamoyl-CoA reductase [Pinus taeda]
  misc_feature (56)..(322): Homolog of NCBI NO: 21553382 NR Description: putative cinnamoyl CoA reductase [Arabidopsis
  misc_feature (56)..(357): Homolog of NCBI NO: 18400407 NR Description: putative cinnamoyl CoA reductase
  misc_feature (56)..(357): Homolog of NCBI NO: 25412171 NR Description: probable cinnamoyl CoA reductase [imported] -
  misc_feature (46)..(322): Homolog of NCBI NO: 21553548 NR Description: cinnamoyl-CoA reductase-like protein [Arabidopsis
  misc_feature (46)..(322): Homolog of NCBI NO: 15234751 NR Description: cinnamoyl-CoA reductase - like protein
  misc_feature (1)..(367): Homolog of NCBI NO: 34911590 NR Description: putative cinnamoyl CoA reductase
  misc_feature (1)..(368): Homolog of NCBI NO: 21553833 NR Description: cinnamoyl CoA reductase-like protein [Arabidopsis
  misc_feature (1)..(368): Homolog of NCBI NO: 15241467 NR Description: cinnamoyl CoA reductase - like protein
MRIVRATETFSAELKEFMCAAVQRRKDDDGFRGSRGGGKSRNAMDLDSDAGNRLVCVTGGVSYLGRAIVKRLLVHGYSVRIVVDCPEDKEKVSEMEADAETASFSNMITSVVSRLTEIDSLIKAFDGCAGVFHTSAFVDPAGVSGYSKSMAELEAKVSESVIEACTRTASVRKCVFTSSLLACAWQKNPCNSLDHSVINEESWSDEQLCIDNKLWYALGKLKAEKAAWRIADSKGLKLATICPALITGPDFFNRNSTSTLAYLKGAKEMYSNGLLATMDVNRLAKAHVCLWEGLGNKTAFGRYICFDTILSRDGAEKLAKDIDVQIEKICGNSNDSDANTETEASLQISDKKLLDLMSRTLRSCYHES

SEQ ID NO: 30270 - protein, 351 aa, Arabidopsis thaliana
  peptide (1)..(351): Ceres Seq. ID no. 12422617
  misc_feature (27)..(351): Homolog of NCBI NO: 2960364 NR Description: cinnamoyl CoA reductase [Populus balsamifera
  misc_feature (38)..(302): Homolog of NCBI NO: 17978649 NR Description: cinnamoyl-CoA reductase [Pinus taeda]
  misc_feature (39)..(305): Homolog of NCBI NO: 21553382 NR Description: putative cinnamoyl CoA reductase [Arabidopsis
  misc_feature (39)..(340): Homolog of NCBI NO: 18400407 NR Description: putative cinnamoyl CoA reductase
  misc_feature (39)..(340): Homolog of NCBI NO: 25412171 NR Description: probable cinnamoyl CoA reductase [imported] -
  misc_feature (29)..(305): Homolog of NCBI NO: 21553548 NR Description: cinnamoyl-CoA reductase-like protein [Arabidopsis
  misc_feature (29)..(305): Homolog of NCBI NO: 15234751 NR Description: cinnamoyl-CoA reductase - like protein
  misc_feature (1)..(350): Homolog of NCBI NO: 34911590 NR Description: putative cinnamoyl CoA reductase
  misc_feature (1)..(351): Homolog of NCBI NO: 21553833 NR Description: cinnamoyl CoA reductase-like protein [Arabidopsis
  misc_feature (1)..(351): Homolog of NCBI NO: 15241467 NR Description: cinnamoyl CoA reductase - like protein
MCAAVQRRKDDDGFRGSRGGGKSRNAMDLDSDAGNRLVCVTGGVSYLGRAIVKRLLVHGYSVRIVVDCPEDKEKVSEMEADAETASFSNMITSVVSRLTEIDSLIKAFDGCAGVFHTSAFVDPAGVSGYSKSMAELEAKVSESVIEACTRTASVRKCVFTSSLLACAWQKNPCNSLDHSVINEESWSDEQLCIDNKLWYALGKLKAEKAAWRIADSKGLKLATICPALITGPDFFNRNSTSTLAYLKGAKEMYSNGLLATMDVNRLAKAHVCLWEGLGNKTAFGRYICFDTILSRDGAEKLAKDIDVQIEKICGNSNDSDANTETEASLQISDKKLLDLMSRTLRSCYHES

SEQ ID NO: 30271 - protein, 325 aa, Arabidopsis thaliana
  peptide (1)..(325): Ceres Seq. ID no. 12422618
  misc_feature (1)..(325): Homolog of NCBI NO: 2960364 NR Description: cinnamoyl CoA reductase [Populus balsamifera
  misc_feature (12)..(276): Homolog of NCBI NO: 17978649 NR Description: cinnamoyl-CoA reductase [Pinus taeda]
  misc_feature (13)..(279): Homolog of NCBI NO: 21553382 NR Description: putative cinnamoyl CoA reductase [Arabidopsis
  misc_feature (13)..(314): Homolog of NCBI NO: 18400407 NR Description: putative cinnamoyl CoA reductase
  misc_feature (13)..(314): Homolog of NCBI NO: 25412171 NR Description: probable cinnamoyl CoA reductase [imported] -
  misc_feature (3)..(279): Homolog of NCBI NO: 21553548 NR Description: cinnamoyl-CoA reductase-like protein [Arabidopsis
  misc_feature (3)..(279): Homolog of NCBI NO: 15234751 NR Description: cinnamoyl-CoA reductase - like protein
  misc_feature (1)..(324): Homolog of NCBI NO: 34911590 NR Description: putative cinnamoyl CoA reductase
  misc_feature (1)..(325): Homolog of NCBI NO: 21553833 NR Description: cinnamoyl CoA reductase-like protein [Arabidopsis
  misc_feature (1)..(325): Homolog of NCBI NO: 15241467 NR Description: cinnamoyl CoA reductase - like protein
MDLDSDAGNRLVCVTGGVSYLGRAIVKRLLVHGYSVRIVVDCPEDKEKVSEMEADAETASFSNMITSVVSRLTEIDSLIKAFDGCAGVFHTSAFVDPAGVSGYSKSMAELEAKVSESVIEACTRTASVRKCVFTSSLLACAWQKNPCNSLDHSVINEESWSDEQLCIDNKLWYALGKLKAEKAAWRIADSKGLKLATICPALITGPDFFNRNSTSTLAYLKGAKEMYSNGLLATMDVNRLAKAHVCLWEGLGNKTAFGRYICFDTILSRDGAEKLAKDIDVQIEKICGNSNDSDANTETEASLQISDKKLLDLMSRTLRSCYHES

SEQ ID NO: 30272 - DNA, 1201 bp, Arabidopsis thaliana
  misc_feature (1)..(1201): Ceres Seq. ID no. 12384927
  misc_feature: MA Experiment ID: 108501 Result: Up-regulated in Transcription
  misc_feature: MA Experiment 108501 PARAMETER Experiment Name: At_ap2_floral_buds_cDNA_P Parameter: Plant Line Value: ap2 (Ler.)
  misc_feature: MA Experiment 108501 PARAMETER Experiment Name: At_ap2_floral_buds_cDNA_P Parameter: Tissue Value: Closed Flower
  misc_feature: MA Experiment ID: 108579 Result: Up-regulated in Transcription
  misc_feature: MA Experiment 108579 PARAMETER Experiment Name: At_4deg_Cold_cDNA_P Parameter: Temperature (deg C) Value: 4 vs. 22
  misc_feature: MA Experiment 108579 PARAMETER Experiment Name: At_4deg_Cold_cDNA_P Parameter: Timepoint (hr) Value: 6
  misc_feature: MA Experiment 108579 PARAMETER Experiment Name: At_4deg_Cold_cDNA_P Parameter: Tissue Value: Aerial
  misc_feature: MA Experiment ID: 108609 Result: Up-regulated in Transcription
  misc_feature: MA Experiment 108609 PARAMETER Experiment Name: At_100uM_ABA_cDNA_P Parameter: Timepoint (hr) Value: 24
  misc_feature: MA Experiment 108609 PARAMETER Experiment Name: At_100uM_ABA_cDNA_P Parameter: Tissue Value: Aerial
  misc_feature: MA Experiment 108609 PARAMETER Experiment Name: At_100uM_ABA_cDNA_P Parameter: Treatment Value: 100uM ABA vs. No Treatment
  misc_feature: MA Experiment ID: 20000111 Result: Down-regulated in Transcription
  misc_feature: MA Experiment 20000111 PARAMETER Experiment Name: At_42deg_Heat_cDNA_P Parameter: Temperature (deg C) Value: 42 vs. 22
  misc_feature: MA Experiment 20000111 PARAMETER Experiment Name: At_42deg_Heat_cDNA_P Parameter: Timepoint (hr) Value: 6
  misc_feature: MA Experiment 20000111 PARAMETER Experiment Name: At_42deg_Heat_cDNA_P Parameter: Tissue Value: Aerial
  misc_feature: MA Experiment ID: 20000113 Result: Down-regulated in Transcription
  misc_feature: MA Experiment 20000113 PARAMETER Experiment Name: At_42deg_Heat_cDNA_P Parameter: Temperature (deg C) Value: 42 vs. 22
  misc_feature: MA Experiment 20000113 PARAMETER Experiment Name: At_42deg_Heat_cDNA_P Parameter: Timepoint (hr) Value: 8
  misc_feature: MA Experiment 20000113 PARAMETER Experiment Name: At_42deg_Heat_cDNA_P Parameter: Tissue Value: Aerial
  misc_feature: MA Experiment ID: 20000144 Result: Down-regulated in Transcription
  misc_feature: MA Experiment 20000144 PARAMETER Experiment Name: At_42deg_Heat_cDNA_P Parameter: Temperature (deg C) Value: 42 vs. 22
  misc_feature: MA Experiment 20000144 PARAMETER Experiment Name: At_42deg_Heat_cDNA_P Parameter: Timepoint (hr) Value: 1
  misc_feature: MA Experiment 20000144 PARAMETER Experiment Name: At_42deg_Heat_cDNA_P Parameter: Tissue Value: Aerial
  misc_feature: MA Experiment ID: 20000171 Result: Down-regulated in Transcription
  misc_feature: MA Experiment 20000171 PARAMETER Experiment Name: At_42deg_Heat_P Parameter: Age (day) Value: 14
  misc_feature: MA Experiment 20000171 PARAMETER Experiment Name: At_42deg_Heat_P Parameter: Organism Value: A. thaliana
  misc_feature: MA Experiment 20000171 PARAMETER Experiment Name: At_42deg_Heat_P Parameter: Plant Line Value: WS
  misc_feature: MA Experiment 20000171 PARAMETER Experiment Name: At_42deg_Heat_P Parameter: Temperature (deg C) Value: 42 vs. 22
  misc_feature: MA Experiment 20000171 PARAMETER Experiment Name: At_42deg_Heat_P Parameter: Timepoint (hr) Value: 1
  misc_feature: MA Experiment 20000171 PARAMETER Experiment Name: At_42deg_Heat_P Parameter: Tissue Value: Aerial
  misc_feature: MA Experiment ID: 20000173 Result: Down-regulated in Transcription
  misc_feature: MA Experiment 20000173 PARAMETER Experiment Name: At_42deg_Heat_P Parameter: Age (day) Value: 14
  misc_feature: MA Experiment 20000173 PARAMETER Experiment Name: At_42deg_Heat_P Parameter: Organism Value: A. thaliana
  misc_feature: MA Experiment 20000173 PARAMETER Experiment Name: At_42deg_Heat_P Parameter: Plant Line Value: WS
  misc_feature: MA Experiment 20000173 PARAMETER Experiment Name: At_42deg_Heat_P Parameter: Temperature (deg C) Value: 42 vs. 22
  misc_feature: MA Experiment 20000173 PARAMETER Experiment Name: At_42deg_Heat_P Parameter: Timepoint (hr) Value: 6
  misc_feature: MA Experiment 20000173 PARAMETER Experiment Name: At_42deg_Heat_P Parameter: Tissue Value: Aerial
  misc_feature: MA Experiment ID: 20000180 Result: Up-regulated in Transcription
  misc_feature: MA Experiment 20000180 PARAMETER Experiment Name: At_Germinating_Seeds_P Parameter: Age (hr) Value: 24 vs. 0
  misc_feature: MA Experiment 20000180 PARAMETER Experiment Name: At_Germinating_Seeds_P Parameter: Tissue Value: Germinating Seeds
  misc_feature: MA Experiment ID: 20000184 Result: Down-regulated in Transcription
  misc_feature: MA Experiment 20000184 PARAMETER Experiment Name: At_Shoots__P Parameter: Age (day) Value: 7
  misc_feature: MA Experiment 20000184 PARAMETER Experiment Name: At_Shoots__P Parameter: Tissue Value: Shoots vs. Whole Plant
  misc_feature: MA Experiment ID: 20000185 Result: Down-regulated in Transcription
  misc_feature: MA Experiment 20000185 PARAMETER Experiment Name: At_Roots__P Parameter: Age (day) Value: 7 vs. 21
  misc_feature: MA Experiment 20000185 PARAMETER Experiment Name: At_Roots__P Parameter: Organism Value: A. thaliana
  misc_feature: MA Experiment 20000185 PARAMETER Experiment Name: At_Roots__P Parameter: Tissue Value: Roots vs. Whole Plant
  misc_feature: MA Experiment ID: 20000234 Result: Up-regulated in Transcription
  misc_feature: MA Experiment 20000234 PARAMETER Experiment Name: At_Siliques_P Parameter: Age (day) Value: 21
  misc_feature: MA Experiment 20000234 PARAMETER Experiment Name: At_Siliques_P Parameter: Organism Value: A. thaliana
  misc_feature: MA Experiment 20000234 PARAMETER Experiment Name: At_Siliques_P Parameter: Plant Line Value: WS
  misc_feature: MA Experiment 20000234 PARAMETER Experiment Name: At_Siliques_P Parameter: Tissue Value: Less Than 5mm Siliques vs. Whole Plant
  misc_feature: MA Experiment ID: 20000235 Result: Up-regulated in Transcription
  misc_feature: MA Experiment 20000235 PARAMETER Experiment Name: At_Siliques_P Parameter: Age (day) Value: 21
  misc_feature: MA Experiment 20000235 PARAMETER Experiment Name: At_Siliques_P Parameter: Organism Value: A. thaliana
  misc_feature: MA Experiment 20000235 PARAMETER Experiment Name: At_Siliques_P Parameter: Plant Line Value: WS
  misc_feature: MA Experiment 20000235 PARAMETER Experiment Name: At_Siliques_P Parameter: Tissue Value: 5-10mm Siliques vs. Whole Plant
  misc_feature: MA Experiment ID: 20000286 Result: Up-regulated in Transcription
  misc_feature: MA Experiment 20000286 PARAMETER Experiment Name: At_Open_Flower_P Parameter: Age (day) Value: 21
  misc_feature: MA Experiment 20000286 PARAMETER Experiment Name: At_Open_Flower_P Parameter: Plant Line Value: WS
  misc_feature: MA Experiment 20000286 PARAMETER Experiment Name: At_Open_Flower_P Parameter: Tissue Value: Half Open vs. Whole Plant
  misc_feature: MA Experiment ID: 20000437 Result: Down-regulated in Transcription
  misc_feature: MA Experiment 20000437 PARAMETER Experiment Name: At_Drought_P Parameter: Age (day) Value: 8
  misc_feature: MA Experiment 20000437 PARAMETER Experiment Name: At_Drought_P Parameter: Organism Value: A. thaliana
  misc_feature: MA Experiment 20000437 PARAMETER Experiment Name: At_Drought_P Parameter: Plant Line Value: WS
  misc_feature: MA Experiment 20000437 PARAMETER Experiment Name: At_Drought_P Parameter: Timepoint (hr) Value: 24
  misc_feature: MA Experiment 20000437 PARAMETER Experiment Name: At_Drought_P Parameter: Tissue Value: Whole Plant
  misc_feature: MA Experiment 20000437 PARAMETER Experiment Name: At_Drought_P Parameter: Treatment Value: Drought vs. No Drought
  misc_feature: MA Experiment ID: 20000438 Result: Down-regulated in Transcription
  misc_feature: MA Experiment 20000438 PARAMETER Experiment Name: At_Shoots__P Parameter: Age (day) Value: 14
  misc_feature: MA Experiment 20000438 PARAMETER Experiment Name: At_Shoots__P Parameter: Tissue Value: Shoots vs. Whole Plant
  misc_feature: MA Experiment ID: 20000439 Result: Down-regulated in Transcription
  misc_feature: MA Experiment 20000439 PARAMETER Experiment Name: At_Roots__P Parameter: Age (day) Value: 14 vs. 21
  misc_feature: MA Experiment 20000439 PARAMETER Experiment Name: At_Roots__P Parameter: Organism Value: A. thaliana
  misc_feature: MA Experiment 20000439 PARAMETER Experiment Name: At_Roots__P Parameter: Tissue Value: Roots vs. Whole Plant
  misc_feature: MA Experiment ID: 20000573 Result: Down-regulated in Transcription
  misc_feature: MA Experiment 20000573 PARAMETER Experiment Name: At_100uM_ABA_Mutants__P Parameter: Organism Value: A. thaliana
  misc_feature: MA Experiment 20000573 PARAMETER Experiment Name: At_100uM_ABA_Mutants__P Parameter: Plant Line Value: CS22 vs. Ler wt
  misc_feature: MA Experiment 20000573 PARAMETER Experiment Name: At_100uM_ABA_Mutants__P Parameter: Timepoint (hr) Value: N/A
  misc_feature: MA Experiment 20000573 PARAMETER Experiment Name: At_100uM_ABA_Mutants__P Parameter: Tissue Value: Whole Plant
  misc_feature: MA Experiment 20000573 PARAMETER Experiment Name: At_100uM_ABA_Mutants__P Parameter: Treatment Value: None
  misc_feature: MA Experiment ID: 20000574 Result: Down-regulated in Transcription
  misc_feature: MA Experiment 20000574 PARAMETER Experiment Name: At_100uM_ABA_Mutants__P Parameter: Organism Value: A. thaliana
  misc_feature: MA Experiment 20000574 PARAMETER Experiment Name: At_100uM_ABA_Mutants__P Parameter: Plant Line Value: CS23 vs. Ler wt
  misc_feature: MA Experiment 20000574 PARAMETER Experiment Name: At_100uM_ABA_Mutants__P Parameter: Timepoint (hr) Value: N/A
  misc_feature: MA Experiment 20000574 PARAMETER Experiment Name: At_100uM_ABA_Mutants__P Parameter: Tissue Value: Whole Plant
  misc_feature: MA Experiment 20000574 PARAMETER Experiment Name: At_100uM_ABA_Mutants__P Parameter: Treatment Value: None
  misc_feature: MA Experiment ID: 20001248 Result: Down-regulated in Transcription
  misc_feature: MA Experiment 20001248 PARAMETER Experiment Name: At_Far-red-induction_P Parameter: Age (day) Value: 7
  misc_feature: MA Experiment 20001248 PARAMETER Experiment Name: At_Far-red-induction_P Parameter: Light Value: Far-red vs. White
  misc_feature: MA Experiment 20001248 PARAMETER Experiment Name: At_Far-red-induction_P Parameter: Organism Value: A. thaliana
  misc_feature: MA Experiment 20001248 PARAMETER Experiment Name: At_Far-red-induction_P Parameter: Plant Line Value: Columbia
  misc_feature: MA Experiment 20001248 PARAMETER Experiment Name: At_Far-red-induction_P Parameter: Timepoint (hr) Value: 4
  misc_feature: MA Experiment 20001248 PARAMETER Experiment Name: At_Far-red-induction_P Parameter: Tissue Value: Whole Plant
  misc_feature: MA Experiment ID: 20001450 Result: Down-regulated in Transcription
  misc_feature: MA Experiment 20001450 PARAMETER Experiment Name: At_Far-red-induction_P Parameter: Age (day) Value: 7
  misc_feature: MA Experiment 20001450 PARAMETER Experiment Name: At_Far-red-induction_P Parameter: Light Value: Far-red vs. White
  misc_feature: MA Experiment 20001450 PARAMETER Experiment Name: At_Far-red-induction_P Parameter: Organism Value: A. thaliana
  misc_feature: MA Experiment 20001450 PARAMETER Experiment Name: At_Far-red-induction_P Parameter: Plant Line Value: Columbia
  misc_feature: MA Experiment 20001450 PARAMETER Experiment Name: At_Far-red-induction_P Parameter: Timepoint (hr) Value: 8
  misc_feature: MA Experiment 20001450 PARAMETER Experiment Name: At_Far-red-induction_P Parameter: Tissue Value: Whole Plant
  misc_feature: MA Experiment ID: 20001560 Result: Up-regulated in Transcription
  misc_feature: MA Experiment 20001560 PARAMETER Experiment Name: At_Drought_Soil_Dry_P Parameter: Age (day) Value: 28
  misc_feature: MA Experiment 20001560 PARAMETER Experiment Name: At_Drought_Soil_Dry_P Parameter: Organism Value: A. thaliana
  misc_feature: MA Experiment 20001560 PARAMETER Experiment Name: At_Drought_Soil_Dry_P Parameter: Plant Line Value: WS
  misc_feature: MA Experiment 20001560 PARAMETER Experiment Name: At_Drought_Soil_Dry_P Parameter: Post Timepoint (hr) Value: None
  misc_feature: MA Experiment 20001560 PARAMETER Experiment Name: At_Drought_Soil_Dry_P Parameter: Post-Treatment Value: None
  misc_feature: MA Experiment 20001560 PARAMETER Experiment Name: At_Drought_Soil_Dry_P Parameter: Timepoint (day) Value: 14
  misc_feature: MA Experiment 20001560 PARAMETER Experiment Name: At_Drought_Soil_Dry_P Parameter: Treatment Value: Drought vs. No Drought
  misc_feature: MA Experiment ID: 20001906 Result: Down-regulated in Transcription
  misc_feature: MA Experiment 20001906 PARAMETER Experiment Name: At_Drought_Reproduction_P Parameter: Age (day) Value: 35
  misc_feature: MA Experiment 20001906 PARAMETER Experiment Name: At_Drought_Reproduction_P Parameter: Organism Value: A. thaliana
  misc_feature: MA Experiment 20001906 PARAMETER Experiment Name: At_Drought_Reproduction_P Parameter: Plant Line Value: WS
  misc_feature: MA Experiment 20001906 PARAMETER Experiment Name: At_Drought_Reproduction_P Parameter: Timepoint (day) Value: 5
  misc_feature: MA Experiment 20001906 PARAMETER Experiment Name: At_Drought_Reproduction_P Parameter: Tissue Value: Siliques
  misc_feature: MA Experiment 20001906 PARAMETER Experiment Name: At_Drought_Reproduction_P Parameter: Treatment Value: Drought vs. No Drought
  misc_feature: MA Experiment ID: 20001907 Result: Down-regulated in Transcription
  misc_feature: MA Experiment 20001907 PARAMETER Experiment Name: At_Drought_Reproduction_P Parameter: Age (day) Value: 37
  misc_feature: MA Experiment 20001907 PARAMETER Experiment Name: At_Drought_Reproduction_P Parameter: Organism Value: A. thaliana
  misc_feature: MA Experiment 20001907 PARAMETER Experiment Name: At_Drought_Reproduction_P Parameter: Plant Line Value: WS
  misc_feature: MA Experiment 20001907 PARAMETER Experiment Name: At_Drought_Reproduction_P Parameter: Timepoint (day) Value: 7
  misc_feature: MA Experiment 20001907 PARAMETER Experiment Name: At_Drought_Reproduction_P Parameter: Tissue Value: Siliques
  misc_feature: MA Experiment 20001907 PARAMETER Experiment Name: At_Drought_Reproduction_P Parameter: Treatment Value: Drought vs. No Drought
  misc_feature: MA Experiment ID: 20001908 Result: Down-regulated in Transcription
  misc_feature: MA Experiment 20001908 PARAMETER Experiment Name: At_Drought_Reproduction_P Parameter: Age (day) Value: 40
  misc_feature: MA Experiment 20001908 PARAMETER Experiment Name: At_Drought_Reproduction_P Parameter: Organism Value: A. thaliana
  misc_feature: MA Experiment 20001908 PARAMETER Experiment Name: At_Drought_Reproduction_P Parameter: Plant Line Value: WS
  misc_feature: MA Experiment 20001908 PARAMETER Experiment Name: At_Drought_Reproduction_P Parameter: Timepoint (day) Value: 10
  misc_feature: MA Experiment 20001908 PARAMETER Experiment Name: At_Drought_Reproduction_P Parameter: Tissue Value: Siliques
  misc_feature: MA Experiment 20001908 PARAMETER Experiment Name: At_Drought_Reproduction_P Parameter: Treatment Value: Drought vs. No Drought
  misc_feature: MA Experiment ID: 20001911 Result: Down-regulated in Transcription
  misc_feature: MA Experiment 20001911 PARAMETER Experiment Name: At_Drought_Reproduction_P Parameter: Age (day) Value: 40
  misc_feature: MA Experiment 20001911 PARAMETER Experiment Name: At_Drought_Reproduction_P Parameter: Organism Value: A. thaliana
  misc_feature: MA Experiment 20001911 PARAMETER Experiment Name: At_Drought_Reproduction_P Parameter: Plant Line Value: WS
  misc_feature: MA Experiment 20001911 PARAMETER Experiment Name: At_Drought_Reproduction_P Parameter: Timepoint (day) Value: 10
  misc_feature: MA Experiment 20001911 PARAMETER Experiment Name: At_Drought_Reproduction_P Parameter: Tissue Value: Flowers
  misc_feature: MA Experiment 20001911 PARAMETER Experiment Name: At_Drought_Reproduction_P Parameter: Treatment Value: Drought vs. No Drought
aatgaacgtataaagtaggatttcataatgcaacgtctaatagctagaacataagtgattcaaaataagttttctcaagtttggcgcatgtagttgagtttcatggagatgtatgtactttaaatttttaaattttggcagataacatcattcaagtgcggtggatttgcaatgggaatctcaacaaaccataccacgttcgatggacttagtttcaaaacattcctcgaaaacttagcttctctacttcacgagaagcccttatcaacacctccatgcaacgaccgtactcttctcaaagctcgtgatccaccaagtgtcgcattcccacaccacgagcttgtcaagttccaagactgtgagacaacaacagtcttcgaagctacttcagagcacttagacttcaagatcttcaagctatcctctgaacaaatcaagaagctcaaggagagagcctcagagactagtaacggtaatgttcgcgtgacgggtttcaacgttgtaaccgctttggtctggaggtgcaaggcactctctgtagcagcagaggaaggagaagaaaccaatcttgaaagagaatcaacgattctttatgctgtggacattagagggaggctgaatcctgagcttccaccgtcttacactggaaacgcggttttaacggcatacgcaaaggagaaatgcaaggcattgcttgaagagccgtttgggaggattgtagaaatggtaggagaagggtcaaagaggataacggatgagtatgcgcggtctgctatagattggggagagttatacaaagggtttccccatggggaagttttggtttcttcttggtggaaactcggattcgcagaggttgagtatccttggggaaagcctaagtatagctgtcccgttgtctatcatcgaaaagacattgttttgctgtttccggacatcgatggagatagtaaaggtgtttatgtcttggctgctttgccttctaaggagatgtccaagtttcagcactggtttgaagacactctgtgctgatttcgtgatggcttcactttgcattgctattgctttattttacttctttgacgattataaacacattatggtattttatatttgtatacggttgaaaagtgaacgttataaaacatctattttctgctactttctctaagtataaacaagcacaaaagatttaaaggtg

SEQ ID NO: 30273 - protein, 286 aa, Arabidopsis thaliana
  peptide (1)..(286): Ceres Seq. ID no. 12384928
  misc_feature (1)..(284): Pfam Name: Transferase family Pfam Description: Transferase family
  misc_feature (1)..(283): Homolog of NCBI NO: 27475616 NR Description: hydroxycinnamoyl transferase [Nicotiana tabacum]
  misc_feature (1)..(285): Homolog of NCBI NO: 20161743 NR Description: N-hydroxycinnamoyl/benzoyltransferase-like
  misc_feature (1)..(278): Homolog of NCBI NO: 21553692 NR Description: acyltransferase-like protein [Arabidopsis
  misc_feature (1)..(278): Homolog of NCBI NO: 34222064 NR Description: At3g48720 [Arabidopsis thaliana]
  misc_feature (1)..(278): Homolog of NCBI NO: 15229017 NR Description: putative protein; protein id: At3g48720.1
  misc_feature (1)..(278): Homolog of NCBI NO: 15242820 NR Description: acyltransferase-like protein
  misc_feature (1)..(281): Homolog of NCBI NO: 30693725 NR Description: transferase family [Arabidopsis thaliana]
  misc_feature (1)..(281): Homolog of NCBI NO: 30693723 NR Description: transferase family [Arabidopsis thaliana]
  misc_feature (1)..(286): Homolog of NCBI NO: 18408287 NR Description: expressed protein
  misc_feature (1)..(286): Homolog of NCBI NO: 7487802 NR Description: hypothetical protein T8F5.23 - Arabidopsis
MGISTNHTTFDGLSFKTFLENLASLLHEKPLSTPPCNDRTLLKARDPPSVAFPHHELVKFQDCETTTVFEATSEHLDFKIFKLSSEQIKKLKERASETSNGNVRVTGFNVVTALVWRCKALSVAAEEGEETNLERESTILYAVDIRGRLNPELPPSYTGNAVLTAYAKEKCKALLEEPFGRIVEMVGEGSKRITDEYARSAIDWGELYKGFPHGEVLVSSWWKLGFAEVEYPWGKPKYSCPVVYHRKDIVLLFPDIDGDSKGVYVLAALPSKEMSKFQHWFEDTLC

SEQ ID NO: 30274 - DNA, 2221 bp, Arabidopsis thaliana; identical to SEQ ID NO: 30144
  misc_feature (1)..(2221): Ceres Seq. ID no. 13490207
  misc_feature: MA Experiment ID: 108434 Result: Down-regulated in Transcription
  misc_feature: MA Experiment 108434 PARAMETER Experiment Name: At_Root_Tips_cDNA_P Parameter: Tissue Value: Root Tips
  misc_feature: MA Experiment ID: 108461 Result: Up-regulated in Transcription
  misc_feature: MA Experiment 108461 PARAMETER Experiment Name: At_Germinating_Seeds_cDNA_P Parameter: Age (day) Value: 1 vs. 0
  misc_feature: MA Experiment 108461 PARAMETER Experiment Name: At_Germinating_Seeds_cDNA_P Parameter: Tissue Value: Germinating Seeds
  misc_feature: MA Experiment ID: 108462 Result: Up-regulated in Transcription
  misc_feature: MA Experiment 108462 PARAMETER Experiment Name: At_Germinating_Seeds_cDNA_P Parameter: Age (day) Value: 2 vs. 0
  misc_feature: MA Experiment 108462 PARAMETER Experiment Name: At_Germinating_Seeds_cDNA_P Parameter: Tissue Value: Germinating Seeds
  misc_feature: MA Experiment ID: 108464 Result: Up-regulated in Transcription
  misc_feature: MA Experiment 108464 PARAMETER Experiment Name: At_Germinating_Seeds_cDNA_P Parameter: Age (day) Value: 4 vs. 0
  misc_feature: MA Experiment 108464 PARAMETER Experiment Name: At_Germinating_Seeds_cDNA_P Parameter: Tissue Value: Germinating Seeds
  misc_feature: MA Experiment ID: 108488 Result: Down-regulated in Transcription
  misc_feature: MA Experiment ID: 108489 Result: Up-regulated in Transcription
  misc_feature: MA Experiment ID: 108501 Result: Down-regulated in Transcription
  misc_feature: MA Experiment 108501 PARAMETER Experiment Name: At_ap2_floral_buds_cDNA_P Parameter: Plant Line Value: ap2 (Ler.)
  misc_feature: MA Experiment 108501 PARAMETER Experiment Name: At_ap2_floral_buds_cDNA_P Parameter: Tissue Value: Closed Flower
  misc_feature: MA Experiment ID: 108561 Result: Up-regulated in Transcription
  misc_feature: MA Experiment 108561 PARAMETER Experiment Name: At_100uM_ABA_cDNA_P Parameter: Timepoint (hr) Value: 6
  misc_feature: MA Experiment 108561 PARAMETER Experiment Name: At_100uM_ABA_cDNA_P Parameter: Tissue Value: Aerial
  misc_feature: MA Experiment 108561 PARAMETER Experiment Name: At_100uM_ABA_cDNA_P Parameter: Treatment Value: 100uM ABA vs. No Treatment
  misc_feature: MA Experiment ID: 108574 Result: Down-regulated in Transcription
  misc_feature: MA Experiment 108574 PARAMETER Experiment Name: At_Wounding__cDNA_P Parameter: Timepoint (hr) Value: 1
  misc_feature: MA Experiment 108574 PARAMETER Experiment Name: At_Wounding__cDNA_P Parameter: Tissue Value: Aerial
  misc_feature: MA Experiment 108574 PARAMETER Experiment Name: At_Wounding__cDNA_P Parameter: Treatment Value: Wounding vs. No Wounding
  misc_feature: MA Experiment ID: 108579 Result: Down-regulated in Transcription
  misc_feature: MA Experiment 108579 PARAMETER Experiment Name: At_4deg_Cold_cDNA_P Parameter: Temperature (deg C) Value: 4 vs. 22
  misc_feature: MA Experiment 108579 PARAMETER Experiment Name: At_4deg_Cold_cDNA_P Parameter: Timepoint (hr) Value: 6
  misc_feature: MA Experiment 108579 PARAMETER Experiment Name: At_4deg_Cold_cDNA_P Parameter: Tissue Value: Aerial
  misc_feature: MA Experiment ID: 108594 Result: Up-regulated in Transcription
  misc_feature: MA Experiment 108594 PARAMETER Experiment Name: At_Ler-rhl_Root_cDNA_P Parameter: Plant Line Value: null
  misc_feature: MA Experiment ID: 108595 Result: Up-regulated in Transcription
  misc_feature: MA Experiment 108595 PARAMETER Experiment Name: At_Ler-pi_Ovule_cDNA_P Parameter: Plant Line Value: null
  misc_feature: MA Experiment ID: 108607 Result: Up-regulated in Transcription
  misc_feature: MA Experiment 108607 PARAMETER Experiment Name: At_100uM_ABA_cDNA_P Parameter: Timepoint (hr) Value: 4
  misc_feature: MA Experiment 108607 PARAMETER Experiment Name: At_100uM_ABA_cDNA_P Parameter: Tissue Value: Aerial
  misc_feature: MA Experiment 108607 PARAMETER Experiment Name: At_100uM_ABA_cDNA_P Parameter: Treatment Value: 100uM ABA vs. No Treatment
  misc_feature: MA Experiment ID: 20000069 Result: Up-regulated in Transcription
  misc_feature: MA Experiment 20000069 PARAMETER Experiment Name: At_100uM_ABA_Mutants_cDNA_P Parameter: Plant Line Value: CS23
  misc_feature: MA Experiment 20000069 PARAMETER Experiment Name: At_100uM_ABA_Mutants_cDNA_P Parameter: Timepoint (hr) Value: 6
  misc_feature: MA Experiment 20000069 PARAMETER Experiment Name: At_100uM_ABA_Mutants_cDNA_P Parameter: Tissue Value: Aerial
  misc_feature: MA Experiment 20000069 PARAMETER Experiment Name: At_100uM_ABA_Mutants_cDNA_P Parameter: Treatment Value: 100uM ABA vs. No Treatment
  misc_feature: MA Experiment ID: 20000070 Result: Up-regulated in Transcription
  misc_feature: MA Experiment 20000070 PARAMETER Experiment Name: At_100uM_ABA_Mutants_cDNA_P Parameter: Plant Line Value: CS24
  misc_feature: MA Experiment 20000070 PARAMETER Experiment Name: At_100uM_ABA_Mutants_cDNA_P Parameter: Timepoint (hr) Value: 6
  misc_feature: MA Experiment 20000070 PARAMETER Experiment Name: At_100uM_ABA_Mutants_cDNA_P Parameter: Tissue Value: Aerial
  misc_feature: MA Experiment 20000070 PARAMETER Experiment Name: At_100uM_ABA_Mutants_cDNA_P Parameter: Treatment Value: 100uM ABA vs. No Treatment
  misc_feature: MA Experiment ID: 20000086 Result: Up-regulated in Transcription
  misc_feature: MA Experiment 20000086 PARAMETER Experiment Name: At_100uM_ABA_Mutants_cDNA_P Parameter: Plant Line Value: CS22
  misc_feature: MA Experiment 20000086 PARAMETER Experiment Name: At_100uM_ABA_Mutants_cDNA_P Parameter: Timepoint (hr) Value: 6
  misc_feature: MA Experiment 20000086 PARAMETER Experiment Name: At_100uM_ABA_Mutants_cDNA_P Parameter: Tissue Value: Aerial
  misc_feature: MA Experiment 20000086 PARAMETER Experiment Name: At_100uM_ABA_Mutants_cDNA_P Parameter: Treatment Value: 100uM ABA vs. No Treatment
  misc_feature: MA Experiment ID: 20000087 Result: Up-regulated in Transcription
  misc_feature: MA Experiment 20000087 PARAMETER Experiment Name: At_100uM_ABA_Mutants_cDNA_P Parameter: Plant Line Value: WS
  misc_feature: MA Experiment 20000087 PARAMETER Experiment Name: At_100uM_ABA_Mutants_cDNA_P Parameter: Timepoint (hr) Value: 6
  misc_feature: MA Experiment 20000087 PARAMETER Experiment Name: At_100uM_ABA_Mutants_cDNA_P Parameter: Tissue Value: Aerial
  misc_feature: MA Experiment 20000087 PARAMETER Experiment Name: At_100uM_ABA_Mutants_cDNA_P Parameter: Treatment Value: 100uM ABA vs. No Treatment
  misc_feature: MA Experiment ID: 20000117 Result: Up-regulated in Transcription
  misc_feature: MA Experiment 20000117 PARAMETER Experiment Name: At_100uM_ABA_Mutants_cDNA_P Parameter: Plant Line Value: Columbia
  misc_feature: MA Experiment 20000117 PARAMETER Experiment Name: At_100uM_ABA_Mutants_cDNA_P Parameter: Timepoint (hr) Value: 6
  misc_feature: MA Experiment 20000117 PARAMETER Experiment Name: At_100uM_ABA_Mutants_cDNA_P Parameter: Tissue Value: Aerial
  misc_feature: MA Experiment 20000117 PARAMETER Experiment Name: At_100uM_ABA_Mutants_cDNA_P Parameter: Treatment Value: 100uM ABA vs. No Treatment
  misc_feature: MA Experiment ID: 20000180 Result: Up-regulated in Transcription
  misc_feature: MA Experiment 20000180 PARAMETER Experiment Name: At_Germinating_Seeds_P Parameter: Age (hr) Value: 24 vs. 0
  misc_feature: MA Experiment 20000180 PARAMETER Experiment Name: At_Germinating_Seeds_P Parameter: Tissue Value: Germinating Seeds
  misc_feature: MA Experiment ID: 20000224 Result: Down-regulated in Transcription
  misc_feature: MA Experiment ID: 20000234 Result: Down-regulated in Transcription
  misc_feature: MA Experiment 20000234 PARAMETER Experiment Name: At_Siliques_P Parameter: Age (day) Value: 21
  misc_feature: MA Experiment 20000234 PARAMETER Experiment Name: At_Siliques_P Parameter: Organism Value: A. thaliana
  misc_feature: MA Experiment 20000234 PARAMETER Experiment Name: At_Siliques_P Parameter: Plant Line Value: WS
  misc_feature: MA Experiment 20000234 PARAMETER Experiment Name: At_Siliques_P Parameter: Tissue Value: Less Than 5mm Siliques vs. Whole Plant
  misc_feature: MA Experiment ID: 20000264 Result: Down-regulated in Transcription
  misc_feature: MA Experiment 20000264 PARAMETER Experiment Name: At_Open_Flower_P Parameter: Age (day) Value: 21
  misc_feature: MA Experiment 20000264 PARAMETER Experiment Name: At_Open_Flower_P Parameter: Plant Line Value: WS
  misc_feature: MA Experiment 20000264 PARAMETER Experiment Name: At_Open_Flower_P Parameter: Tissue Value: Open Flower vs. Whole Plant
  misc_feature: MA Experiment ID: 20000265 Result: Down-regulated in Transcription
  misc_feature: MA Experiment 20000265 PARAMETER Experiment Name: At_Open_Flower_P Parameter: Age (day) Value: 21
  misc_feature: MA Experiment 20000265 PARAMETER Experiment Name: At_Open_Flower_P Parameter: Plant Line Value: WS
  misc_feature: MA Experiment 20000265 PARAMETER Experiment Name: At_Open_Flower_P Parameter: Tissue Value: Closed Flower vs. Whole Plant
  misc_feature: MA Experiment ID: 20000268 Result: Down-regulated in Transcription
  misc_feature: MA Experiment 20000268 PARAMETER Experiment Name: At_100mM_NaCl__P Parameter: Age (day) Value: 14
  misc_feature: MA Experiment 20000268 PARAMETER Experiment Name: At_100mM_NaCl__P Parameter: Organism Value: A. thaliana
  misc_feature: MA Experiment 20000268 PARAMETER Experiment Name: At_100mM_NaCl__P Parameter: Plant Line Value: WS
  misc_feature: MA Experiment 20000268 PARAMETER Experiment Name: At_100mM_NaCl__P Parameter: Timepoint (hr) Value: 6
  misc_feature: MA Experiment 20000268 PARAMETER Experiment Name: At_100mM_NaCl__P Parameter: Tissue Value: Whole Plant
  misc_feature: MA Experiment 20000268 PARAMETER Experiment Name: At_100mM_NaCl__P Parameter: Treatment Value: 100mM NaCl vs. No Treatment
  misc_feature: MA Experiment ID: 20000286 Result: Down-regulated in Transcription
  misc_feature: MA Experiment 20000286 PARAMETER Experiment Name: At_Open_Flower_P Parameter: Age (day) Value: 21
  misc_feature: MA Experiment 20000286 PARAMETER Experiment Name: At_Open_Flower_P Parameter: Plant Line Value: WS
  misc_feature: MA Experiment 20000286 PARAMETER Experiment Name: At_Open_Flower_P Parameter: Tissue Value: Half Open vs. Whole Plant
  misc_feature: MA Experiment ID: 20000308 Result: Down-regulated in Transcription
  misc_feature: MA Experiment 20000308 PARAMETER Experiment Name: At_100mM_NaCl__P Parameter: Age (day) Value: 17
  misc_feature: MA Experiment 20000308 PARAMETER Experiment Name: At_100mM_NaCl__P Parameter: Organism Value: A. thaliana
  misc_feature: MA Experiment 20000308 PARAMETER Experiment Name: At_100mM_NaCl__P Parameter: Plant Line Value: WS
  misc_feature: MA Experiment 20000308 PARAMETER Experiment Name: At_100mM_NaCl__P Parameter: Timepoint (hr) Value: 72
  misc_feature: MA Experiment 20000308 PARAMETER Experiment Name: At_100mM_NaCl__P Parameter: Tissue Value: Whole Plant
  misc_feature: MA Experiment 20000308 PARAMETER Experiment Name: At_100mM_NaCl__P Parameter: Treatment Value: 100mM NaCl vs. No Treatment
  misc_feature: MA Experiment ID: 20000438 Result: Down-regulated in Transcription
  misc_feature: MA Experiment 20000438 PARAMETER Experiment Name: At_Shoots__P Parameter: Age (day) Value: 14
  misc_feature: MA Experiment 20000438 PARAMETER Experiment Name: At_Shoots__P Parameter: Tissue Value: Shoots vs. Whole Plant
  misc_feature: MA Experiment ID: 20000439 Result: Down-regulated in Transcription
  misc_feature: MA Experiment 20000439 PARAMETER Experiment Name: At_Roots__P Parameter: Age (day) Value: 14 vs. 21
  misc_feature: MA Experiment 20000439 PARAMETER Experiment Name: At_Roots__P Parameter: Organism Value: A. thaliana
  misc_feature: MA Experiment 20000439 PARAMETER Experiment Name: At_Roots__P Parameter: Tissue Value: Roots vs. Whole Plant
  misc_feature: MA Experiment ID: 20000441 Result: Up-regulated in Transcription
  misc_feature: MA Experiment 20000441 PARAMETER Experiment Name: At_1uM_BR-BRZ__P Parameter: Tissue Value: Shoot Apices
  misc_feature: MA Experiment 20000441 PARAMETER Experiment Name: At_1uM_BR-BRZ__P Parameter: Treatment Value: 1uM BR vs. No Treatment
  misc_feature: MA Experiment ID: 20000443 Result: Up-regulated in Transcription
  misc_feature: MA Experiment 20000443 PARAMETER Experiment Name: At_1uM_BR-BRZ__P Parameter: Tissue Value: Shoot Apices
  misc_feature: MA Experiment 20000443 PARAMETER Experiment Name: At_1uM_BR-BRZ__P Parameter: Treatment Value: 1uM BRZ vs. No Treatment
  misc_feature: MA Experiment ID: 20000575 Result: Down-regulated in Transcription
  misc_feature: MA Experiment 20000575 PARAMETER Experiment Name: At_100uM_ABA_Mutants__P Parameter: Organism Value: A. thaliana
  misc_feature: MA Experiment 20000575 PARAMETER Experiment Name: At_100uM_ABA_Mutants__P Parameter: Plant Line Value: CS22
  misc_feature: MA Experiment 20000575 PARAMETER Experiment Name: At_100uM_ABA_Mutants__P Parameter: Timepoint (hr) Value: 6
  misc_feature: MA Experiment 20000575 PARAMETER Experiment Name: At_100uM_ABA_Mutants__P Parameter: Tissue Value: Whole Plant
  misc_feature: MA Experiment 20000575 PARAMETER Experiment Name: At_100uM_ABA_Mutants__P Parameter: Treatment Value: 1uM ABA vs. No Treatment
  misc_feature: MA Experiment ID: 20000578 Result: Up-regulated in Transcription
  misc_feature: MA Experiment 20000578 PARAMETER Experiment Name: At_CS3726__P Parameter: Organism Value: A. thaliana
  misc_feature: MA Experiment 20000578 PARAMETER Experiment Name: At_CS3726__P Parameter: Plant Line Value: CS3726
  misc_feature: MA Experiment 20000578 PARAMETER Experiment Name: At_CS3726__P Parameter: Tissue Value: Whole Plant
  misc_feature: MA Experiment ID: 20001450 Result: Up-regulated in Transcription
  misc_feature: MA Experiment 20001450 PARAMETER Experiment Name: At_Far-red-induction_P Parameter: Age (day) Value: 7
  misc_feature: MA Experiment 20001450 PARAMETER Experiment Name: At_Far-red-induction_P Parameter: Light Value: Far-red vs. White
  misc_feature: MA Experiment 20001450 PARAMETER Experiment Name: At_Far-red-induction_P Parameter: Organism Value: A. thaliana
  misc_feature: MA Experiment 20001450 PARAMETER Experiment Name: At_Far-red-induction_P Parameter: Plant Line Value: Columbia
  misc_feature: MA Experiment 20001450 PARAMETER Experiment Name: At_Far-red-induction_P Parameter: Timepoint (hr) Value: 8
  misc_feature: MA Experiment 20001450 PARAMETER Experiment Name: At_Far-red-induction_P Parameter: Tissue Value: Whole Plant
  misc_feature: MA Experiment ID: 20001451 Result: Up-regulated in Transcription
  misc_feature: MA Experiment 20001451 PARAMETER Experiment Name: At_Far-red-induction_P Parameter: Age (day) Value: 7
  misc_feature: MA Experiment 20001451 PARAMETER Experiment Name: At_Far-red-induction_P Parameter: Light Value: Far-red vs. White
  misc_feature: MA Experiment 20001451 PARAMETER Experiment Name: At_Far-red-induction_P Parameter: Organism Value: A. thaliana
  misc_feature: MA Experiment 20001451 PARAMETER Experiment Name: At_Far-red-induction_P Parameter: Plant Line Value: Columbia
  misc_feature: MA Experiment 20001451 PARAMETER Experiment Name: At_Far-red-induction_P Parameter: Timepoint (hr) Value: 24
  misc_feature: MA Experiment 20001451 PARAMETER Experiment Name: At_Far-red-induction_P Parameter: Tissue Value: Whole Plant
  misc_feature: MA Experiment ID: 20001905 Result: Up-regulated in Transcription
  misc_feature: MA Experiment 20001905 PARAMETER Experiment Name: At_Drought_Reproduction_P Parameter: Age (day) Value: 40
  misc_feature: MA Experiment 20001905 PARAMETER Experiment Name: At_Drought_Reproduction_P Parameter: Organism Value: A. thaliana
  misc_feature: MA Experiment 20001905 PARAMETER Experiment Name: At_Drought_Reproduction_P Parameter: Plant Line Value: WS
  misc_feature: MA Experiment 20001905 PARAMETER Experiment Name: At_Drought_Reproduction_P Parameter: Timepoint (day) Value: 10
  misc_feature: MA Experiment 20001905 PARAMETER Experiment Name: At_Drought_Reproduction_P Parameter: Tissue Value: Rosettes
  misc_feature: MA Experiment 20001905 PARAMETER Experiment Name: At_Drought_Reproduction_P Parameter: Treatment Value: Drought vs. No Drought
  misc_feature: Phenotype: FERTILITY Fertility-Reduced
  misc_feature: Phenotype: ROSETTE LEAVES Other
  misc_feature: Phenotype: FERTILITY Fertility-Reduced
  misc_feature: Phenotype: FERTILITY Fertility-Reduced
  misc_feature: Phenotype: FERTILITY Fertility-Reduced

SEQ ID NO: 30275 - protein, 327 aa, Arabidopsis thaliana; identical to SEQ ID NO: 30145
  peptide (1)..(327): Ceres Seq. ID no. 15218812
  misc_feature (112)..(281): Homolog of NCBI NO: 32415413 NR Description: related to multifunctional cyclin-dependent
  misc_feature (1)..(95): Homolog of NCBI NO: 7445886 NR Description: PHO85-like protein - fission yeast
  misc_feature (98)..(272): Homolog of NCBI NO: 7445886 NR Description: PHO85-like protein - fission yeast
  misc_feature (1)..(139): Homolog of NCBI NO: 21740744 NR Description: OSJNBa0072K14.9 [Oryza sativa (japonica
  misc_feature (153)..(326): Homolog of NCBI NO: 21740744 NR Description: OSJNBa0072K14.9 [Oryza sativa (japonica
  misc_feature (1)..(284): Homolog of NCBI NO: 34146826 NR Description: At5g43300 [Arabidopsis thaliana]
  misc_feature (1)..(326): Homolog of NCBI NO: 38175529 NR Description: PHO85-like protein [Oryza sativa (japonica
  misc_feature (1)..(327): Homolog of NCBI NO: 28058728 NR Description: expressed protein [Arabidopsis thaliana]
  misc_feature (1)..(327): Homolog of NCBI NO: 18396047 NR Description: expressed protein [Arabidopsis thaliana]
  misc_feature (1)..(327): Homolog of NCBI NO: 15237552 NR Description: expressed protein [Arabidopsis thaliana]
  misc_feature (112)..(281): Homolog of NCBI NO: 32415413 NR Description: related to multifunctional cyclin-dependent
  misc_feature (1)..(95): Homolog of NCBI NO: 7445886 NR Description: PHO85-like protein - fission yeast
  misc_feature (98)..(272): Homolog of NCBI NO: 7445886 NR Description: PHO85-like protein - fission yeast
  misc_feature (1)..(139): Homolog of NCBI NO: 21740744 NR Description: OSJNBa0072K14.9 [Oryza sativa (japonica
  misc_feature (153)..(326): Homolog of NCBI NO: 21740744 NR Description: OSJNBa0072K14.9 [Oryza sativa (japonica
  misc_feature (1)..(284): Homolog of NCBI NO: 34146826 NR Description: At5g43300 [Arabidopsis thaliana]
  misc_feature (1)..(326): Homolog of NCBI NO: 38175529 NR Description: PHO85-like protein [Oryza sativa (japonica
  misc_feature (1)..(327): Homolog of NCBI NO: 28058728 NR Description: expressed protein [Arabidopsis thaliana]
  misc_feature (1)..(327): Homolog of NCBI NO: 18396047 NR Description: expressed protein [Arabidopsis thaliana]
  misc_feature (1)..(327): Homolog of NCBI NO: 15237552 NR Description: expressed protein [Arabidopsis thaliana]

SEQ ID NO: 30276 - protein, 237 aa, Arabidopsis thaliana; identical to SEQ ID NO: 30146
  peptide (1)..(237): Ceres Seq. ID no. 15218813
  misc_feature (8)..(182): Homolog of NCBI NO: 19115043 NR Description: contains glycerophosphoryl diester
  misc_feature (22)..(191): Homolog of NCBI NO: 32415413 NR Description: related to multifunctional cyclin-dependent
  misc_feature (8)..(182): Homolog of NCBI NO: 7445886 NR Description: PHO85-like protein - fission yeast
  misc_feature (1)..(49): Homolog of NCBI NO: 21740744 NR Description: OSJNBa0072K14.9 [Oryza sativa (japonica
  misc_feature (63)..(236): Homolog of NCBI NO: 21740744 NR Description: OSJNBa0072K14.9 [Oryza sativa (japonica
  misc_feature (1)..(194): Homolog of NCBI NO: 34146826 NR Description: At5g43300 [Arabidopsis thaliana]
  misc_feature (1)..(236): Homolog of NCBI NO: 38175529 NR Description: PHO85-like protein [Oryza sativa (japonica
  misc_feature (1)..(237): Homolog of NCBI NO: 28058728 NR Description: expressed protein [Arabidopsis thaliana]
  misc_feature (1)..(237): Homolog of NCBI NO: 18396047 NR Description: expressed protein [Arabidopsis thaliana]
  misc_feature (1)..(237): Homolog of NCBI NO: 15237552 NR Description: expressed protein [Arabidopsis thaliana]
  misc_feature (8)..(182): Homolog of NCBI NO: 19115043 NR Description: contains glycerophosphoryl diester
  misc_feature (22)..(191): Homolog of NCBI NO: 32415413 NR Description: related to multifunctional cyclin-dependent
  misc_feature (8)..(182): Homolog of NCBI NO: 7445886 NR Description: PHO85-like protein - fission yeast
  misc_feature (1)..(49): Homolog of NCBI NO: 21740744 NR Description: OSJNBa0072K14.9 [Oryza sativa (japonica
  misc_feature (63)..(236): Homolog of NCBI NO: 21740744 NR Description: OSJNBa0072K14.9 [Oryza sativa (japonica
  misc_feature (1)..(194): Homolog of NCBI NO: 34146826 NR Description: At5g43300 [Arabidopsis thaliana]
  misc_feature (1)..(236): Homolog of NCBI NO: 38175529 NR Description: PHO85-like protein [Oryza sativa (japonica
  misc_feature (1)..(237): Homolog of NCBI NO: 28058728 NR Description: expressed protein [Arabidopsis thaliana]
  misc_feature (1)..(237): Homolog of NCBI NO: 18396047 NR Description: expressed protein [Arabidopsis thaliana]
  misc_feature (1)..(237): Homolog of NCBI NO: 15237552 NR Description: expressed protein [Arabidopsis thaliana]

SEQ ID NO: 30277 - DNA, 1766 bp, Arabidopsis thaliana
  misc_feature (1)..(1766): Ceres Seq. ID no. 12348549
  misc_feature: MA Experiment ID: 108461 Result: Up-regulated in Transcription
  misc_feature: MA Experiment 108461 PARAMETER Experiment Name: At_Germinating_Seeds_cDNA_P Parameter: Age (day) Value: 1 vs. 0
  misc_feature: MA Experiment 108461 PARAMETER Experiment Name: At_Germinating_Seeds_cDNA_P Parameter: Tissue Value: Germinating Seeds
  misc_feature: MA Experiment ID: 108462 Result: Up-regulated in Transcription
  misc_feature: MA Experiment 108462 PARAMETER Experiment Name: At_Germinating_Seeds_cDNA_P Parameter: Age (day) Value: 2 vs. 0
  misc_feature: MA Experiment 108462 PARAMETER Experiment Name: At_Germinating_Seeds_cDNA_P Parameter: Tissue Value: Germinating Seeds
  misc_feature: MA Experiment ID: 108569 Result: Up-regulated in Transcription
  misc_feature: MA Experiment 108569 PARAMETER Experiment Name: At_0.001%_MeJA__cDNA_P Parameter: Timepoint (hr) Value: 6
  misc_feature: MA Experiment 108569 PARAMETER Experiment Name: At_0.001%_MeJA__cDNA_P Parameter: Tissue Value: Aerial
  misc_feature: MA Experiment 108569 PARAMETER Experiment Name: At_0.001%_MeJA__cDNA_P Parameter: Treatment Value: 0.001% MeJA vs. No Treatment
  misc_feature: MA Experiment ID: 108573 Result: Up-regulated in Transcription
  misc_feature: MA Experiment 108573 PARAMETER Experiment Name: At_Drought_cDNA_P Parameter: Timepoint (hr) Value: 6
  misc_feature: MA Experiment 108573 PARAMETER Experiment Name: At_Drought_cDNA_P Parameter: Tissue Value: Aerial
  misc_feature: MA Experiment 108573 PARAMETER Experiment Name: At_Drought_cDNA_P Parameter: Treatment Value: Drought vs. No Drought
  misc_feature: MA Experiment ID: 108576 Result: Down-regulated in Transcription
  misc_feature: MA Experiment 108576 PARAMETER Experiment Name: At_42deg_Heat_cDNA_P Parameter: Temperature (deg C) Value: 42 vs. 22
  misc_feature: MA Experiment 108576 PARAMETER Experiment Name: At_42deg_Heat_cDNA_P Parameter: Timepoint (hr) Value: 1
  misc_feature: MA Experiment 108576 PARAMETER Experiment Name: At_42deg_Heat_cDNA_P Parameter: Tissue Value: Aerial
  misc_feature: MA Experiment ID: 108577 Result: Down-regulated in Transcription
  misc_feature: MA Experiment 108577 PARAMETER Experiment Name: At_42deg_Heat_cDNA_P Parameter: Temperature (deg C) Value: 42 vs. 22
  misc_feature: MA Experiment 108577 PARAMETER Experiment Name: At_42deg_Heat_cDNA_P Parameter: Timepoint (hr) Value: 6
  misc_feature: MA Experiment 108577 PARAMETER Experiment Name: At_42deg_Heat_cDNA_P Parameter: Tissue Value: Aerial
  misc_feature: MA Experiment ID: 108595 Result: Down-regulated in Transcription
  misc_feature: MA Experiment 108595 PARAMETER Experiment Name: At_Ler-pi_Ovule_cDNA_P Parameter: Plant Line Value: null
  misc_feature: MA Experiment ID: 20000087 Result: Down-regulated in Transcription
  misc_feature: MA Experiment 20000087 PARAMETER Experiment Name: At_100uM_ABA_Mutants_cDNA_P Parameter: Plant Line Value: WS
  misc_feature: MA Experiment 20000087 PARAMETER Experiment Name: At_100uM_ABA_Mutants_cDNA_P Parameter: Timepoint (hr) Value: 6
  misc_feature: MA Experiment 20000087 PARAMETER Experiment Name: At_100uM_ABA_Mutants_cDNA_P Parameter: Tissue Value: Aerial
  misc_feature: MA Experiment 20000087 PARAMETER Experiment Name: At_100uM_ABA_Mutants_cDNA_P Parameter: Treatment Value: 100uM ABA vs. No Treatment
  misc_feature: MA Experiment ID: 20000112 Result: Down-regulated in Transcription
  misc_feature: MA Experiment 20000112 PARAMETER Experiment Name: At_42deg_Heat_cDNA_P Parameter: Temperature (deg C) Value: 42 vs. 22
  misc_feature: MA Experiment 20000112 PARAMETER Experiment Name: At_42deg_Heat_cDNA_P Parameter: Timepoint (hr) Value: 2
  misc_feature: MA Experiment 20000112 PARAMETER Experiment Name: At_42deg_Heat_cDNA_P Parameter: Tissue Value: Aerial
  misc_feature: MA Experiment ID: 20000144 Result: Down-regulated in Transcription
  misc_feature: MA Experiment 20000144 PARAMETER Experiment Name: At_42deg_Heat_cDNA_P Parameter: Temperature (deg C) Value: 42 vs. 22
  misc_feature: MA Experiment 20000144 PARAMETER Experiment Name: At_42deg_Heat_cDNA_P Parameter: Timepoint (hr) Value: 1
  misc_feature: MA Experiment 20000144 PARAMETER Experiment Name: At_42deg_Heat_cDNA_P Parameter: Tissue Value: Aerial
  misc_feature: MA Experiment ID: 20000180 Result: Up-regulated in Transcription
  misc_feature: MA Experiment 20000180 PARAMETER Experiment Name: At_Germinating_Seeds_P Parameter: Age (hr) Value: 24 vs. 0
  misc_feature: MA Experiment 20000180 PARAMETER Experiment Name: At_Germinating_Seeds_P Parameter: Tissue Value: Germinating Seeds
  misc_feature: MA Experiment ID: 20001908 Result: Down-regulated in Transcription
  misc_feature: MA Experiment 20001908 PARAMETER Experiment Name: At_Drought_Reproduction_P Parameter: Age (day) Value: 40
  misc_feature: MA Experiment 20001908 PARAMETER Experiment Name: At_Drought_Reproduction_P Parameter: Organism Value: A. thaliana
  misc_feature: MA Experiment 20001908 PARAMETER Experiment Name: At_Drought_Reproduction_P Parameter: Plant Line Value: WS
  misc_feature: MA Experiment 20001908 PARAMETER Experiment Name: At_Drought_Reproduction_P Parameter: Timepoint (day) Value: 10
  misc_feature: MA Experiment 20001908 PARAMETER Experiment Name: At_Drought_Reproduction_P Parameter: Tissue Value: Siliques
  misc_feature: MA Experiment 20001908 PARAMETER Experiment Name: At_Drought_Reproduction_P Parameter: Treatment Value: Drought vs. No Drought
  misc_feature: MA Experiment ID: 20001911 Result: Down-regulated in Transcription
  misc_feature: MA Experiment 20001911 PARAMETER Experiment Name: At_Drought_Reproduction_P Parameter: Age (day) Value: 40
  misc_feature: MA Experiment 20001911 PARAMETER Experiment Name: At_Drought_Reproduction_P Parameter: Organism Value: A. thaliana
  misc_feature: MA Experiment 20001911 PARAMETER Experiment Name: At_Drought_Reproduction_P Parameter: Plant Line Value: WS
  misc_feature: MA Experiment 20001911 PARAMETER Experiment Name: At_Drought_Reproduction_P Parameter: Timepoint (day) Value: 10
  misc_feature: MA Experiment 20001911 PARAMETER Experiment Name: At_Drought_Reproduction_P Parameter: Tissue Value: Flowers
  misc_feature: MA Experiment 20001911 PARAMETER Experiment Name: At_Drought_Reproduction_P Parameter: Treatment Value: Drought vs. No Drought
aaaaaatgtctcattgcttctctcgttctaaaaaaaatcttgctgctatctctctataagtccactcctccttcaagcaaagcaccttcctcttctttttgctcctctgagattggtttaagattaaaccagacccatctaagggatctggaacaagcttcgtctctggttccactctgatcatcagagtattaaaaatggagtctttcttctccagatccacctccatcgtctccaaattgagtttcttggccttatggatcgtcttcttgatttcttcatcttcttttacttcgacagaagcatatgatgcgcttgatccagaaggcaacattacaatgaaatgggatgttatgagctggactcctgatggctatgttgccgtggttacgatgttcaacttccagaaatacagacacattcaatctccaggatggacattaggttggaaatgggcaaagaaggaagttatatggagtatggttggagcacaaacaactgaacaaggtgattgttcaaagtacaaaggaaacataccacattgttgtaagaaggatccaacagttgtagacttgcttccagggactccttataatcagcagattgctaattgctgcaagggtggtgttatgaactcatgggttcaagaccctgccactgcggctagctccttccagattagtgttggtgctgctggaaccacaaacaaaaccgttagggtcccaagaaacttcactctcatgggacctggtccaggttacacttgtggtccagcaaagattgtcagaccaacaaaatttgtcacgactgacacacgcagaaccactcaagctatgatgacatggaacattacgtgcacatactcgcagttccttgctcaaagaactccaacttgctgtgtttctttatcttctttctacaatgaaaccattgttggatgtccaacttgtgcttgcggatgtcaaaacaacagaacagaatccggtgcctgcctcgacccggacacaccacacttagcctcggttgtgtcaccaccaacaaagaaaggaacggttttaccaccattagtgcaatgcacgagacacatgtgcccgatcagagtgcattggcatgtaaagcagaactacaaagagtattggcgtgtgaagatcacaatcacaaacttcaactatcgcttgaactacacacaatggaaccttgttgctcaacatccaaatctcgacaacatcactcaaatcttcagcttcaactacaaatctcttactccttacgctggactaaacgatacggcgatgttatggggagtgaagttctacaacgatttcttatcagaagcaggtcctcttgggaatgttcaatcagagattttgttccgtaaagaccaatcaaccttcacattcgagaaaggttgggcttttccacgaaggatttactttaatggagacaattgcgtcatgcctcctccagactcttacccttttcttcccaacggtggttcccggtcacaattctcattcgtcgccgccgtgctcctccctcttcttgtctttttcttcttctctgcctaatctcggatttacggttttgccactggtttgcttagggttacggcggagtggtataaacgtttatttatgattcttttgtgtcccacaaaaattataatcttttgatactttttaaaaatataaatagttttcaacttccttgtttttaaaagaaatttatatccttgtgttctgttggtccgtcgttgtagaatatcg

SEQ ID NO: 30278 - protein, 456 aa, Arabidopsis thaliana
  peptide (1)..(456): Ceres Seq. ID no. 12348550
  misc_feature (14)..(450): Homolog of NCBI NO: 30685446 NR Description: phytochelatin synthetase -related [Arabidopsis
  misc_feature (19)..(452): Homolog of NCBI NO: 30090032 NR Description: phytochelatin synthetase [Triticum monococcum]
  misc_feature (29)..(452): Homolog of NCBI NO: 30090026 NR Description: phytochelatin synthetase-like protein 2 [Sorghum
  misc_feature (11)..(450): Homolog of NCBI NO: 18406342 NR Description: phytochelatin synthetase-like protein
  misc_feature (1)..(450): Homolog of NCBI NO: 21618129 NR Description: phytochelatin synthetase-like protein
  misc_feature (11)..(450): Homolog of NCBI NO: 13477083 NR Description: phytochelatin synthetase-like protein
  misc_feature (1)..(451): Homolog of NCBI NO: 15232863 NR Description: unknown protein; protein id: At3g02210.1
  misc_feature (95)..(456): Homolog of NCBI NO: 25456127 NR Description: probable phytochelatin synthetase
  misc_feature (1)..(456): Homolog of NCBI NO: 21553837 NR Description: phytochelatin synthetase-like protein
  misc_feature (1)..(456): Homolog of NCBI NO: 18424412 NR Description: phytochelatin synthetase - like protein
MESFFSRSTSIVSKLSFLALWIVFLISSSSFTSTEAYDALDPEGNITMKWDVMSWTPDGYVAVVTMFNFQKYRHIQSPGWTLGWKWAKKEVIWSMVGAQTTEQGDCSKYKGNIPHCCKKDPTVVDLLPGTPYNQQIANCCKGGVMNSWVQDPATAASSFQISVGAAGTTNKTVRVPRNFTLMGPGPGYTCGPAKIVRPTKFVTTDTRRTTQAMMTWNITCTYSQFLAQRTPTCCVSLSSFYNETIVGCPTCACGCQNNRTESGACLDPDTPHLASVVSPPTKKGTVLPPLVQCTRHMCPIRVHWHVKQNYKEYWRVKITITNFNYRLNYTQWNLVAQHPNLDNITQIFSFNYKSLTPYAGLNDTAMLWGVKFYNDFLSEAGPLGNVQSEILFRKDQSTFTFEKGWAFPRRIYFNGDNCVMPPPDSYPFLPNGGSRSQFSFVAAVLLPLLVFFFFSA

SEQ ID NO: 30279 - protein, 409 aa, Arabidopsis thaliana
  peptide (1)..(409): Ceres Seq. ID no. 12348551
  misc_feature (1)..(403): Homolog of NCBI NO: 30685446 NR Description: phytochelatin synthetase -related [Arabidopsis
  misc_feature (1)..(405): Homolog of NCBI NO: 30090032 NR Description: phytochelatin synthetase [Triticum monococcum]
  misc_feature (1)..(405): Homolog of NCBI NO: 30090026 NR Description: phytochelatin synthetase-like protein 2 [Sorghum
  misc_feature (1)..(403): Homolog of NCBI NO: 18406342 NR Description: phytochelatin synthetase-like protein
  misc_feature (1)..(403): Homolog of NCBI NO: 21618129 NR Description: phytochelatin synthetase-like protein
  misc_feature (1)..(403): Homolog of NCBI NO: 13477083 NR Description: phytochelatin synthetase-like protein
  misc_feature (1)..(404): Homolog of NCBI NO: 15232863 NR Description: unknown protein; protein id: At3g02210.1
  misc_feature (48)..(409): Homolog of NCBI NO: 25456127 NR Description: probable phytochelatin synthetase
  misc_feature (1)..(409): Homolog of NCBI NO: 21553837 NR Description: phytochelatin synthetase-like protein
  misc_feature (1)..(409): Homolog of NCBI NO: 18424412 NR Description: phytochelatin synthetase - like protein
MKWDVMSWTPDGYVAVVTMFNFQKYRHIQSPGWTLGWKWAKKEVIWSMVGAQTTEQGDCSKYKGNIPHCCKKDPTVVDLLPGTPYNQQIANCCKGGVMNSWVQDPATAASSFQISVGAAGTTNKTVRVPRNFTLMGPGPGYTCGPAKIVRPTKFVTTDTRRTTQAMMTWNITCTYSQFLAQRTPTCCVSLSSFYNETIVGCPTCACGCQNNRTESGACLDPDTPHLASVVSPPTKKGTVLPPLVQCTRHMCPIRVHWHVKQNYKEYWRVKITITNFNYRLNYTQWNLVAQHPNLDNITQIFSFNYKSLTPYAGLNDTAMLWGVKFYNDFLSEAGPLGNVQSEILFRKDQSTFTFEKGWAFPRRIYFNGDNCVMPPPDSYPFLPNGGSRSQFSFVAAVLLPLLVFFFFSA

SEQ ID NO: 30280 - protein, 404 aa, Arabidopsis thaliana
  peptide (1)..(404): Ceres Seq. ID no. 12348552
  misc_feature (1)..(398): Homolog of NCBI NO: 30685446 NR Description: phytochelatin synthetase -related [Arabidopsis
  misc_feature (1)..(400): Homolog of NCBI NO: 30090032 NR Description: phytochelatin synthetase [Triticum monococcum]
  misc_feature (1)..(400): Homolog of NCBI NO: 30090026 NR Description: phytochelatin synthetase-like protein 2 [Sorghum
  misc_feature (1)..(398): Homolog of NCBI NO: 18406342 NR Description: phytochelatin synthetase-like protein
  misc_feature (1)..(398): Homolog of NCBI NO: 21618129 NR Description: phytochelatin synthetase-like protein
  misc_feature (1)..(398): Homolog of NCBI NO: 13477083 NR Description: phytochelatin synthetase-like protein
  misc_feature (1)..(399): Homolog of NCBI NO: 15232863 NR Description: unknown protein; protein id: At3g02210.1
  misc_feature (43)..(404): Homolog of NCBI NO: 25456127 NR Description: probable phytochelatin synthetase
  misc_feature (1)..(404): Homolog of NCBI NO: 21553837 NR Description: phytochelatin synthetase-like protein
  misc_feature (1)..(404): Homolog of NCBI NO: 18424412 NR Description: phytochelatin synthetase - like protein
MSWTPDGYVAVVTMFNFQKYRHIQSPGWTLGWKWAKKEVIWSMVGAQTTEQGDCSKYKGNIPHCCKKDPTVVDLLPGTPYNQQIANCCKGGVMNSWVQDPATAASSFQISVGAAGTTNKTVRVPRNFTLMGPGPGYTCGPAKIVRPTKFVTTDTRRTTQAMMTWNITCTYSQFLAQRTPTCCVSLSSFYNETIVGCPTCACGCQNNRTESGACLDPDTPHLASVVSPPTKKGTVLPPLVQCTRHMCPIRVHWHVKQNYKEYWRVKITITNFNYRLNYTQWNLVAQHPNLDNITQIFSFNYKSLTPYAGLNDTAMLWGVKFYNDFLSEAGPLGNVQSEILFRKDQSTFTFEKGWAFPRRIYFNGDNCVMPPPDSYPFLPNGGSRSQFSFVAAVLLPLLVFFFFSA

SEQ ID NO: 30281 - DNA, 1015 bp, Arabidopsis thaliana
  misc_feature (1)..(1015): Ceres Seq. ID no. 12481977
  misc_feature: MA Experiment ID: 108462 Result: Down-regulated in Transcription
  misc_feature: MA Experiment 108462 PARAMETER Experiment Name: At_Germinating_Seeds_cDNA_P Parameter: Age (day) Value: 2 vs. 0
  misc_feature: MA Experiment 108462 PARAMETER Experiment Name: At_Germinating_Seeds_cDNA_P Parameter: Tissue Value: Germinating Seeds
  misc_feature: MA Experiment ID: 108463 Result: Down-regulated in Transcription
  misc_feature: MA Experiment 108463 PARAMETER Experiment Name: At_Germinating_Seeds_cDNA_P Parameter: Age (day) Value: 3 vs. 0
  misc_feature: MA Experiment 108463 PARAMETER Experiment Name: At_Germinating_Seeds_cDNA_P Parameter: Tissue Value: Germinating Seeds
  misc_feature: MA Experiment ID: 108464 Result: Down-regulated in Transcription
  misc_feature: MA Experiment 108464 PARAMETER Experiment Name: At_Germinating_Seeds_cDNA_P Parameter: Age (day) Value: 4 vs. 0
  misc_feature: MA Experiment 108464 PARAMETER Experiment Name: At_Germinating_Seeds_cDNA_P Parameter: Tissue Value: Germinating Seeds
  misc_feature: MA Experiment ID: 108488 Result: Down-regulated in Transcription
  misc_feature: MA Experiment ID: 108573 Result: Up-regulated in Transcription
  misc_feature: MA Experiment 108573 PARAMETER Experiment Name: At_Drought_cDNA_P Parameter: Timepoint (hr) Value: 6
  misc_feature: MA Experiment 108573 PARAMETER Experiment Name: At_Drought_cDNA_P Parameter: Tissue Value: Aerial
  misc_feature: MA Experiment 108573 PARAMETER Experiment Name: At_Drought_cDNA_P Parameter: Treatment Value: Drought vs. No Drought
  misc_feature: MA Experiment ID: 108579 Result: Down-regulated in Transcription
  misc_feature: MA Experiment 108579 PARAMETER Experiment Name: At_4deg_Cold_cDNA_P Parameter: Temperature (deg C) Value: 4 vs. 22
  misc_feature: MA Experiment 108579 PARAMETER Experiment Name: At_4deg_Cold_cDNA_P Parameter: Timepoint (hr) Value: 6
  misc_feature: MA Experiment 108579 PARAMETER Experiment Name: At_4deg_Cold_cDNA_P Parameter: Tissue Value: Aerial
  misc_feature: MA Experiment ID: 20000224 Result: Down-regulated in Transcription
  misc_feature: MA Experiment ID: 20000794 Result: Up-regulated in Transcription
  misc_feature: MA Experiment 20000794 PARAMETER Experiment Name: At_Petals_P Parameter: Age (day) Value: 23-25 days
  misc_feature: MA Experiment 20000794 PARAMETER Experiment Name: At_Petals_P Parameter: Plant Line Value: WS
  misc_feature: MA Experiment 20000794 PARAMETER Experiment Name: At_Petals_P Parameter: Tissue Value: Petals vs. Whole plant
aaaacacgcctttatcatagtttctatctccgatgacacaaaacgaggaagattatttgacattttaagctgaattgctctgaaatctcaattgtataatcatctcctgggtcgtcgttatcgtgatcatctagaagaaagcatgactacactagatttgaccagagccgagcttgctcttattgttctctatttgaacaaagctgaggctagagataagatatgcagagctatccaatatggttccaaattcttgagcggtggccaacctggtactgctcaaactgtcgacaaaaacaccagcttggcgagaaaagttttccgtcttttcaagtttgtcaatgattttcacggtcttatcagccccgtgcctaaagggactccacttcctcttgtcttactcgggaagtcgaagaatgcgctcttgtctacctttttgtttcttgatcaaatcgtctggcttggtagatccggcatatacaagaacaaagaacgaactgaattgcttggacgtatatcacttttctgctggctgggatcatccgtttgtacaagtgcagtcgagattggtgagcttggaaggctctcttcatctatgaagaagatggaaaaggaactcaaagctgatgatgagctgtatcgtgctaagcttcagaaatcaaacgacagaactctagctttgattaaatcaagcatggacattattgtagccattggtctccttcagttagctccaaagacgattagtcctcgtgtcactggtgctttcgggtttaccacctcacttatctcttgttatcagttgcttccatcgcgccccaagttgaagacaccttgaagaaggaataagcttgttctctagactttcagaataattgtttcatattcatcagtaaacctattgtgttcaggtattctaaggagtctatgttcctcctttgaatgaatttgctgctcttataacgcgtttgcaagaataatgataagttttagaataagattattatgatacatc

SEQ ID NO: 30282 - protein, 231 aa, Arabidopsis thaliana; identical to SEQ ID NO: 23905
  peptide (1)..(231): Ceres Seq. ID no. 12481978
  misc_feature (11)..(222): Pfam Name: Peroxisomal biogenesis factor 11 (PEX11) Pfam Description: Peroxisomal biogenesis factor 11 (PEX11)
  misc_feature (131)..(231): Homolog of NCBI NO: 14335058 NR Description: At2g45740/F4I18.28 [Arabidopsis thaliana]
  misc_feature (1)..(227): Homolog of NCBI NO: 34898026 NR Description: ESTs AU064537(E31904),AU082147(E31904) correspond a region of the predicted gene.~Similar to Arabidopsis thaliana
  misc_feature (1)..(229): Homolog of NCBI NO: 25553559 NR Description: OSJNBa0038F22.7 [Oryza sativa (japonica
  misc_feature (1)..(229): Homolog of NCBI NO: 8489788 NR Description: unknown [Lycopersicon esculentum]
  misc_feature (2)..(221): Homolog of NCBI NO: 7486466 NR Description: hypothetical protein At2g45740 [imported] -
  misc_feature (1)..(229): Homolog of NCBI NO: 18378887 NR Description: expressed protein
  misc_feature (2)..(231): Homolog of NCBI NO: 18406877 NR Description: expressed protein
  misc_feature (1)..(231): Homolog of NCBI NO: 11358250 NR Description: hypothetical protein T27I15_160 - Arabidopsis
  misc_feature (1)..(231): Homolog of NCBI NO: 30695340 NR Description: expressed protein [Arabidopsis thaliana]

SEQ ID NO: 30283 - DNA, 1941 bp, Arabidopsis thaliana
  misc_feature (1)..(1941): Ceres Seq. ID no. 13490571
  misc_feature: MA Experiment ID: 108434 Result: Down-regulated in Transcription
  misc_feature: MA Experiment 108434 PARAMETER Experiment Name: At_Root_Tips_cDNA_P Parameter: Tissue Value: Root Tips
  misc_feature: MA Experiment ID: 108572 Result: Up-regulated in Transcription
  misc_feature: MA Experiment 108572 PARAMETER Experiment Name: At_Drought_cDNA_P Parameter: Timepoint (hr) Value: 1
  misc_feature: MA Experiment 108572 PARAMETER Experiment Name: At_Drought_cDNA_P Parameter: Tissue Value: Aerial
  misc_feature: MA Experiment 108572 PARAMETER Experiment Name: At_Drought_cDNA_P Parameter: Treatment Value: Drought vs. No Drought
  misc_feature: MA Experiment ID: 108574 Result: Up-regulated in Transcription
  misc_feature: MA Experiment 108574 PARAMETER Experiment Name: At_Wounding__cDNA_P Parameter: Timepoint (hr) Value: 1
  misc_feature: MA Experiment 108574 PARAMETER Experiment Name: At_Wounding__cDNA_P Parameter: Tissue Value: Aerial
  misc_feature: MA Experiment 108574 PARAMETER Experiment Name: At_Wounding__cDNA_P Parameter: Treatment Value: Wounding vs. No Wounding
  misc_feature: MA Experiment ID: 108577 Result: Down-regulated in Transcription
  misc_feature: MA Experiment 108577 PARAMETER Experiment Name: At_42deg_Heat_cDNA_P Parameter: Temperature (deg C) Value: 42 vs. 22
  misc_feature: MA Experiment 108577 PARAMETER Experiment Name: At_42deg_Heat_cDNA_P Parameter: Timepoint (hr) Value: 6
  misc_feature: MA Experiment 108577 PARAMETER Experiment Name: At_42deg_Heat_cDNA_P Parameter: Tissue Value: Aerial
  misc_feature: MA Experiment ID: 108595 Result: Up-regulated in Transcription
  misc_feature: MA Experiment 108595 PARAMETER Experiment Name: At_Ler-pi_Ovule_cDNA_P Parameter: Plant Line Value: null
  misc_feature: MA Experiment ID: 108607 Result: Up-regulated in Transcription
  misc_feature: MA Experiment 108607 PARAMETER Experiment Name: At_100uM_ABA_cDNA_P Parameter: Timepoint (hr) Value: 4
  misc_feature: MA Experiment 108607 PARAMETER Experiment Name: At_100uM_ABA_cDNA_P Parameter: Tissue Value: Aerial
  misc_feature: MA Experiment 108607 PARAMETER Experiment Name: At_100uM_ABA_cDNA_P Parameter: Treatment Value: 100uM ABA vs. No Treatment
  misc_feature: MA Experiment ID: 20000068 Result: Up-regulated in Transcription
  misc_feature: MA Experiment ID: 20000069 Result: Up-regulated in Transcription
  misc_feature: MA Experiment 20000069 PARAMETER Experiment Name: At_100uM_ABA_Mutants_cDNA_P Parameter: Plant Line Value: CS23
  misc_feature: MA Experiment 20000069 PARAMETER Experiment Name: At_100uM_ABA_Mutants_cDNA_P Parameter: Timepoint (hr) Value: 6
  misc_feature: MA Experiment 20000069 PARAMETER Experiment Name: At_100uM_ABA_Mutants_cDNA_P Parameter: Tissue Value: Aerial
  misc_feature: MA Experiment 20000069 PARAMETER Experiment Name: At_100uM_ABA_Mutants_cDNA_P Parameter: Treatment Value: 100uM ABA vs. No Treatment
  misc_feature: MA Experiment ID: 20000070 Result: Up-regulated in Transcription
  misc_feature: MA Experiment 20000070 PARAMETER Experiment Name: At_100uM_ABA_Mutants_cDNA_P Parameter: Plant Line Value: CS24
  misc_feature: MA Experiment 20000070 PARAMETER Experiment Name: At_100uM_ABA_Mutants_cDNA_P Parameter: Timepoint (hr) Value: 6
  misc_feature: MA Experiment 20000070 PARAMETER Experiment Name: At_100uM_ABA_Mutants_cDNA_P Parameter: Tissue Value: Aerial
  misc_feature: MA Experiment 20000070 PARAMETER Experiment Name: At_100uM_ABA_Mutants_cDNA_P Parameter: Treatment Value: 100uM ABA vs. No Treatment
  misc_feature: MA Experiment ID: 20000071 Result: Up-regulated in Transcription
  misc_feature: MA Experiment 20000071 PARAMETER Experiment Name: At_100uM_ABA_Mutants_cDNA_P Parameter: Plant Line Value: CS8104
  misc_feature: MA Experiment 20000071 PARAMETER Experiment Name: At_100uM_ABA_Mutants_cDNA_P Parameter: Timepoint (hr) Value: 6
  misc_feature: MA Experiment 20000071 PARAMETER Experiment Name: At_100uM_ABA_Mutants_cDNA_P Parameter: Tissue Value: Aerial
  misc_feature: MA Experiment 20000071 PARAMETER Experiment Name: At_100uM_ABA_Mutants_cDNA_P Parameter: Treatment Value: 100uM ABA vs. No Treatment
  misc_feature: MA Experiment ID: 20000072 Result: Up-regulated in Transcription
  misc_feature: MA Experiment 20000072 PARAMETER Experiment Name: At_100uM_ABA_Mutants_cDNA_P Parameter: Plant Line Value: CS8105
  misc_feature: MA Experiment 20000072 PARAMETER Experiment Name: At_100uM_ABA_Mutants_cDNA_P Parameter: Timepoint (hr) Value: 6
  misc_feature: MA Experiment 20000072 PARAMETER Experiment Name: At_100uM_ABA_Mutants_cDNA_P Parameter: Tissue Value: Aerial
  misc_feature: MA Experiment 20000072 PARAMETER Experiment Name: At_100uM_ABA_Mutants_cDNA_P Parameter: Treatment Value: 100uM ABA vs. No Treatment
  misc_feature: MA Experiment ID: 20000087 Result: Up-regulated in Transcription
  misc_feature: MA Experiment 20000087 PARAMETER Experiment Name: At_100uM_ABA_Mutants_cDNA_P Parameter: Plant Line Value: WS
  misc_feature: MA Experiment 20000087 PARAMETER Experiment Name: At_100uM_ABA_Mutants_cDNA_P Parameter: Timepoint (hr) Value: 6
  misc_feature: MA Experiment 20000087 PARAMETER Experiment Name: At_100uM_ABA_Mutants_cDNA_P Parameter: Tissue Value: Aerial
  misc_feature: MA Experiment 20000087 PARAMETER Experiment Name: At_100uM_ABA_Mutants_cDNA_P Parameter: Treatment Value: 100uM ABA vs. No Treatment
  misc_feature: MA Experiment ID: 20000088 Result: Up-regulated in Transcription
  misc_feature: MA Experiment 20000088 PARAMETER Experiment Name: At_100uM_ABA_Mutants_cDNA_P Parameter: Plant Line Value: Landsberg
  misc_feature: MA Experiment 20000088 PARAMETER Experiment Name: At_100uM_ABA_Mutants_cDNA_P Parameter: Timepoint (hr) Value: 6
  misc_feature: MA Experiment 20000088 PARAMETER Experiment Name: At_100uM_ABA_Mutants_cDNA_P Parameter: Tissue Value: Aerial
  misc_feature: MA Experiment 20000088 PARAMETER Experiment Name: At_100uM_ABA_Mutants_cDNA_P Parameter: Treatment Value: 100uM ABA vs. No Treatment
  misc_feature: MA Experiment ID: 20000111 Result: Down-regulated in Transcription
  misc_feature: MA Experiment 20000111 PARAMETER Experiment Name: At_42deg_Heat_cDNA_P Parameter: Temperature (deg C) Value: 42 vs. 22
  misc_feature: MA Experiment 20000111 PARAMETER Experiment Name: At_42deg_Heat_cDNA_P Parameter: Timepoint (hr) Value: 6
  misc_feature: MA Experiment 20000111 PARAMETER Experiment Name: At_42deg_Heat_cDNA_P Parameter: Tissue Value: Aerial
  misc_feature: MA Experiment ID: 20000112 Result: Down-regulated in Transcription
  misc_feature: MA Experiment 20000112 PARAMETER Experiment Name: At_42deg_Heat_cDNA_P Parameter: Temperature (deg C) Value: 42 vs. 22
  misc_feature: MA Experiment 20000112 PARAMETER Experiment Name: At_42deg_Heat_cDNA_P Parameter: Timepoint (hr) Value: 2
  misc_feature: MA Experiment 20000112 PARAMETER Experiment Name: At_42deg_Heat_cDNA_P Parameter: Tissue Value: Aerial
  misc_feature: MA Experiment ID: 20000113 Result: Down-regulated in Transcription
  misc_feature: MA Experiment 20000113 PARAMETER Experiment Name: At_42deg_Heat_cDNA_P Parameter: Temperature (deg C) Value: 42 vs. 22
  misc_feature: MA Experiment 20000113 PARAMETER Experiment Name: At_42deg_Heat_cDNA_P Parameter: Timepoint (hr) Value: 8
  misc_feature: MA Experiment 20000113 PARAMETER Experiment Name: At_42deg_Heat_cDNA_P Parameter: Tissue Value: Aerial
  misc_feature: MA Experiment ID: 20000117 Result: Up-regulated in Transcription
  misc_feature: MA Experiment 20000117 PARAMETER Experiment Name: At_100uM_ABA_Mutants_cDNA_P Parameter: Plant Line Value: Columbia
  misc_feature: MA Experiment 20000117 PARAMETER Experiment Name: At_100uM_ABA_Mutants_cDNA_P Parameter: Timepoint (hr) Value: 6
  misc_feature: MA Experiment 20000117 PARAMETER Experiment Name: At_100uM_ABA_Mutants_cDNA_P Parameter: Tissue Value: Aerial
  misc_feature: MA Experiment 20000117 PARAMETER Experiment Name: At_100uM_ABA_Mutants_cDNA_P Parameter: Treatment Value: 100uM ABA vs. No Treatment
  misc_feature: MA Experiment ID: 20000144 Result: Down-regulated in Transcription
  misc_feature: MA Experiment 20000144 PARAMETER Experiment Name: At_42deg_Heat_cDNA_P Parameter: Temperature (deg C) Value: 42 vs. 22
  misc_feature: MA Experiment 20000144 PARAMETER Experiment Name: At_42deg_Heat_cDNA_P Parameter: Timepoint (hr) Value: 1
  misc_feature: MA Experiment 20000144 PARAMETER Experiment Name: At_42deg_Heat_cDNA_P Parameter: Tissue Value: Aerial
  misc_feature: MA Experiment ID: 20000180 Result: Up-regulated in Transcription
  misc_feature: MA Experiment 20000180 PARAMETER Experiment Name: At_Germinating_Seeds_P Parameter: Age (hr) Value: 24 vs. 0
  misc_feature: MA Experiment 20000180 PARAMETER Experiment Name: At_Germinating_Seeds_P Parameter: Tissue Value: Germinating Seeds
  misc_feature: MA Experiment ID: 20000211 Result: Up-regulated in Transcription
  misc_feature: MA Experiment 20000211 PARAMETER Experiment Name: At_0.001percent_MeJA__P Parameter: Age (day) Value: 14
  misc_feature: MA Experiment 20000211 PARAMETER Experiment Name: At_0.001percent_MeJA__P Parameter: Organism Value: A. thaliana
  misc_feature: MA Experiment 20000211 PARAMETER Experiment Name: At_0.001percent_MeJA__P Parameter: Plant Line Value: WS
  misc_feature: MA Experiment 20000211 PARAMETER Experiment Name: At_0.001percent_MeJA__P Parameter: Timepoint (hr) Value: 1
  misc_feature: MA Experiment 20000211 PARAMETER Experiment Name: At_0.001percent_MeJA__P Parameter: Tissue Value: Aerial
  misc_feature: MA Experiment 20000211 PARAMETER Experiment Name: At_0.001percent_MeJA__P Parameter: Treatment Value: 0.001percent MeJA vs. No Treatment
  misc_feature: MA Experiment ID: 20000234 Result: Up-regulated in Transcription
  misc_feature: MA Experiment 20000234 PARAMETER Experiment Name: At_Siliques_P Parameter: Age (day) Value: 21
  misc_feature: MA Experiment 20000234 PARAMETER Experiment Name: At_Siliques_P Parameter: Organism Value: A. thaliana
  misc_feature: MA Experiment 20000234 PARAMETER Experiment Name: At_Siliques_P Parameter: Plant Line Value: WS
  misc_feature: MA Experiment 20000234 PARAMETER Experiment Name: At_Siliques_P Parameter: Tissue Value: Less Than 5mm Siliques vs. Whole Plant
  misc_feature: MA Experiment ID: 20000264 Result: Up-regulated in Transcription
  misc_feature: MA Experiment 20000264 PARAMETER Experiment Name: At_Open_Flower_P Parameter: Age (day) Value: 21
  misc_feature: MA Experiment 20000264 PARAMETER Experiment Name: At_Open_Flower_P Parameter: Plant Line Value: WS
  misc_feature: MA Experiment 20000264 PARAMETER Experiment Name: At_Open_Flower_P Parameter: Tissue Value: Open Flower vs. Whole Plant
  misc_feature: MA Experiment ID: 20000265 Result: Up-regulated in Transcription
  misc_feature: MA Experiment 20000265 PARAMETER Experiment Name: At_Open_Flower_P Parameter: Age (day) Value: 21
  misc_feature: MA Experiment 20000265 PARAMETER Experiment Name: At_Open_Flower_P Parameter: Plant Line Value: WS
  misc_feature: MA Experiment 20000265 PARAMETER Experiment Name: At_Open_Flower_P Parameter: Tissue Value: Closed Flower vs. Whole Plant
  misc_feature: MA Experiment ID: 20000286 Result: Up-regulated in Transcription
  misc_feature: MA Experiment 20000286 PARAMETER Experiment Name: At_Open_Flower_P Parameter: Age (day) Value: 21
  misc_feature: MA Experiment 20000286 PARAMETER Experiment Name: At_Open_Flower_P Parameter: Plant Line Value: WS
  misc_feature: MA Experiment 20000286 PARAMETER Experiment Name: At_Open_Flower_P Parameter: Tissue Value: Half Open vs. Whole Plant
  misc_feature: MA Experiment ID: 20000495 Result: Up-regulated in Transcription
  misc_feature: MA Experiment 20000495 PARAMETER Experiment Name: At_Guard_Cells_P Parameter: Harvest Date Value: 8/2/2002
  misc_feature: MA Experiment 20000495 PARAMETER Experiment Name: At_Guard_Cells_P Parameter: Organism Value: A. thaliana
  misc_feature: MA Experiment 20000495 PARAMETER Experiment Name: At_Guard_Cells_P Parameter: Tissue Value: Guard Cells vs. Leaves
  misc_feature: MA Experiment ID: 20000496 Result: Up-regulated in Transcription
  misc_feature: MA Experiment 20000496 PARAMETER Experiment Name: At_Guard_Cells_P Parameter: Harvest Date Value: 7/19/2002
  misc_feature: MA Experiment 20000496 PARAMETER Experiment Name: At_Guard_Cells_P Parameter: Organism Value: Canola
  misc_feature: MA Experiment 20000496 PARAMETER Experiment Name: At_Guard_Cells_P Parameter: Tissue Value: Guard Cells vs. Leaves
  misc_feature: MA Experiment ID: 20001248 Result: Down-regulated in Transcription
  misc_feature: MA Experiment 20001248 PARAMETER Experiment Name: At_Far-red-induction_P Parameter: Age (day) Value: 7
  misc_feature: MA Experiment 20001248 PARAMETER Experiment Name: At_Far-red-induction_P Parameter: Light Value: Far-red vs. White
  misc_feature: MA Experiment 20001248 PARAMETER Experiment Name: At_Far-red-induction_P Parameter: Organism Value: A. thaliana
  misc_feature: MA Experiment 20001248 PARAMETER Experiment Name: At_Far-red-induction_P Parameter: Plant Line Value: Columbia
  misc_feature: MA Experiment 20001248 PARAMETER Experiment Name: At_Far-red-induction_P Parameter: Timepoint (hr) Value: 4
  misc_feature: MA Experiment 20001248 PARAMETER Experiment Name: At_Far-red-induction_P Parameter: Tissue Value: Whole Plant
  misc_feature: MA Experiment ID: 20001450 Result: Down-regulated in Transcription
  misc_feature: MA Experiment 20001450 PARAMETER Experiment Name: At_Far-red-induction_P Parameter: Age (day) Value: 7
  misc_feature: MA Experiment 20001450 PARAMETER Experiment Name: At_Far-red-induction_P Parameter: Light Value: Far-red vs. White
  misc_feature: MA Experiment 20001450 PARAMETER Experiment Name: At_Far-red-induction_P Parameter: Organism Value: A. thaliana
  misc_feature: MA Experiment 20001450 PARAMETER Experiment Name: At_Far-red-induction_P Parameter: Plant Line Value: Columbia
  misc_feature: MA Experiment 20001450 PARAMETER Experiment Name: At_Far-red-induction_P Parameter: Timepoint (hr) Value: 8
  misc_feature: MA Experiment 20001450 PARAMETER Experiment Name: At_Far-red-induction_P Parameter: Tissue Value: Whole Plant
  misc_feature: MA Experiment ID: 20001555 Result: Up-regulated in Transcription
  misc_feature: MA Experiment 20001555 PARAMETER Experiment Name: At_Drought_Soil_Dry_P Parameter: Age (day) Value: 24
  misc_feature: MA Experiment 20001555 PARAMETER Experiment Name: At_Drought_Soil_Dry_P Parameter: Organism Value: A. thaliana
  misc_feature: MA Experiment 20001555 PARAMETER Experiment Name: At_Drought_Soil_Dry_P Parameter: Plant Line Value: WS
  misc_feature: MA Experiment 20001555 PARAMETER Experiment Name: At_Drought_Soil_Dry_P Parameter: Post Timepoint (hr) Value: None
  misc_feature: MA Experiment 20001555 PARAMETER Experiment Name: At_Drought_Soil_Dry_P Parameter: Post-Treatment Value: None
  misc_feature: MA Experiment 20001555 PARAMETER Experiment Name: At_Drought_Soil_Dry_P Parameter: Timepoint (day) Value: 10
  misc_feature: MA Experiment 20001555 PARAMETER Experiment Name: At_Drought_Soil_Dry_P Parameter: Treatment Value: Drought vs. No Drought
  misc_feature: MA Experiment ID: 20001556 Result: Up-regulated in Transcription
  misc_feature: MA Experiment 20001556 PARAMETER Experiment Name: At_Drought_Soil_Dry_P Parameter: Age (day) Value: 26
  misc_feature: MA Experiment 20001556 PARAMETER Experiment Name: At_Drought_Soil_Dry_P Parameter: Organism Value: A. thaliana
  misc_feature: MA Experiment 20001556 PARAMETER Experiment Name: At_Drought_Soil_Dry_P Parameter: Plant Line Value: WS
  misc_feature: MA Experiment 20001556 PARAMETER Experiment Name: At_Drought_Soil_Dry_P Parameter: Post Timepoint (hr) Value: None
  misc_feature: MA Experiment 20001556 PARAMETER Experiment Name: At_Drought_Soil_Dry_P Parameter: Post-Treatment Value: None
  misc_feature: MA Experiment 20001556 PARAMETER Experiment Name: At_Drought_Soil_Dry_P Parameter: Timepoint (day) Value: 12
  misc_feature: MA Experiment 20001556 PARAMETER Experiment Name: At_Drought_Soil_Dry_P Parameter: Treatment Value: Drought vs. No Drought
  misc_feature: MA Experiment ID: 20001559 Result: Up-regulated in Transcription
  misc_feature: MA Experiment 20001559 PARAMETER Experiment Name: At_Drought_Soil_Dry_P Parameter: Age (day) Value: 28
  misc_feature: MA Experiment 20001559 PARAMETER Experiment Name: At_Drought_Soil_Dry_P Parameter: Organism Value: A. thaliana
  misc_feature: MA Experiment 20001559 PARAMETER Experiment Name: At_Drought_Soil_Dry_P Parameter: Plant Line Value: WS
  misc_feature: MA Experiment 20001559 PARAMETER Experiment Name: At_Drought_Soil_Dry_P Parameter: Post Timepoint (hr) Value: 29
  misc_feature: MA Experiment 20001559 PARAMETER Experiment Name: At_Drought_Soil_Dry_P Parameter: Post-Treatment Value: Re-Water vs. No Drought
  misc_feature: MA Experiment 20001559 PARAMETER Experiment Name: At_Drought_Soil_Dry_P Parameter: Timepoint (day) Value: 14
  misc_feature: MA Experiment 20001559 PARAMETER Experiment Name: At_Drought_Soil_Dry_P Parameter: Treatment Value: Drought vs. No Drought
aatgtccacccataattcctcctcagtctttttataaacaaaccattttcttgcttttgctcgcaaaactttaaccttaaaaaccaaaccaaaaaaaaaaaaactaaattaaacttatggatgtgtcaaatgagacagtggaaagaaccgatctccggacacctttagtagatccggcagacacggaggtgaaacctctaccagaggtcgggctcgagagcgtattaacggagagtagcttgtcataccggaggcgtgtgtacttaggagccggtatagagttgaaagtacttttccggttggcactaccggcgatacttatctatttagtcaactccggaatgggtatatccgctcgtgtcttcgccggtcatgttggtagtcaagaacttgcggccgcgtccatcggaaatagctgcttcaatctcgtctatggacttatgttaggtatgggcagtgcagtcgaaacactatgtggacaagcctatggagcccatcgttacgagatgcttgggatctatctccaaagagcaacaatagtcctcgctctagttggcttgcccatgacattactatacaccttctcgtaccctattctaatcctactaggggaacccaaaacggtgtcgtacatgggatccaaatacatcgccgggctcatccctcaaatcttcgcttacgccgtcaacttcacggcccaaaagttcctccaggcccaaagcgtggttgccccgagcgccttcatctcagccgccgccctcatcctccagatattgttgacgtggatcaccgtttatgtaatggacatgggctttatgggcatagcttatgttcttacaatttcttggtgggtcattgttggatcccagtgtttttacattgcggttagtcccaagtttagacacacgtggactggtcttagctggagatcgctccaaggtctttggagcttctttaaactctctgctggctcagctgttatgatttgtctggaaatgtggtattcgcagattcttgttcttcttgctggtttgctcgaaaatcctgctcgctctctagattctctttccatctgtatgtcaatttcagcattatcattcatggtctctgtcggctttaatgctgctgtaagtgtacggacaagtaatgagcttggagcaggaaatccgaaatcagcatggttctctacatggacggctacttttgtatccttcgtgatctccgtgacggaagccctcgccgtgatttggtttcgtgattacgttagctacattttcacggaggatgctgacgtggctaaagccgtctctgacctctgtccttttcttgccatcaccatcattctcaacggaattcaacctgtcttgtccggagtggcagtgggatgtggatggcaaacatacgtggcatatgtgaatgttggttgttactacgttgttggtattccggttgggtgtattctcggcttcactttcgattttcaagccaagggaatatggaccgggatgattggaggtaccctcatgcaaacactcattttactttacgtcacgtaccgaacagattgggataaagaggtggaaaaagcgaggaaacgtttggatctgtgggacgacaagaaggagcctctccaaaactagttataacaagtttggtggagtgatagacaataaagaaaaggaaataagtgtcgtgtgtgcaggtgatttcaatgtacgtagcttttcatggttattatgcttgttctatggaaatagaacaattaaaatatatttttgtctgatggattattctttatttacgaaaagttgttcttaaattgatgtttctttcctttctcagaatgatttattatgtcttcactctatagacagttattaattatttattatggaattttgatgtaattgggtgtagtaagtaaagtagcacatcaatgcg

SEQ ID NO: 30284 - protein, 507 aa, Arabidopsis thaliana
  peptide (1)..(507): Ceres Seq. ID no. 13490572
  misc_feature (285)..(448): Pfam Name: MatE Pfam Description: MatE
  misc_feature (16)..(503): Homolog of NCBI NO: 20466556 NR Description: integral membrane protein, putative [Arabidopsis
  misc_feature (16)..(503): Homolog of NCBI NO: 15233127 NR Description: MATE efflux protein family [Arabidopsis thaliana]
  misc_feature (4)..(505): Homolog of NCBI NO: 22655139 NR Description: unknown protein [Arabidopsis thaliana]
  misc_feature (4)..(505): Homolog of NCBI NO: 15221073 NR Description: MATE efflux protein family [Arabidopsis thaliana]
  misc_feature (3)..(505): Homolog of NCBI NO: 15081773 NR Description: At1g61890/F8K4_9 [Arabidopsis thaliana]
  misc_feature (3)..(505): Homolog of NCBI NO: 18407368 NR Description: MATE efflux protein family [Arabidopsis thaliana]
  misc_feature (76)..(496): Homolog of NCBI NO: 15234633 NR Description: MATE efflux protein family [Arabidopsis thaliana]
  misc_feature (1)..(467): Homolog of NCBI NO: 7487826 NR Description: hypothetical protein T8O5.120 - Arabidopsis
  misc_feature (1)..(507): Homolog of NCBI NO: 18415793 NR Description: MATE efflux protein family [Arabidopsis thaliana]
  misc_feature (1)..(507): Homolog of NCBI NO: 21553843 NR Description: unknown [Arabidopsis thaliana]
MDVSNETVERTDLRTPLVDPADTEVKPLPEVGLESVLTESSLSYRRRVYLGAGIELKVLFRLALPAILIYLVNSGMGISARVFAGHVGSQELAAASIGNSCFNLVYGLMLGMGSAVETLCGQAYGAHRYEMLGIYLQRATIVLALVGLPMTLLYTFSYPILILLGEPKTVSYMGSKYIAGLIPQIFAYAVNFTAQKFLQAQSVVAPSAFISAAALILQILLTWITVYVMDMGFMGIAYVLTISWWVIVGSQCFYIAVSPKFRHTWTGLSWRSLQGLWSFFKLSAGSAVMICLEMWYSQILVLLAGLLENPARSLDSLSICMSISALSFMVSVGFNAAVSVRTSNELGAGNPKSAWFSTWTATFVSFVISVTEALAVIWFRDYVSYIFTEDADVAKAVSDLCPFLAITIILNGIQPVLSGVAVGCGWQTYVAYVNVGCYYVVGIPVGCILGFTFDFQAKGIWTGMIGGTLMQTLILLYVTYRTDWDKEVEKARKRLDLWDDKKEPLQN

SEQ ID NO: 30285 - protein, 432 aa, Arabidopsis thaliana
  peptide (1)..(432): Ceres Seq. ID no. 13490573
  misc_feature (210)..(373): Pfam Name: MatE Pfam Description: MatE
  misc_feature (1)..(428): Homolog of NCBI NO: 20466556 NR Description: integral membrane protein, putative [Arabidopsis
  misc_feature (1)..(428): Homolog of NCBI NO: 15233127 NR Description: MATE efflux protein family [Arabidopsis thaliana]
  misc_feature (1)..(430): Homolog of NCBI NO: 22655139 NR Description: unknown protein [Arabidopsis thaliana]
  misc_feature (1)..(430): Homolog of NCBI NO: 15221073 NR Description: MATE efflux protein family [Arabidopsis thaliana]
  misc_feature (1)..(430): Homolog of NCBI NO: 15081773 NR Description: At1g61890/F8K4_9 [Arabidopsis thaliana]
  misc_feature (1)..(430): Homolog of NCBI NO: 18407368 NR Description: MATE efflux protein family [Arabidopsis thaliana]
  misc_feature (1)..(421): Homolog of NCBI NO: 15234633 NR Description: MATE efflux protein family [Arabidopsis thaliana]
  misc_feature (1)..(392): Homolog of NCBI NO: 7487826 NR Description: hypothetical protein T8O5.120 - Arabidopsis
  misc_feature (1)..(432): Homolog of NCBI NO: 18415793 NR Description: MATE efflux protein family [Arabidopsis thaliana]
  misc_feature (1)..(432): Homolog of NCBI NO: 21553843 NR Description: unknown [Arabidopsis thaliana]
MGISARVFAGHVGSQELAAASIGNSCFNLVYGLMLGMGSAVETLCGQAYGAHRYEMLGIYLQRATIVLALVGLPMTLLYTFSYPILILLGEPKTVSYMGSKYIAGLIPQIFAYAVNFTAQKFLQAQSVVAPSAFISAAALILQILLTWITVYVMDMGFMGIAYVLTISWWVIVGSQCFYIAVSPKFRHTWTGLSWRSLQGLWSFFKLSAGSAVMICLEMWYSQILVLLAGLLENPARSLDSLSICMSISALSFMVSVGFNAAVSVRTSNELGAGNPKSAWFSTWTATFVSFVISVTEALAVIWFRDYVSYIFTEDADVAKAVSDLCPFLAITIILNGIQPVLSGVAVGCGWQTYVAYVNVGCYYVVGIPVGCILGFTFDFQAKGIWTGMIGGTLMQTLILLYVTYRTDWDKEVEKARKRLDLWDDKKEPLQN

SEQ ID NO: 30286 - protein, 399 aa, Arabidopsis thaliana
  peptide (1)..(399): Ceres Seq. ID no. 13490574
  misc_feature (177)..(340): Pfam Name: MatE Pfam Description: MatE
  misc_feature (1)..(395): Homolog of NCBI NO: 20466556 NR Description: integral membrane protein, putative [Arabidopsis
  misc_feature (1)..(395): Homolog of NCBI NO: 15233127 NR Description: MATE efflux protein family [Arabidopsis thaliana]
  misc_feature (1)..(397): Homolog of NCBI NO: 22655139 NR Description: unknown protein [Arabidopsis thaliana]
  misc_feature (1)..(397): Homolog of NCBI NO: 15221073 NR Description: MATE efflux protein family [Arabidopsis thaliana]
  misc_feature (1)..(397): Homolog of NCBI NO: 15081773 NR Description: At1g61890/F8K4_9 [Arabidopsis thaliana]
  misc_feature (1)..(397): Homolog of NCBI NO: 18407368 NR Description: MATE efflux protein family [Arabidopsis thaliana]
  misc_feature (1)..(388): Homolog of NCBI NO: 15234633 NR Description: MATE efflux protein family [Arabidopsis thaliana]
  misc_feature (1)..(359): Homolog of NCBI NO: 7487826 NR Description: hypothetical protein T8O5.120 - Arabidopsis
  misc_feature (1)..(399): Homolog of NCBI NO: 18415793 NR Description: MATE efflux protein family [Arabidopsis thaliana]
  misc_feature (1)..(399): Homolog of NCBI NO: 21553843 NR Description: unknown [Arabidopsis thaliana]
MLGMGSAVETLCGQAYGAHRYEMLGIYLQRATIVLALVGLPMTLLYTFSYPILILLGEPKTVSYMGSKYIAGLIPQIFAYAVNFTAQKFLQAQSVVAPSAFISAAALILQILLTWITVYVMDMGFMGIAYVLTISWWVIVGSQCFYIAVSPKFRHTWTGLSWRSLQGLWSFFKLSAGSAVMICLEMWYSQILVLLAGLLENPARSLDSLSICMSISALSFMVSVGFNAAVSVRTSNELGAGNPKSAWFSTWTATFVSFVISVTEALAVIWFRDYVSYIFTEDADVAKAVSDLCPFLAITIILNGIQPVLSGVAVGCGWQTYVAYVNVGCYYVVGIPVGCILGFTFDFQAKGIWTGMIGGTLMQTLILLYVTYRTDWDKEVEKARKRLDLWDDKKEPLQN

SEQ ID NO: 30287 - DNA, 632 bp, Arabidopsis thaliana
  misc_feature (1)..(632): Ceres Seq. ID no. 13490432
  misc_feature: MA Experiment ID: 108561 Result: Up-regulated in Transcription
  misc_feature: MA Experiment 108561 PARAMETER Experiment Name: At_100uM_ABA_cDNA_P Parameter: Timepoint (hr) Value: 6
  misc_feature: MA Experiment 108561 PARAMETER Experiment Name: At_100uM_ABA_cDNA_P Parameter: Tissue Value: Aerial
  misc_feature: MA Experiment 108561 PARAMETER Experiment Name: At_100uM_ABA_cDNA_P Parameter: Treatment Value: 100uM ABA vs. No Treatment
  misc_feature: MA Experiment ID: 108585 Result: Up-regulated in Transcription
  misc_feature: MA Experiment 108585 PARAMETER Experiment Name: At_5mM_NaNP_cDNA_P Parameter: Timepoint (hr) Value: 6
  misc_feature: MA Experiment 108585 PARAMETER Experiment Name: At_5mM_NaNP_cDNA_P Parameter: Tissue Value: Aerial
  misc_feature: MA Experiment 108585 PARAMETER Experiment Name: At_5mM_NaNP_cDNA_P Parameter: Treatment Value: null
  misc_feature: MA Experiment ID: 108595 Result: Up-regulated in Transcription
  misc_feature: MA Experiment 108595 PARAMETER Experiment Name: At_Ler-pi_Ovule_cDNA_P Parameter: Plant Line Value: null
  misc_feature: MA Experiment ID: 108608 Result: Up-regulated in Transcription
  misc_feature: MA Experiment 108608 PARAMETER Experiment Name: At_100uM_ABA_cDNA_P Parameter: Timepoint (hr) Value: 1
  misc_feature: MA Experiment 108608 PARAMETER Experiment Name: At_100uM_ABA_cDNA_P Parameter: Tissue Value: Aerial
  misc_feature: MA Experiment 108608 PARAMETER Experiment Name: At_100uM_ABA_cDNA_P Parameter: Treatment Value: 100uM ABA vs. No Treatment
  misc_feature: MA Experiment ID: 108668 Result: Up-regulated in Transcription
  misc_feature: MA Experiment 108668 PARAMETER Experiment Name: At_2mM_SA_cDNA_P Parameter: Plant Line Value: WS
  misc_feature: MA Experiment 108668 PARAMETER Experiment Name: At_2mM_SA_cDNA_P Parameter: Timepoint (hr) Value: 6
  misc_feature: MA Experiment 108668 PARAMETER Experiment Name: At_2mM_SA_cDNA_P Parameter: Treatment Value: 2mM SA vs. No Treatment
  misc_feature: MA Experiment ID: 20000030 Result: Down-regulated in Transcription
  misc_feature: MA Experiment 20000030 PARAMETER Experiment Name: At_CS6630_Roots_cDNA_P Parameter: Plant Line Value: CS6630 vs. WS
  misc_feature: MA Experiment 20000030 PARAMETER Experiment Name: At_CS6630_Roots_cDNA_P Parameter: Tissue Value: Roots
  misc_feature: MA Experiment ID: 20000069 Result: Up-regulated in Transcription
  misc_feature: MA Experiment 20000069 PARAMETER Experiment Name: At_100uM_ABA_Mutants_cDNA_P Parameter: Plant Line Value: CS23
  misc_feature: MA Experiment 20000069 PARAMETER Experiment Name: At_100uM_ABA_Mutants_cDNA_P Parameter: Timepoint (hr) Value: 6
  misc_feature: MA Experiment 20000069 PARAMETER Experiment Name: At_100uM_ABA_Mutants_cDNA_P Parameter: Tissue Value: Aerial
  misc_feature: MA Experiment 20000069 PARAMETER Experiment Name: At_100uM_ABA_Mutants_cDNA_P Parameter: Treatment Value: 100uM ABA vs. No Treatment
  misc_feature: MA Experiment ID: 20000072 Result: Up-regulated in Transcription
  misc_feature: MA Experiment 20000072 PARAMETER Experiment Name: At_100uM_ABA_Mutants_cDNA_P Parameter: Plant Line Value: CS8105
  misc_feature: MA Experiment 20000072 PARAMETER Experiment Name: At_100uM_ABA_Mutants_cDNA_P Parameter: Timepoint (hr) Value: 6
  misc_feature: MA Experiment 20000072 PARAMETER Experiment Name: At_100uM_ABA_Mutants_cDNA_P Parameter: Tissue Value: Aerial
  misc_feature: MA Experiment 20000072 PARAMETER Experiment Name: At_100uM_ABA_Mutants_cDNA_P Parameter: Treatment Value: 100uM ABA vs. No Treatment
  misc_feature: MA Experiment ID: 20000166 Result: Up-regulated in Transcription
  misc_feature: MA Experiment 20000166 PARAMETER Experiment Name: At_100uM_ABA_P Parameter: Age (day) Value: 14
  misc_feature: MA Experiment 20000166 PARAMETER Experiment Name: At_100uM_ABA_P Parameter: Organism Value: A. thaliana
  misc_feature: MA Experiment 20000166 PARAMETER Experiment Name: At_100uM_ABA_P Parameter: Plant Line Value: WS
  misc_feature: MA Experiment 20000166 PARAMETER Experiment Name: At_100uM_ABA_P Parameter: Timepoint (hr) Value: 1
  misc_feature: MA Experiment 20000166 PARAMETER Experiment Name: At_100uM_ABA_P Parameter: Tissue Value: Aerial
  misc_feature: MA Experiment 20000166 PARAMETER Experiment Name: At_100uM_ABA_P Parameter: Treatment Value: 100uM ABA vs. No Treatment
  misc_feature: MA Experiment ID: 20000169 Result: Up-regulated in Transcription
  misc_feature: MA Experiment 20000169 PARAMETER Experiment Name: At_100uM_ABA_P Parameter: Age (day) Value: 14
  misc_feature: MA Experiment 20000169 PARAMETER Experiment Name: At_100uM_ABA_P Parameter: Organism Value: A. thaliana
  misc_feature: MA Experiment 20000169 PARAMETER Experiment Name: At_100uM_ABA_P Parameter: Plant Line Value: WS
  misc_feature: MA Experiment 20000169 PARAMETER Experiment Name: At_100uM_ABA_P Parameter: Timepoint (hr) Value: 6
  misc_feature: MA Experiment 20000169 PARAMETER Experiment Name: At_100uM_ABA_P Parameter: Tissue Value: Aerial
  misc_feature: MA Experiment 20000169 PARAMETER Experiment Name: At_100uM_ABA_P Parameter: Treatment Value: 100uM ABA vs. No Treatment
  misc_feature: MA Experiment ID: 20000173 Result: Down-regulated in Transcription
  misc_feature: MA Experiment 20000173 PARAMETER Experiment Name: At_42deg_Heat_P Parameter: Age (day) Value: 14
  misc_feature: MA Experiment 20000173 PARAMETER Experiment Name: At_42deg_Heat_P Parameter: Organism Value: A. thaliana
  misc_feature: MA Experiment 20000173 PARAMETER Experiment Name: At_42deg_Heat_P Parameter: Plant Line Value: WS
  misc_feature: MA Experiment 20000173 PARAMETER Experiment Name: At_42deg_Heat_P Parameter: Temperature (deg C) Value: 42 vs. 22
  misc_feature: MA Experiment 20000173 PARAMETER Experiment Name: At_42deg_Heat_P Parameter: Timepoint (hr) Value: 6
  misc_feature: MA Experiment 20000173 PARAMETER Experiment Name: At_42deg_Heat_P Parameter: Tissue Value: Aerial
  misc_feature: MA Experiment ID: 20000182 Result: Up-regulated in Transcription
  misc_feature: MA Experiment 20000182 PARAMETER Experiment Name: At_2mM_SA_P Parameter: Age (day) Value: 14
  misc_feature: MA Experiment 20000182 PARAMETER Experiment Name: At_2mM_SA_P Parameter: Organism Value: A. thaliana
  misc_feature: MA Experiment 20000182 PARAMETER Experiment Name: At_2mM_SA_P Parameter: Plant Line Value: WS
  misc_feature: MA Experiment 20000182 PARAMETER Experiment Name: At_2mM_SA_P Parameter: Timepoint (hr) Value: 6
  misc_feature: MA Experiment 20000182 PARAMETER Experiment Name: At_2mM_SA_P Parameter: Tissue Value: Aerial
  misc_feature: MA Experiment 20000182 PARAMETER Experiment Name: At_2mM_SA_P Parameter: Treatment Value: 2mM SA vs. No Treatment
  misc_feature: MA Experiment ID: 20000184 Result: Down-regulated in Transcription
  misc_feature: MA Experiment 20000184 PARAMETER Experiment Name: At_Shoots__P Parameter: Age (day) Value: 7
  misc_feature: MA Experiment 20000184 PARAMETER Experiment Name: At_Shoots__P Parameter: Tissue Value: Shoots vs. Whole Plant
  misc_feature: MA Experiment ID: 20000265 Result: Up-regulated in Transcription
  misc_feature: MA Experiment 20000265 PARAMETER Experiment Name: At_Open_Flower_P Parameter: Age (day) Value: 21
  misc_feature: MA Experiment 20000265 PARAMETER Experiment Name: At_Open_Flower_P Parameter: Plant Line Value: WS
  misc_feature: MA Experiment 20000265 PARAMETER Experiment Name: At_Open_Flower_P Parameter: Tissue Value: Closed Flower vs. Whole Plant
  misc_feature: MA Experiment ID: 20000453 Result: Up-regulated in Transcription
  misc_feature: MA Experiment 20000453 PARAMETER Experiment Name: At_100uM_ABA_P Parameter: Age (day) Value: 15
  misc_feature: MA Experiment 20000453 PARAMETER Experiment Name: At_100uM_ABA_P Parameter: Organism Value: A. thaliana
  misc_feature: MA Experiment 20000453 PARAMETER Experiment Name: At_100uM_ABA_P Parameter: Plant Line Value: WS
  misc_feature: MA Experiment 20000453 PARAMETER Experiment Name: At_100uM_ABA_P Parameter: Timepoint (hr) Value: 24
  misc_feature: MA Experiment 20000453 PARAMETER Experiment Name: At_100uM_ABA_P Parameter: Tissue Value: Aerial
  misc_feature: MA Experiment 20000453 PARAMETER Experiment Name: At_100uM_ABA_P Parameter: Treatment Value: 100uM ABA vs. No Treatment
  misc_feature: MA Experiment ID: 20001554 Result: Up-regulated in Transcription
  misc_feature: MA Experiment 20001554 PARAMETER Experiment Name: At_Drought_Soil_Dry_P Parameter: Age (day) Value: 21
  misc_feature: MA Experiment 20001554 PARAMETER Experiment Name: At_Drought_Soil_Dry_P Parameter: Organism Value: A. thaliana
  misc_feature: MA Experiment 20001554 PARAMETER Experiment Name: At_Drought_Soil_Dry_P Parameter: Plant Line Value: WS
  misc_feature: MA Experiment 20001554 PARAMETER Experiment Name: At_Drought_Soil_Dry_P Parameter: Post Timepoint (hr) Value: None
  misc_feature: MA Experiment 20001554 PARAMETER Experiment Name: At_Drought_Soil_Dry_P Parameter: Post-Treatment Value: None
  misc_feature: MA Experiment 20001554 PARAMETER Experiment Name: At_Drought_Soil_Dry_P Parameter: Timepoint (day) Value: 7
  misc_feature: MA Experiment 20001554 PARAMETER Experiment Name: At_Drought_Soil_Dry_P Parameter: Treatment Value: Drought vs. No Drought
  misc_feature: MA Experiment ID: 20001555 Result: Up-regulated in Transcription
  misc_feature: MA Experiment 20001555 PARAMETER Experiment Name: At_Drought_Soil_Dry_P Parameter: Age (day) Value: 24
  misc_feature: MA Experiment 20001555 PARAMETER Experiment Name: At_Drought_Soil_Dry_P Parameter: Organism Value: A. thaliana
  misc_feature: MA Experiment 20001555 PARAMETER Experiment Name: At_Drought_Soil_Dry_P Parameter: Plant Line Value: WS
  misc_feature: MA Experiment 20001555 PARAMETER Experiment Name: At_Drought_Soil_Dry_P Parameter: Post Timepoint (hr) Value: None
  misc_feature: MA Experiment 20001555 PARAMETER Experiment Name: At_Drought_Soil_Dry_P Parameter: Post-Treatment Value: None
  misc_feature: MA Experiment 20001555 PARAMETER Experiment Name: At_Drought_Soil_Dry_P Parameter: Timepoint (day) Value: 10
  misc_feature: MA Experiment 20001555 PARAMETER Experiment Name: At_Drought_Soil_Dry_P Parameter: Treatment Value: Drought vs. No Drought
  misc_feature: MA Experiment ID: 20001560 Result: Up-regulated in Transcription
  misc_feature: MA Experiment 20001560 PARAMETER Experiment Name: At_Drought_Soil_Dry_P Parameter: Age (day) Value: 28
  misc_feature: MA Experiment 20001560 PARAMETER Experiment Name: At_Drought_Soil_Dry_P Parameter: Organism Value: A. thaliana
  misc_feature: MA Experiment 20001560 PARAMETER Experiment Name: At_Drought_Soil_Dry_P Parameter: Plant Line Value: WS
  misc_feature: MA Experiment 20001560 PARAMETER Experiment Name: At_Drought_Soil_Dry_P Parameter: Post Timepoint (hr) Value: None
  misc_feature: MA Experiment 20001560 PARAMETER Experiment Name: At_Drought_Soil_Dry_P Parameter: Post-Treatment Value: None
  misc_feature: MA Experiment 20001560 PARAMETER Experiment Name: At_Drought_Soil_Dry_P Parameter: Timepoint (day) Value: 14
  misc_feature: MA Experiment 20001560 PARAMETER Experiment Name: At_Drought_Soil_Dry_P Parameter: Treatment Value: Drought vs. No Drought
  misc_feature: MA Experiment ID: 20001757 Result: Down-regulated in Transcription
  misc_feature: MA Experiment 20001757 PARAMETER Experiment Name: At_50mM_NH4NO3_L-to-H_P Parameter: Timepoint (hr) Value: 6
  misc_feature: MA Experiment 20001757 PARAMETER Experiment Name: At_50mM_NH4NO3_L-to-H_P Parameter: Tissue Value: Leaf
  misc_feature: MA Experiment 20001757 PARAMETER Experiment Name: At_50mM_NH4NO3_L-to-H_P Parameter: Treatment Value: 50mM NH4NO3 vs 100mM Mannitol
  misc_feature: MA Experiment ID: 20001904 Result: Up-regulated in Transcription
  misc_feature: MA Experiment 20001904 PARAMETER Experiment Name: At_Drought_Reproduction_P Parameter: Age (day) Value: 37
  misc_feature: MA Experiment 20001904 PARAMETER Experiment Name: At_Drought_Reproduction_P Parameter: Organism Value: A. thaliana
  misc_feature: MA Experiment 20001904 PARAMETER Experiment Name: At_Drought_Reproduction_P Parameter: Plant Line Value: WS
  misc_feature: MA Experiment 20001904 PARAMETER Experiment Name: At_Drought_Reproduction_P Parameter: Timepoint (day) Value: 7
  misc_feature: MA Experiment 20001904 PARAMETER Experiment Name: At_Drought_Reproduction_P Parameter: Tissue Value: Rosettes
  misc_feature: MA Experiment 20001904 PARAMETER Experiment Name: At_Drought_Reproduction_P Parameter: Treatment Value: Drought vs. No Drought
  misc_feature: MA Experiment ID: 20001905 Result: Up-regulated in Transcription
  misc_feature: MA Experiment 20001905 PARAMETER Experiment Name: At_Drought_Reproduction_P Parameter: Age (day) Value: 40
  misc_feature: MA Experiment 20001905 PARAMETER Experiment Name: At_Drought_Reproduction_P Parameter: Organism Value: A. thaliana
  misc_feature: MA Experiment 20001905 PARAMETER Experiment Name: At_Drought_Reproduction_P Parameter: Plant Line Value: WS
  misc_feature: MA Experiment 20001905 PARAMETER Experiment Name: At_Drought_Reproduction_P Parameter: Timepoint (day) Value: 10
  misc_feature: MA Experiment 20001905 PARAMETER Experiment Name: At_Drought_Reproduction_P Parameter: Tissue Value: Rosettes
  misc_feature: MA Experiment 20001905 PARAMETER Experiment Name: At_Drought_Reproduction_P Parameter: Treatment Value: Drought vs. No Drought
  misc_feature: MA Experiment ID: 20001906 Result: Up-regulated in Transcription
  misc_feature: MA Experiment 20001906 PARAMETER Experiment Name: At_Drought_Reproduction_P Parameter: Age (day) Value: 35
  misc_feature: MA Experiment 20001906 PARAMETER Experiment Name: At_Drought_Reproduction_P Parameter: Organism Value: A. thaliana
  misc_feature: MA Experiment 20001906 PARAMETER Experiment Name: At_Drought_Reproduction_P Parameter: Plant Line Value: WS
  misc_feature: MA Experiment 20001906 PARAMETER Experiment Name: At_Drought_Reproduction_P Parameter: Timepoint (day) Value: 5
  misc_feature: MA Experiment 20001906 PARAMETER Experiment Name: At_Drought_Reproduction_P Parameter: Tissue Value: Siliques
  misc_feature: MA Experiment 20001906 PARAMETER Experiment Name: At_Drought_Reproduction_P Parameter: Treatment Value: Drought vs. No Drought
  misc_feature: MA Experiment ID: 20001911 Result: Up-regulated in Transcription
  misc_feature: MA Experiment 20001911 PARAMETER Experiment Name: At_Drought_Reproduction_P Parameter: Age (day) Value: 40
  misc_feature: MA Experiment 20001911 PARAMETER Experiment Name: At_Drought_Reproduction_P Parameter: Organism Value: A. thaliana
  misc_feature: MA Experiment 20001911 PARAMETER Experiment Name: At_Drought_Reproduction_P Parameter: Plant Line Value: WS
  misc_feature: MA Experiment 20001911 PARAMETER Experiment Name: At_Drought_Reproduction_P Parameter: Timepoint (day) Value: 10
  misc_feature: MA Experiment 20001911 PARAMETER Experiment Name: At_Drought_Reproduction_P Parameter: Tissue Value: Flowers
  misc_feature: MA Experiment 20001911 PARAMETER Experiment Name: At_Drought_Reproduction_P Parameter: Treatment Value: Drought vs. No Drought
gatttctgatctttgccctcttttcataagatagttagggttttagtcttttgtgtaataattcattgatcatgaacaagggagaagaaggaggagaagacaaggaagtggtttctcttcaaactctgagtaagaaaatggatgattttgcaaaagctagagattgggagaagtatcacagtccaaggaatctccttcttgctatggtgggtgaagtgggagagctatcagagatattccaatggaaaggagaagtagcaagaggatgtccagattggaaagaagaagagaaagtccatcttggagaagagttatcagatgttttgttgtatttggtgaggctttcggatgcgtgtggtgtcgatttaggcaaagccgctctgcgcaagatcgagcttaatgctattaagtatccagttcccaaaaagactgatgatcattgtgttggtgatggtgaagattcaagcagcaagattaagttgaatgaagaaaactaatctctcttattagtggttttgtgagtaagtttattgtgggtattttcttgttatgaagtaggagcatgatcaagaacatataatcttcgaaggcctctaattatatttcagatgaatctacttagtaccactttt

SEQ ID NO: 30288 - protein, 141 aa, Arabidopsis thaliana
  peptide (1)..(141): Ceres Seq. ID no. 13490433
  misc_feature (10)..(117): Homolog of NCBI NO: 34495748 NR Description: conserved hypothetical protein
  misc_feature (15)..(124): Homolog of NCBI NO: 34864617 NR Description: similar to RS21-C6 protein [Rattus norvegicus]
  misc_feature (16)..(124): Homolog of NCBI NO: 34877104 NR Description: similar to RS21-C6 protein [Rattus norvegicus]
  misc_feature (3)..(115): Homolog of NCBI NO: 13129100 NR Description: hypothetical protein MGC5627 [Homo sapiens]
  misc_feature (15)..(124): Homolog of NCBI NO: 12963573 NR Description: RIKEN cDNA 2410015N17 [Mus musculus]
  misc_feature (15)..(124): Homolog of NCBI NO: 20302079 NR Description: RS21-C6 protein [Rattus norvegicus]
  misc_feature (15)..(118): Homolog of NCBI NO: 33468615 NR Description: SI:zC150A22.2 (novel protein) [Danio rerio]
  misc_feature (1)..(115): Homolog of NCBI NO: 32352194 NR Description: hypothetical protein [Oryza sativa (japonica
  misc_feature (14)..(120): Homolog of NCBI NO: 32482945 NR Description: OSJNBb0072M01.10 [Oryza sativa (japonica
  misc_feature (1)..(141): Homolog of NCBI NO: 30687841 NR Description: expressed protein [Arabidopsis thaliana]
MNKGEEGGEDKEVVSLQTLSKKMDDFAKARDWEKYHSPRNLLLAMVGEVGELSEIFQWKGEVARGCPDWKEEEKVHLGEELSDVLLYLVRLSDACGVDLGKAALRKIELNAIKYPVPKKTDDHCVGDGEDSSSKIKLNEEN

SEQ ID NO: 30289 - protein, 119 aa, Arabidopsis thaliana
  peptide (1)..(119): Ceres Seq. ID no. 13490434
  misc_feature (1)..(95): Homolog of NCBI NO: 34495748 NR Description: conserved hypothetical protein
  misc_feature (1)..(102): Homolog of NCBI NO: 34864617 NR Description: similar to RS21-C6 protein [Rattus norvegicus]
  misc_feature (1)..(102): Homolog of NCBI NO: 34877104 NR Description: similar to RS21-C6 protein [Rattus norvegicus]
  misc_feature (1)..(93): Homolog of NCBI NO: 13129100 NR Description: hypothetical protein MGC5627 [Homo sapiens]
  misc_feature (1)..(102): Homolog of NCBI NO: 12963573 NR Description: RIKEN cDNA 2410015N17 [Mus musculus]
  misc_feature (1)..(102): Homolog of NCBI NO: 20302079 NR Description: RS21-C6 protein [Rattus norvegicus]
  misc_feature (1)..(96): Homolog of NCBI NO: 33468615 NR Description: SI:zC150A22.2 (novel protein) [Danio rerio]
  misc_feature (1)..(93): Homolog of NCBI NO: 32352194 NR Description: hypothetical protein [Oryza sativa (japonica
  misc_feature (1)..(98): Homolog of NCBI NO: 32482945 NR Description: OSJNBb0072M01.10 [Oryza sativa (japonica
  misc_feature (1)..(119): Homolog of NCBI NO: 30687841 NR Description: expressed protein [Arabidopsis thaliana]
MDDFAKARDWEKYHSPRNLLLAMVGEVGELSEIFQWKGEVARGCPDWKEEEKVHLGEELSDVLLYLVRLSDACGVDLGKAALRKIELNAIKYPVPKKTDDHCVGDGEDSSSKIKLNEEN

SEQ ID NO: 30290 - protein, 97 aa, Arabidopsis thaliana
  peptide (1)..(97): Ceres Seq. ID no. 13490435
  misc_feature (1)..(73): Homolog of NCBI NO: 34495748 NR Description: conserved hypothetical protein
  misc_feature (1)..(80): Homolog of NCBI NO: 34864617 NR Description: similar to RS21-C6 protein [Rattus norvegicus]
  misc_feature (1)..(80): Homolog of NCBI NO: 34877104 NR Description: similar to RS21-C6 protein [Rattus norvegicus]
  misc_feature (1)..(71): Homolog of NCBI NO: 13129100 NR Description: hypothetical protein MGC5627 [Homo sapiens]
  misc_feature (1)..(80): Homolog of NCBI NO: 12963573 NR Description: RIKEN cDNA 2410015N17 [Mus musculus]
  misc_feature (1)..(80): Homolog of NCBI NO: 20302079 NR Description: RS21-C6 protein [Rattus norvegicus]
  misc_feature (1)..(74): Homolog of NCBI NO: 33468615 NR Description: SI:zC150A22.2 (novel protein) [Danio rerio]
  misc_feature (1)..(71): Homolog of NCBI NO: 32352194 NR Description: hypothetical protein [Oryza sativa (japonica
  misc_feature (1)..(76): Homolog of NCBI NO: 32482945 NR Description: OSJNBb0072M01.10 [Oryza sativa (japonica
  misc_feature (1)..(97): Homolog of NCBI NO: 30687841 NR Description: expressed protein [Arabidopsis thaliana]
MVGEVGELSEIFQWKGEVARGCPDWKEEEKVHLGEELSDVLLYLVRLSDACGVDLGKAALRKIELNAIKYPVPKKTDDHCVGDGEDSSSKIKLNEEN

SEQ ID NO: 30291 - DNA, 1072 bp, Arabidopsis thaliana
  misc_feature (1)..(1072): Ceres Seq. ID no. 13495755
  misc_feature: MA Experiment ID: 108434 Result: Up-regulated in Transcription
  misc_feature: MA Experiment 108434 PARAMETER Experiment Name: At_Root_Tips_cDNA_P Parameter: Tissue Value: Root Tips
  misc_feature: MA Experiment ID: 108462 Result: Down-regulated in Transcription
  misc_feature: MA Experiment 108462 PARAMETER Experiment Name: At_Germinating_Seeds_cDNA_P Parameter: Age (day) Value: 2 vs. 0
  misc_feature: MA Experiment 108462 PARAMETER Experiment Name: At_Germinating_Seeds_cDNA_P Parameter: Tissue Value: Germinating Seeds
  misc_feature: MA Experiment ID: 108463 Result: Down-regulated in Transcription
  misc_feature: MA Experiment 108463 PARAMETER Experiment Name: At_Germinating_Seeds_cDNA_P Parameter: Age (day) Value: 3 vs. 0
  misc_feature: MA Experiment 108463 PARAMETER Experiment Name: At_Germinating_Seeds_cDNA_P Parameter: Tissue Value: Germinating Seeds
  misc_feature: MA Experiment ID: 108464 Result: Down-regulated in Transcription
  misc_feature: MA Experiment 108464 PARAMETER Experiment Name: At_Germinating_Seeds_cDNA_P Parameter: Age (day) Value: 4 vs. 0
  misc_feature: MA Experiment 108464 PARAMETER Experiment Name: At_Germinating_Seeds_cDNA_P Parameter: Tissue Value: Germinating Seeds
  misc_feature: MA Experiment ID: 108572 Result: Down-regulated in Transcription
  misc_feature: MA Experiment 108572 PARAMETER Experiment Name: At_Drought_cDNA_P Parameter: Timepoint (hr) Value: 1
  misc_feature: MA Experiment 108572 PARAMETER Experiment Name: At_Drought_cDNA_P Parameter: Tissue Value: Aerial
  misc_feature: MA Experiment 108572 PARAMETER Experiment Name: At_Drought_cDNA_P Parameter: Treatment Value: Drought vs. No Drought
  misc_feature: MA Experiment ID: 108579 Result: Up-regulated in Transcription
  misc_feature: MA Experiment 108579 PARAMETER Experiment Name: At_4deg_Cold_cDNA_P Parameter: Temperature (deg C) Value: 4 vs. 22
  misc_feature: MA Experiment 108579 PARAMETER Experiment Name: At_4deg_Cold_cDNA_P Parameter: Timepoint (hr) Value: 6
  misc_feature: MA Experiment 108579 PARAMETER Experiment Name: At_4deg_Cold_cDNA_P Parameter: Tissue Value: Aerial
  misc_feature: MA Experiment ID: 108585 Result: Down-regulated in Transcription
  misc_feature: MA Experiment 108585 PARAMETER Experiment Name: At_5mM_NaNP_cDNA_P Parameter: Timepoint (hr) Value: 6
  misc_feature: MA Experiment 108585 PARAMETER Experiment Name: At_5mM_NaNP_cDNA_P Parameter: Tissue Value: Aerial
  misc_feature: MA Experiment 108585 PARAMETER Experiment Name: At_5mM_NaNP_cDNA_P Parameter: Treatment Value: null
  misc_feature: MA Experiment ID: 108607 Result: Down-regulated in Transcription
  misc_feature: MA Experiment 108607 PARAMETER Experiment Name: At_100uM_ABA_cDNA_P Parameter: Timepoint (hr) Value: 4
  misc_feature: MA Experiment 108607 PARAMETER Experiment Name: At_100uM_ABA_cDNA_P Parameter: Tissue Value: Aerial
  misc_feature: MA Experiment 108607 PARAMETER Experiment Name: At_100uM_ABA_cDNA_P Parameter: Treatment Value: 100uM ABA vs. No Treatment
  misc_feature: MA Experiment ID: 108668 Result: Down-regulated in Transcription
  misc_feature: MA Experiment 108668 PARAMETER Experiment Name: At_2mM_SA_cDNA_P Parameter: Plant Line Value: WS
  misc_feature: MA Experiment 108668 PARAMETER Experiment Name: At_2mM_SA_cDNA_P Parameter: Timepoint (hr) Value: 6
  misc_feature: MA Experiment 108668 PARAMETER Experiment Name: At_2mM_SA_cDNA_P Parameter: Treatment Value: 2mM SA vs. No Treatment
  misc_feature: MA Experiment ID: 20000069 Result: Up-regulated in Transcription
  misc_feature: MA Experiment 20000069 PARAMETER Experiment Name: At_100uM_ABA_Mutants_cDNA_P Parameter: Plant Line Value: CS23
  misc_feature: MA Experiment 20000069 PARAMETER Experiment Name: At_100uM_ABA_Mutants_cDNA_P Parameter: Timepoint (hr) Value: 6
  misc_feature: MA Experiment 20000069 PARAMETER Experiment Name: At_100uM_ABA_Mutants_cDNA_P Parameter: Tissue Value: Aerial
  misc_feature: MA Experiment 20000069 PARAMETER Experiment Name: At_100uM_ABA_Mutants_cDNA_P Parameter: Treatment Value: 100uM ABA vs. No Treatment
  misc_feature: MA Experiment ID: 20000070 Result: Up-regulated in Transcription
  misc_feature: MA Experiment 20000070 PARAMETER Experiment Name: At_100uM_ABA_Mutants_cDNA_P Parameter: Plant Line Value: CS24
  misc_feature: MA Experiment 20000070 PARAMETER Experiment Name: At_100uM_ABA_Mutants_cDNA_P Parameter: Timepoint (hr) Value: 6
  misc_feature: MA Experiment 20000070 PARAMETER Experiment Name: At_100uM_ABA_Mutants_cDNA_P Parameter: Tissue Value: Aerial
  misc_feature: MA Experiment 20000070 PARAMETER Experiment Name: At_100uM_ABA_Mutants_cDNA_P Parameter: Treatment Value: 100uM ABA vs. No Treatment
  misc_feature: MA Experiment ID: 20000071 Result: Up-regulated in Transcription
  misc_feature: MA Experiment 20000071 PARAMETER Experiment Name: At_100uM_ABA_Mutants_cDNA_P Parameter: Plant Line Value: CS8104
  misc_feature: MA Experiment 20000071 PARAMETER Experiment Name: At_100uM_ABA_Mutants_cDNA_P Parameter: Timepoint (hr) Value: 6
  misc_feature: MA Experiment 20000071 PARAMETER Experiment Name: At_100uM_ABA_Mutants_cDNA_P Parameter: Tissue Value: Aerial
  misc_feature: MA Experiment 20000071 PARAMETER Experiment Name: At_100uM_ABA_Mutants_cDNA_P Parameter: Treatment Value: 100uM ABA vs. No Treatment
  misc_feature: MA Experiment ID: 20000072 Result: Up-regulated in Transcription
  misc_feature: MA Experiment 20000072 PARAMETER Experiment Name: At_100uM_ABA_Mutants_cDNA_P Parameter: Plant Line Value: CS8105
  misc_feature: MA Experiment 20000072 PARAMETER Experiment Name: At_100uM_ABA_Mutants_cDNA_P Parameter: Timepoint (hr) Value: 6
  misc_feature: MA Experiment 20000072 PARAMETER Experiment Name: At_100uM_ABA_Mutants_cDNA_P Parameter: Tissue Value: Aerial
  misc_feature: MA Experiment 20000072 PARAMETER Experiment Name: At_100uM_ABA_Mutants_cDNA_P Parameter: Treatment Value: 100uM ABA vs. No Treatment
  misc_feature: MA Experiment ID: 20000087 Result: Up-regulated in Transcription
  misc_feature: MA Experiment 20000087 PARAMETER Experiment Name: At_100uM_ABA_Mutants_cDNA_P Parameter: Plant Line Value: WS
  misc_feature: MA Experiment 20000087 PARAMETER Experiment Name: At_100uM_ABA_Mutants_cDNA_P Parameter: Timepoint (hr) Value: 6
  misc_feature: MA Experiment 20000087 PARAMETER Experiment Name: At_100uM_ABA_Mutants_cDNA_P Parameter: Tissue Value: Aerial
  misc_feature: MA Experiment 20000087 PARAMETER Experiment Name: At_100uM_ABA_Mutants_cDNA_P Parameter: Treatment Value: 100uM ABA vs. No Treatment
  misc_feature: MA Experiment ID: 20000088 Result: Up-regulated in Transcription
  misc_feature: MA Experiment 20000088 PARAMETER Experiment Name: At_100uM_ABA_Mutants_cDNA_P Parameter: Plant Line Value: Landsberg
  misc_feature: MA Experiment 20000088 PARAMETER Experiment Name: At_100uM_ABA_Mutants_cDNA_P Parameter: Timepoint (hr) Value: 6
  misc_feature: MA Experiment 20000088 PARAMETER Experiment Name: At_100uM_ABA_Mutants_cDNA_P Parameter: Tissue Value: Aerial
  misc_feature: MA Experiment 20000088 PARAMETER Experiment Name: At_100uM_ABA_Mutants_cDNA_P Parameter: Treatment Value: 100uM ABA vs. No Treatment
  misc_feature: MA Experiment ID: 20000090 Result: Up-regulated in Transcription
  misc_feature: MA Experiment ID: 20000111 Result: Down-regulated in Transcription
  misc_feature: MA Experiment 20000111 PARAMETER Experiment Name: At_42deg_Heat_cDNA_P Parameter: Temperature (deg C) Value: 42 vs. 22
  misc_feature: MA Experiment 20000111 PARAMETER Experiment Name: At_42deg_Heat_cDNA_P Parameter: Timepoint (hr) Value: 6
  misc_feature: MA Experiment 20000111 PARAMETER Experiment Name: At_42deg_Heat_cDNA_P Parameter: Tissue Value: Aerial
  misc_feature: MA Experiment ID: 20000213 Result: Up-regulated in Transcription
  misc_feature: MA Experiment 20000213 PARAMETER Experiment Name: At_4deg_Cold_P Parameter: Timepoint (hr) Value: 2
  misc_feature: MA Experiment ID: 20000437 Result: Up-regulated in Transcription
  misc_feature: MA Experiment 20000437 PARAMETER Experiment Name: At_Drought_P Parameter: Age (day) Value: 8
  misc_feature: MA Experiment 20000437 PARAMETER Experiment Name: At_Drought_P Parameter: Organism Value: A. thaliana
  misc_feature: MA Experiment 20000437 PARAMETER Experiment Name: At_Drought_P Parameter: Plant Line Value: WS
  misc_feature: MA Experiment 20000437 PARAMETER Experiment Name: At_Drought_P Parameter: Timepoint (hr) Value: 24
  misc_feature: MA Experiment 20000437 PARAMETER Experiment Name: At_Drought_P Parameter: Tissue Value: Whole Plant
  misc_feature: MA Experiment 20000437 PARAMETER Experiment Name: At_Drought_P Parameter: Treatment Value: Drought vs. No Drought
  misc_feature: MA Experiment ID: 20000438 Result: Down-regulated in Transcription
  misc_feature: MA Experiment 20000438 PARAMETER Experiment Name: At_Shoots__P Parameter: Age (day) Value: 14
  misc_feature: MA Experiment 20000438 PARAMETER Experiment Name: At_Shoots__P Parameter: Tissue Value: Shoots vs. Whole Plant
  misc_feature: MA Experiment ID: 20001451 Result: Up-regulated in Transcription
  misc_feature: MA Experiment 20001451 PARAMETER Experiment Name: At_Far-red-induction_P Parameter: Age (day) Value: 7
  misc_feature: MA Experiment 20001451 PARAMETER Experiment Name: At_Far-red-induction_P Parameter: Light Value: Far-red vs. White
  misc_feature: MA Experiment 20001451 PARAMETER Experiment Name: At_Far-red-induction_P Parameter: Organism Value: A. thaliana
  misc_feature: MA Experiment 20001451 PARAMETER Experiment Name: At_Far-red-induction_P Parameter: Plant Line Value: Columbia
  misc_feature: MA Experiment 20001451 PARAMETER Experiment Name: At_Far-red-induction_P Parameter: Timepoint (hr) Value: 24
  misc_feature: MA Experiment 20001451 PARAMETER Experiment Name: At_Far-red-induction_P Parameter: Tissue Value: Whole Plant
  misc_feature: MA Experiment ID: 20001557 Result: Up-regulated in Transcription
  misc_feature: MA Experiment 20001557 PARAMETER Experiment Name: At_Drought_Soil_Dry_P Parameter: Age (day) Value: 27
  misc_feature: MA Experiment 20001557 PARAMETER Experiment Name: At_Drought_Soil_Dry_P Parameter: Organism Value: A. thaliana
  misc_feature: MA Experiment 20001557 PARAMETER Experiment Name: At_Drought_Soil_Dry_P Parameter: Plant Line Value: WS
  misc_feature: MA Experiment 20001557 PARAMETER Experiment Name: At_Drought_Soil_Dry_P Parameter: Post Timepoint (hr) Value: 3
  misc_feature: MA Experiment 20001557 PARAMETER Experiment Name: At_Drought_Soil_Dry_P Parameter: Post-Treatment Value: Re-Water vs. No Drought
  misc_feature: MA Experiment 20001557 PARAMETER Experiment Name: At_Drought_Soil_Dry_P Parameter: Timepoint (day) Value: 13
  misc_feature: MA Experiment 20001557 PARAMETER Experiment Name: At_Drought_Soil_Dry_P Parameter: Treatment Value: Drought vs. No Drought
acacatctcactgctcactactctcactgtaatcccttagatcttcttttcaaatttcaatggcgtccggtgatgttgagtatcggtgcttcgttggaggtctagcatgggccactgatgacagagctcttgagactgccttcgctcaatacggcgacgttattgattccaaggtctgttacacgccgagatcggactccgagtgatatcgatgatctcatcctcgacggatctgttccgatcttgtgtttctctgttacttgattcgattactctgttactattctcgttctttgttactactactactactactgttacttgtattttcccaaatcggtacgttcatcttcctgcttctgtgagcccggagatcgatcggatttttttgtattttgtatatttgttgtagatctaaatgcttttgttcagttttgttggattgttttgctgatctggtttttgtattatttggataacagatcattaacgatcgtgagactggaagatcaaggggattcggattcgtcaccttcaaggatgagaaagccatgaaggatgcgattgagggaatgaacggacaagatctcgatggccgtagcatcactgttaacgaggctcagtcacgaggaagcggtggcggcggaggccaccgtggaggtggtggcggtggataccgcagcggcggtggtggaggttactccggtggaggtggtagctacggaggtggcggcggtagacgcgagggtggaggaggatacagcggcggcggcggttactcctcaagaggtggtggtggcggaagctacggtggtggaagacgtgagggaggaggaggatacggtggtggtgaaggaggaggttacggaggaagcggtggtggtggaggatggtaattcctttaattaggtttgggattaccaatgaatgttctctctctcgcttgttatgcttctacttggttttgtgtgttctctattttgttctggttctgctttagatttgatgtaacagttcgtgattaggtattttggtatctggaaacgtaatgttaagtcacttgtcattctcc

SEQ ID NO: 30292 - protein, 114 aa, Arabidopsis thaliana; identical to SEQ ID NO: 27779
  peptide (1)..(114): Ceres Seq. ID no. 13495756
  misc_feature (27)..(112): Pfam Name: Herpesvirus large structural phosphoprotein UL32 Pfam Description: Herpesvirus large structural phosphoprotein UL32
  misc_feature (1)..(114): Homolog of NCBI NO: 10799202 NR Description: glycine-rich RNA-binding protein [Sorghum bicolor]
  misc_feature (1)..(114): Homolog of NCBI NO: 544423 NR Description: Glycine-rich RNA-binding protein 2
  misc_feature (1)..(114): Homolog of NCBI NO: 544416 NR Description: Glycine-rich RNA-binding protein 10
  misc_feature (1)..(114): Homolog of NCBI NO: 34851124 NR Description: putative glycine-rich RNA-binding protein [Prunus
  misc_feature (1)..(114): Homolog of NCBI NO: 15235002 NR Description: glycine-rich RNA-binding protein 8 (GRP8) (CCR1)
  misc_feature (1)..(114): Homolog of NCBI NO: 30681492 NR Description: glycine-rich RNA-binding protein (AtGRP7)
  misc_feature (1)..(114): Homolog of NCBI NO: 1346180 NR Description: Glycine-rich RNA-binding protein GRP1A
  misc_feature (1)..(114): Homolog of NCBI NO: 1346181 NR Description: Glycine-rich RNA-binding protein GRP2A
  misc_feature (1)..(114): Homolog of NCBI NO: 15226605 NR Description: glycine-rich RNA-binding protein (AtGRP7)
  misc_feature (1)..(114): Homolog of NCBI NO: 21553354 NR Description: glycine-rich RNA binding protein 7 [Arabidopsis

SEQ ID NO: 30293 - protein, 107 aa, Arabidopsis thaliana; identical to SEQ ID NO: 27780
  peptide (1)..(107): Ceres Seq. ID no. 13495757
  misc_feature (20)..(105): Pfam Name: Herpesvirus large structural phosphoprotein UL32 Pfam Description: Herpesvirus large structural phosphoprotein UL32
  misc_feature (1)..(107): Homolog of NCBI NO: 10799202 NR Description: glycine-rich RNA-binding protein [Sorghum bicolor]
  misc_feature (1)..(107): Homolog of NCBI NO: 544423 NR Description: Glycine-rich RNA-binding protein 2
  misc_feature (1)..(107): Homolog of NCBI NO: 544416 NR Description: Glycine-rich RNA-binding protein 10
  misc_feature (1)..(107): Homolog of NCBI NO: 34851124 NR Description: putative glycine-rich RNA-binding protein [Prunus
  misc_feature (1)..(107): Homolog of NCBI NO: 15235002 NR Description: glycine-rich RNA-binding protein 8 (GRP8) (CCR1)
  misc_feature (1)..(107): Homolog of NCBI NO: 30681492 NR Description: glycine-rich RNA-binding protein (AtGRP7)
  misc_feature (1)..(107): Homolog of NCBI NO: 1346180 NR Description: Glycine-rich RNA-binding protein GRP1A
  misc_feature (1)..(107): Homolog of NCBI NO: 1346181 NR Description: Glycine-rich RNA-binding protein GRP2A
  misc_feature (1)..(107): Homolog of NCBI NO: 15226605 NR Description: glycine-rich RNA-binding protein (AtGRP7)
  misc_feature (1)..(107): Homolog of NCBI NO: 21553354 NR Description: glycine-rich RNA binding protein 7 [Arabidopsis

SEQ ID NO: 30294 - protein, 105 aa, Arabidopsis thaliana
  peptide (1)..(105): Ceres Seq. ID no. 13495758
MAVASLLTRLSHEEAVAAEATVEVVAVDTAAAVVEVTPVEVVATEVAAVDARVEEDTAAAAVTPQEVVVAEATVVEDVREEEDTVVVKEEVTEEAVVVEDGNSFN

SEQ ID NO: 30295 - DNA, 1321 bp, Arabidopsis thaliana
  misc_feature (1)..(1321): Ceres Seq. ID no. 13497165
  misc_feature: MA Experiment ID: 108569 Result: Up-regulated in Transcription
  misc_feature: MA Experiment 108569 PARAMETER Experiment Name: At_0.001%_MeJA__cDNA_P Parameter: Timepoint (hr) Value: 6
  misc_feature: MA Experiment 108569 PARAMETER Experiment Name: At_0.001%_MeJA__cDNA_P Parameter: Tissue Value: Aerial
  misc_feature: MA Experiment 108569 PARAMETER Experiment Name: At_0.001%_MeJA__cDNA_P Parameter: Treatment Value: 0.001% MeJA vs. No Treatment
  misc_feature: MA Experiment ID: 108573 Result: Down-regulated in Transcription
  misc_feature: MA Experiment 108573 PARAMETER Experiment Name: At_Drought_cDNA_P Parameter: Timepoint (hr) Value: 6
  misc_feature: MA Experiment 108573 PARAMETER Experiment Name: At_Drought_cDNA_P Parameter: Tissue Value: Aerial
  misc_feature: MA Experiment 108573 PARAMETER Experiment Name: At_Drought_cDNA_P Parameter: Treatment Value: Drought vs. No Drought
  misc_feature: MA Experiment ID: 108576 Result: Down-regulated in Transcription
  misc_feature: MA Experiment 108576 PARAMETER Experiment Name: At_42deg_Heat_cDNA_P Parameter: Temperature (deg C) Value: 42 vs. 22
  misc_feature: MA Experiment 108576 PARAMETER Experiment Name: At_42deg_Heat_cDNA_P Parameter: Timepoint (hr) Value: 1
  misc_feature: MA Experiment 108576 PARAMETER Experiment Name: At_42deg_Heat_cDNA_P Parameter: Tissue Value: Aerial
  misc_feature: MA Experiment ID: 20000169 Result: Up-regulated in Transcription
  misc_feature: MA Experiment 20000169 PARAMETER Experiment Name: At_100uM_ABA_P Parameter: Age (day) Value: 14
  misc_feature: MA Experiment 20000169 PARAMETER Experiment Name: At_100uM_ABA_P Parameter: Organism Value: A. thaliana
  misc_feature: MA Experiment 20000169 PARAMETER Experiment Name: At_100uM_ABA_P Parameter: Plant Line Value: WS
  misc_feature: MA Experiment 20000169 PARAMETER Experiment Name: At_100uM_ABA_P Parameter: Timepoint (hr) Value: 6
  misc_feature: MA Experiment 20000169 PARAMETER Experiment Name: At_100uM_ABA_P Parameter: Tissue Value: Aerial
  misc_feature: MA Experiment 20000169 PARAMETER Experiment Name: At_100uM_ABA_P Parameter: Treatment Value: 100uM ABA vs. No Treatment
  misc_feature: MA Experiment ID: 20000171 Result: Down-regulated in Transcription
  misc_feature: MA Experiment 20000171 PARAMETER Experiment Name: At_42deg_Heat_P Parameter: Age (day) Value: 14
  misc_feature: MA Experiment 20000171 PARAMETER Experiment Name: At_42deg_Heat_P Parameter: Organism Value: A. thaliana
  misc_feature: MA Experiment 20000171 PARAMETER Experiment Name: At_42deg_Heat_P Parameter: Plant Line Value: WS
  misc_feature: MA Experiment 20000171 PARAMETER Experiment Name: At_42deg_Heat_P Parameter: Temperature (deg C) Value: 42 vs. 22
  misc_feature: MA Experiment 20000171 PARAMETER Experiment Name: At_42deg_Heat_P Parameter: Timepoint (hr) Value: 1
  misc_feature: MA Experiment 20000171 PARAMETER Experiment Name: At_42deg_Heat_P Parameter: Tissue Value: Aerial
  misc_feature: MA Experiment ID: 20000173 Result: Down-regulated in Transcription
  misc_feature: MA Experiment 20000173 PARAMETER Experiment Name: At_42deg_Heat_P Parameter: Age (day) Value: 14
  misc_feature: MA Experiment 20000173 PARAMETER Experiment Name: At_42deg_Heat_P Parameter: Organism Value: A. thaliana
  misc_feature: MA Experiment 20000173 PARAMETER Experiment Name: At_42deg_Heat_P Parameter: Plant Line Value: WS
  misc_feature: MA Experiment 20000173 PARAMETER Experiment Name: At_42deg_Heat_P Parameter: Temperature (deg C) Value: 42 vs. 22
  misc_feature: MA Experiment 20000173 PARAMETER Experiment Name: At_42deg_Heat_P Parameter: Timepoint (hr) Value: 6
  misc_feature: MA Experiment 20000173 PARAMETER Experiment Name: At_42deg_Heat_P Parameter: Tissue Value: Aerial
  misc_feature: MA Experiment ID: 20000179 Result: Down-regulated in Transcription
  misc_feature: MA Experiment 20000179 PARAMETER Experiment Name: At_Germinating_Seeds_P Parameter: Age (hr) Value: 6 vs. 0
  misc_feature: MA Experiment 20000179 PARAMETER Experiment Name: At_Germinating_Seeds_P Parameter: Tissue Value: Germinating Seeds
  misc_feature: MA Experiment ID: 20000184 Result: Up-regulated in Transcription
  misc_feature: MA Experiment 20000184 PARAMETER Experiment Name: At_Shoots__P Parameter: Age (day) Value: 7
  misc_feature: MA Experiment 20000184 PARAMETER Experiment Name: At_Shoots__P Parameter: Tissue Value: Shoots vs. Whole Plant
  misc_feature: MA Experiment ID: 20000227 Result: Down-regulated in Transcription
  misc_feature: MA Experiment 20000227 PARAMETER Experiment Name: At_Root-Tips-vs-Tops_P Parameter: Tissue Value: Root Tips vs. Root Tops
  misc_feature: MA Experiment ID: 20000234 Result: Up-regulated in Transcription
  misc_feature: MA Experiment 20000234 PARAMETER Experiment Name: At_Siliques_P Parameter: Age (day) Value: 21
  misc_feature: MA Experiment 20000234 PARAMETER Experiment Name: At_Siliques_P Parameter: Organism Value: A. thaliana
  misc_feature: MA Experiment 20000234 PARAMETER Experiment Name: At_Siliques_P Parameter: Plant Line Value: WS
  misc_feature: MA Experiment 20000234 PARAMETER Experiment Name: At_Siliques_P Parameter: Tissue Value: Less Than 5mm Siliques vs. Whole Plant
  misc_feature: MA Experiment ID: 20000264 Result: Up-regulated in Transcription
  misc_feature: MA Experiment 20000264 PARAMETER Experiment Name: At_Open_Flower_P Parameter: Age (day) Value: 21
  misc_feature: MA Experiment 20000264 PARAMETER Experiment Name: At_Open_Flower_P Parameter: Plant Line Value: WS
  misc_feature: MA Experiment 20000264 PARAMETER Experiment Name: At_Open_Flower_P Parameter: Tissue Value: Open Flower vs. Whole Plant
  misc_feature: MA Experiment ID: 20000439 Result: Up-regulated in Transcription
  misc_feature: MA Experiment 20000439 PARAMETER Experiment Name: At_Roots__P Parameter: Age (day) Value: 14 vs. 21
  misc_feature: MA Experiment 20000439 PARAMETER Experiment Name: At_Roots__P Parameter: Organism Value: A. thaliana
  misc_feature: MA Experiment 20000439 PARAMETER Experiment Name: At_Roots__P Parameter: Tissue Value: Roots vs. Whole Plant
  misc_feature: MA Experiment ID: 20000444 Result: Up-regulated in Transcription
  misc_feature: MA Experiment 20000444 PARAMETER Experiment Name: At_100uM_NAA__P Parameter: Age (day) Value: 14
  misc_feature: MA Experiment 20000444 PARAMETER Experiment Name: At_100uM_NAA__P Parameter: Organism Value: A. thaliana
  misc_feature: MA Experiment 20000444 PARAMETER Experiment Name: At_100uM_NAA__P Parameter: Plant Line Value: WS
  misc_feature: MA Experiment 20000444 PARAMETER Experiment Name: At_100uM_NAA__P Parameter: Timepoint (hr) Value: 1
  misc_feature: MA Experiment 20000444 PARAMETER Experiment Name: At_100uM_NAA__P Parameter: Tissue Value: Aerial
  misc_feature: MA Experiment 20000444 PARAMETER Experiment Name: At_100uM_NAA__P Parameter: Treatment Value: 100uM NAA vs. No Treatment
  misc_feature: MA Experiment ID: 20000495 Result: Up-regulated in Transcription
  misc_feature: MA Experiment 20000495 PARAMETER Experiment Name: At_Guard_Cells_P Parameter: Harvest Date Value: 8/2/2002
  misc_feature: MA Experiment 20000495 PARAMETER Experiment Name: At_Guard_Cells_P Parameter: Organism Value: A. thaliana
  misc_feature: MA Experiment 20000495 PARAMETER Experiment Name: At_Guard_Cells_P Parameter: Tissue Value: Guard Cells vs. Leaves
  misc_feature: MA Experiment ID: 20000496 Result: Up-regulated in Transcription
  misc_feature: MA Experiment 20000496 PARAMETER Experiment Name: At_Guard_Cells_P Parameter: Harvest Date Value: 7/19/2002
  misc_feature: MA Experiment 20000496 PARAMETER Experiment Name: At_Guard_Cells_P Parameter: Organism Value: Canola
  misc_feature: MA Experiment 20000496 PARAMETER Experiment Name: At_Guard_Cells_P Parameter: Tissue Value: Guard Cells vs. Leaves
  misc_feature: MA Experiment ID: 20000573 Result: Down-regulated in Transcription
  misc_feature: MA Experiment 20000573 PARAMETER Experiment Name: At_100uM_ABA_Mutants__P Parameter: Organism Value: A. thaliana
  misc_feature: MA Experiment 20000573 PARAMETER Experiment Name: At_100uM_ABA_Mutants__P Parameter: Plant Line Value: CS22 vs. Ler wt
  misc_feature: MA Experiment 20000573 PARAMETER Experiment Name: At_100uM_ABA_Mutants__P Parameter: Timepoint (hr) Value: N/A
  misc_feature: MA Experiment 20000573 PARAMETER Experiment Name: At_100uM_ABA_Mutants__P Parameter: Tissue Value: Whole Plant
  misc_feature: MA Experiment 20000573 PARAMETER Experiment Name: At_100uM_ABA_Mutants__P Parameter: Treatment Value: None
  misc_feature: MA Experiment ID: 20001450 Result: Down-regulated in Transcription
  misc_feature: MA Experiment 20001450 PARAMETER Experiment Name: At_Far-red-induction_P Parameter: Age (day) Value: 7
  misc_feature: MA Experiment 20001450 PARAMETER Experiment Name: At_Far-red-induction_P Parameter: Light Value: Far-red vs. White
  misc_feature: MA Experiment 20001450 PARAMETER Experiment Name: At_Far-red-induction_P Parameter: Organism Value: A. thaliana
  misc_feature: MA Experiment 20001450 PARAMETER Experiment Name: At_Far-red-induction_P Parameter: Plant Line Value: Columbia
  misc_feature: MA Experiment 20001450 PARAMETER Experiment Name: At_Far-red-induction_P Parameter: Timepoint (hr) Value: 8
  misc_feature: MA Experiment 20001450 PARAMETER Experiment Name: At_Far-red-induction_P Parameter: Tissue Value: Whole Plant
  misc_feature: MA Experiment ID: 20001556 Result: Down-regulated in Transcription
  misc_feature: MA Experiment 20001556 PARAMETER Experiment Name: At_Drought_Soil_Dry_P Parameter: Age (day) Value: 26
  misc_feature: MA Experiment 20001556 PARAMETER Experiment Name: At_Drought_Soil_Dry_P Parameter: Organism Value: A. thaliana
  misc_feature: MA Experiment 20001556 PARAMETER Experiment Name: At_Drought_Soil_Dry_P Parameter: Plant Line Value: WS
  misc_feature: MA Experiment 20001556 PARAMETER Experiment Name: At_Drought_Soil_Dry_P Parameter: Post Timepoint (hr) Value: None
  misc_feature: MA Experiment 20001556 PARAMETER Experiment Name: At_Drought_Soil_Dry_P Parameter: Post-Treatment Value: None
  misc_feature: MA Experiment 20001556 PARAMETER Experiment Name: At_Drought_Soil_Dry_P Parameter: Timepoint (day) Value: 12
  misc_feature: MA Experiment 20001556 PARAMETER Experiment Name: At_Drought_Soil_Dry_P Parameter: Treatment Value: Drought vs. No Drought
accatcctcatctctcaatcaacaaacctaactctttctctatacaagagcgcaagctcgaaggcgctcttgttctttcttcattttctccttaacaatcaccctcatagtaactttaaaactctctgtttctagtaattcacacacaaaatggctattaaactagcaattctatttaccacatttgttctttttagcctcgccgacgctagaatccccggtatttactccggcggcgcatggcaaaacgcacacgccactttttacggtggcagcgacgcctccggcacaatgggaggagcttgtggttacggtaacctatacagccaagggtacgggaccaacacggctgctttgagtacggcgctgtttaacaatggtatgagttgtggagcctgctttgagctaaaatgcgccaacgaccctcaatggtgtcactcaggtagtccttcgatcctcatcaccgcaaccaatttctgcccaccaaacttggctcagcctagcgacaacggaggatggtgcaacccaccacgtgaacactttgacctagccatgcctgtcttccttaagatcgctcaatatcgcgccggcattgtccccgtctcataccgcagggtgccatgtagaaagagaggaggcataaggttcacaatcaacggtcaccgttacttcaacttggttctgatcactaacgtggctggagcaggagacatcgtgagggctagtgtgaaaggatcacggactggttggatgagtttgagcagaaactggggacaaaactggcaatctaatgctgttttggttggtcaagcactctctttccgtgtcacaggcagtgaccgtagaacatctacttcctggaacatggttccttctaactggcagtttggtcaaacctttgtcgggaagaatttcagggtttaaggcgagtttcgagaaactaaaatttggaggaaattcgagaaattaaagtggttcgagacaaaagaaaactctccgctaatttcgctattcctcctcctttttttttactaaattttatatatggaaaggagagaaaaatcaggggaaagtatctttgacttttgtgtgtgttttcacttttttaatgtttttttttttgggtttggtgttttaattgtgagtgataaagggggaaatgagggagaaagagaaagtgagtagctgaagtggctgtgagaacattttgtaacagcccgcagctattaaagtattttacatggtttggttgtaagttacaacttgtaacgtttaatctcgtgtaatcttaaaacatggttgtattattgatacttaatac

SEQ ID NO: 30296 - protein, 257 aa, Arabidopsis thaliana
  peptide (1)..(257): Ceres Seq. ID no. 13497166
  misc_feature (164)..(241): Pfam Name: Pollen allergen Pfam Description: Pollen allergen
  misc_feature (1)..(257): Homolog of NCBI NO: 15227005 NR Description: expansin, putative [Arabidopsis thaliana]
  misc_feature (1)..(257): Homolog of NCBI NO: 20502786 NR Description: expansin 12 precursor [Rumex palustris]
  misc_feature (1)..(257): Homolog of NCBI NO: 20502784 NR Description: expansin 11 precursor [Rumex palustris]
  misc_feature (1)..(257): Homolog of NCBI NO: 38046726 NR Description: alpha-expansin 1 [Populus tremula x Populus
  misc_feature (3)..(257): Homolog of NCBI NO: 29467595 NR Description: expansin [Pyrus communis]
  misc_feature (17)..(257): Homolog of NCBI NO: 13898655 NR Description: expansin [Prunus cerasus]
  misc_feature (14)..(257): Homolog of NCBI NO: 29466643 NR Description: expansin [Prunus persica]
  misc_feature (1)..(257): Homolog of NCBI NO: 15233283 NR Description: expansin, putative (EXP16) [Arabidopsis thaliana]
  misc_feature (1)..(257): Homolog of NCBI NO: 21553844 NR Description: Alpha-expansin 4 precursor (At-EXP4) (AtEx4)
  misc_feature (1)..(257): Homolog of NCBI NO: 15225530 NR Description: expansin, putative (EXP4) [Arabidopsis thaliana]
MAIKLAILFTTFVLFSLADARIPGIYSGGAWQNAHATFYGGSDASGTMGGACGYGNLYSQGYGTNTAALSTALFNNGMSCGACFELKCANDPQWCHSGSPSILITATNFCPPNLAQPSDNGGWCNPPREHFDLAMPVFLKIAQYRAGIVPVSYRRVPCRKRGGIRFTINGHRYFNLVLITNVAGAGDIVRASVKGSRTGWMSLSRNWGQNWQSNAVLVGQALSFRVTGSDRRTSTSWNMVPSNWQFGQTFVGKNFRV

SEQ ID NO: 30297 - protein, 210 aa, Arabidopsis thaliana
  peptide (1)..(210): Ceres Seq. ID no. 13497167
  misc_feature (117)..(194): Pfam Name: Pollen allergen Pfam Description: Pollen allergen
  misc_feature (1)..(210): Homolog of NCBI NO: 15227005 NR Description: expansin, putative [Arabidopsis thaliana]
  misc_feature (1)..(210): Homolog of NCBI NO: 20502786 NR Description: expansin 12 precursor [Rumex palustris]
  misc_feature (1)..(210): Homolog of NCBI NO: 20502784 NR Description: expansin 11 precursor [Rumex palustris]
  misc_feature (1)..(210): Homolog of NCBI NO: 38046726 NR Description: alpha-expansin 1 [Populus tremula x Populus
  misc_feature (1)..(210): Homolog of NCBI NO: 29467595 NR Description: expansin [Pyrus communis]
  misc_feature (1)..(210): Homolog of NCBI NO: 13898655 NR Description: expansin [Prunus cerasus]
  misc_feature (1)..(210): Homolog of NCBI NO: 29466643 NR Description: expansin [Prunus persica]
  misc_feature (1)..(210): Homolog of NCBI NO: 15233283 NR Description: expansin, putative (EXP16) [Arabidopsis thaliana]
  misc_feature (1)..(210): Homolog of NCBI NO: 21553844 NR Description: Alpha-expansin 4 precursor (At-EXP4) (AtEx4)
  misc_feature (1)..(210): Homolog of NCBI NO: 15225530 NR Description: expansin, putative (EXP4) [Arabidopsis thaliana]
MGGACGYGNLYSQGYGTNTAALSTALFNNGMSCGACFELKCANDPQWCHSGSPSILITATNFCPPNLAQPSDNGGWCNPPREHFDLAMPVFLKIAQYRAGIVPVSYRRVPCRKRGGIRFTINGHRYFNLVLITNVAGAGDIVRASVKGSRTGWMSLSRNWGQNWQSNAVLVGQALSFRVTGSDRRTSTSWNMVPSNWQFGQTFVGKNFRV

SEQ ID NO: 30298 - protein, 180 aa, Arabidopsis thaliana
  peptide (1)..(180): Ceres Seq. ID no. 13497168
  misc_feature (87)..(164): Pfam Name: Pollen allergen Pfam Description: Pollen allergen
  misc_feature (1)..(180): Homolog of NCBI NO: 15227005 NR Description: expansin, putative [Arabidopsis thaliana]
  misc_feature (1)..(180): Homolog of NCBI NO: 20502786 NR Description: expansin 12 precursor [Rumex palustris]
  misc_feature (1)..(180): Homolog of NCBI NO: 20502784 NR Description: expansin 11 precursor [Rumex palustris]
  misc_feature (1)..(180): Homolog of NCBI NO: 38046726 NR Description: alpha-expansin 1 [Populus tremula x Populus
  misc_feature (1)..(180): Homolog of NCBI NO: 29467595 NR Description: expansin [Pyrus communis]
  misc_feature (1)..(180): Homolog of NCBI NO: 13898655 NR Description: expansin [Prunus cerasus]
  misc_feature (1)..(180): Homolog of NCBI NO: 29466643 NR Description: expansin [Prunus persica]
  misc_feature (1)..(180): Homolog of NCBI NO: 15233283 NR Description: expansin, putative (EXP16) [Arabidopsis thaliana]
  misc_feature (1)..(180): Homolog of NCBI NO: 21553844 NR Description: Alpha-expansin 4 precursor (At-EXP4) (AtEx4)
  misc_feature (1)..(180): Homolog of NCBI NO: 15225530 NR Description: expansin, putative (EXP4) [Arabidopsis thaliana]
MSCGACFELKCANDPQWCHSGSPSILITATNFCPPNLAQPSDNGGWCNPPREHFDLAMPVFLKIAQYRAGIVPVSYRRVPCRKRGGIRFTINGHRYFNLVLITNVAGAGDIVRASVKGSRTGWMSLSRNWGQNWQSNAVLVGQALSFRVTGSDRRTSTSWNMVPSNWQFGQTFVGKNFRV

SEQ ID NO: 30299 - DNA, 836 bp, Arabidopsis thaliana
  misc_feature (1)..(836): Ceres Seq. ID no. 13490390
  misc_feature: MA Experiment ID: 108473 Result: Down-regulated in Transcription
  misc_feature: MA Experiment 108473 PARAMETER Experiment Name: At_Drought_Flowers_cDNA_P Parameter: Timepoint (hr) Value: 7 d
  misc_feature: MA Experiment 108473 PARAMETER Experiment Name: At_Drought_Flowers_cDNA_P Parameter: Tissue Value: Flower
  misc_feature: MA Experiment 108473 PARAMETER Experiment Name: At_Drought_Flowers_cDNA_P Parameter: Treatment Value: Drought vs. No Drought
  misc_feature: MA Experiment ID: 108501 Result: Down-regulated in Transcription
  misc_feature: MA Experiment 108501 PARAMETER Experiment Name: At_ap2_floral_buds_cDNA_P Parameter: Plant Line Value: ap2 (Ler.)
  misc_feature: MA Experiment 108501 PARAMETER Experiment Name: At_ap2_floral_buds_cDNA_P Parameter: Tissue Value: Closed Flower
  misc_feature: MA Experiment ID: 108667 Result: Down-regulated in Transcription
  misc_feature: MA Experiment 108667 PARAMETER Experiment Name: At_2mM_SA_cDNA_P Parameter: Plant Line Value: WS
  misc_feature: MA Experiment 108667 PARAMETER Experiment Name: At_2mM_SA_cDNA_P Parameter: Timepoint (hr) Value: 1
  misc_feature: MA Experiment 108667 PARAMETER Experiment Name: At_2mM_SA_cDNA_P Parameter: Treatment Value: 2mM SA vs. No Treatment
  misc_feature: MA Experiment ID: 20000184 Result: Down-regulated in Transcription
  misc_feature: MA Experiment 20000184 PARAMETER Experiment Name: At_Shoots__P Parameter: Age (day) Value: 7
  misc_feature: MA Experiment 20000184 PARAMETER Experiment Name: At_Shoots__P Parameter: Tissue Value: Shoots vs. Whole Plant
  misc_feature: MA Experiment ID: 20000234 Result: Down-regulated in Transcription
  misc_feature: MA Experiment 20000234 PARAMETER Experiment Name: At_Siliques_P Parameter: Age (day) Value: 21
  misc_feature: MA Experiment 20000234 PARAMETER Experiment Name: At_Siliques_P Parameter: Organism Value: A. thaliana
  misc_feature: MA Experiment 20000234 PARAMETER Experiment Name: At_Siliques_P Parameter: Plant Line Value: WS
  misc_feature: MA Experiment 20000234 PARAMETER Experiment Name: At_Siliques_P Parameter: Tissue Value: Less Than 5mm Siliques vs. Whole Plant
  misc_feature: MA Experiment ID: 20000235 Result: Down-regulated in Transcription
  misc_feature: MA Experiment 20000235 PARAMETER Experiment Name: At_Siliques_P Parameter: Age (day) Value: 21
  misc_feature: MA Experiment 20000235 PARAMETER Experiment Name: At_Siliques_P Parameter: Organism Value: A. thaliana
  misc_feature: MA Experiment 20000235 PARAMETER Experiment Name: At_Siliques_P Parameter: Plant Line Value: WS
  misc_feature: MA Experiment 20000235 PARAMETER Experiment Name: At_Siliques_P Parameter: Tissue Value: 5-10mm Siliques vs. Whole Plant
  misc_feature: MA Experiment ID: 20000265 Result: Up-regulated in Transcription
  misc_feature: MA Experiment 20000265 PARAMETER Experiment Name: At_Open_Flower_P Parameter: Age (day) Value: 21
  misc_feature: MA Experiment 20000265 PARAMETER Experiment Name: At_Open_Flower_P Parameter: Plant Line Value: WS
  misc_feature: MA Experiment 20000265 PARAMETER Experiment Name: At_Open_Flower_P Parameter: Tissue Value: Closed Flower vs. Whole Plant
  misc_feature: MA Experiment ID: 20000286 Result: Up-regulated in Transcription
  misc_feature: MA Experiment 20000286 PARAMETER Experiment Name: At_Open_Flower_P Parameter: Age (day) Value: 21
  misc_feature: MA Experiment 20000286 PARAMETER Experiment Name: At_Open_Flower_P Parameter: Plant Line Value: WS
  misc_feature: MA Experiment 20000286 PARAMETER Experiment Name: At_Open_Flower_P Parameter: Tissue Value: Half Open vs. Whole Plant
  misc_feature: MA Experiment ID: 20000438 Result: Down-regulated in Transcription
  misc_feature: MA Experiment 20000438 PARAMETER Experiment Name: At_Shoots__P Parameter: Age (day) Value: 14
  misc_feature: MA Experiment 20000438 PARAMETER Experiment Name: At_Shoots__P Parameter: Tissue Value: Shoots vs. Whole Plant
  misc_feature: MA Experiment ID: 20000439 Result: Down-regulated in Transcription
  misc_feature: MA Experiment 20000439 PARAMETER Experiment Name: At_Roots__P Parameter: Age (day) Value: 14 vs. 21
  misc_feature: MA Experiment 20000439 PARAMETER Experiment Name: At_Roots__P Parameter: Organism Value: A. thaliana
  misc_feature: MA Experiment 20000439 PARAMETER Experiment Name: At_Roots__P Parameter: Tissue Value: Roots vs. Whole Plant
  misc_feature: MA Experiment ID: 20001760 Result: Up-regulated in Transcription
  misc_feature: MA Experiment 20001760 PARAMETER Experiment Name: At_50mM_NH4NO3_L-to-H_P Parameter: Timepoint (hr) Value: 2
  misc_feature: MA Experiment 20001760 PARAMETER Experiment Name: At_50mM_NH4NO3_L-to-H_P Parameter: Tissue Value: Siliques
  misc_feature: MA Experiment 20001760 PARAMETER Experiment Name: At_50mM_NH4NO3_L-to-H_P Parameter: Treatment Value: 50mM NH4NO3 vs 100mM Mannitol
  misc_feature: MA Experiment ID: 20001761 Result: Up-regulated in Transcription
  misc_feature: MA Experiment 20001761 PARAMETER Experiment Name: At_50mM_NH4NO3_L-to-H_P Parameter: Timepoint (hr) Value: 4
  misc_feature: MA Experiment 20001761 PARAMETER Experiment Name: At_50mM_NH4NO3_L-to-H_P Parameter: Tissue Value: Siliques
  misc_feature: MA Experiment 20001761 PARAMETER Experiment Name: At_50mM_NH4NO3_L-to-H_P Parameter: Treatment Value: 50mM NH4NO3 vs 100mM Mannitol
  misc_feature: MA Experiment ID: 20001773 Result: Up-regulated in Transcription
  misc_feature: MA Experiment 20001773 PARAMETER Experiment Name: At_Far-red-enriched-adult_P Parameter: Age (day) Value: 30
  misc_feature: MA Experiment 20001773 PARAMETER Experiment Name: At_Far-red-enriched-adult_P Parameter: Light Value: Far-red enriched vs. White
  misc_feature: MA Experiment 20001773 PARAMETER Experiment Name: At_Far-red-enriched-adult_P Parameter: Organism Value: A. thaliana
  misc_feature: MA Experiment 20001773 PARAMETER Experiment Name: At_Far-red-enriched-adult_P Parameter: Plant Line Value: Columbia
  misc_feature: MA Experiment 20001773 PARAMETER Experiment Name: At_Far-red-enriched-adult_P Parameter: Timepoint (hr) Value: 48
  misc_feature: MA Experiment 20001773 PARAMETER Experiment Name: At_Far-red-enriched-adult_P Parameter: Tissue Value: Aerial
  misc_feature: MA Experiment ID: 20001910 Result: Down-regulated in Transcription
  misc_feature: MA Experiment 20001910 PARAMETER Experiment Name: At_Drought_Reproduction_P Parameter: Age (day) Value: 37
  misc_feature: MA Experiment 20001910 PARAMETER Experiment Name: At_Drought_Reproduction_P Parameter: Organism Value: A. thaliana
  misc_feature: MA Experiment 20001910 PARAMETER Experiment Name: At_Drought_Reproduction_P Parameter: Plant Line Value: WS
  misc_feature: MA Experiment 20001910 PARAMETER Experiment Name: At_Drought_Reproduction_P Parameter: Timepoint (day) Value: 7
  misc_feature: MA Experiment 20001910 PARAMETER Experiment Name: At_Drought_Reproduction_P Parameter: Tissue Value: Flowers
  misc_feature: MA Experiment 20001910 PARAMETER Experiment Name: At_Drought_Reproduction_P Parameter: Treatment Value: Drought vs. No Drought
atcttacatatattactcatcatcaagttcctactttctctctgacaaacatcacagagtaagtaagaatggtacagacgaagaagttcagaggtgtcaggcaacgccattggggttcttgggtcgctgagattcgtcatcctctcttgaaacggaggatttggctagggacgttcgagaccgcagaggaggcagcaagagcatacgacgaggccgccgttttaatgagcggccgcaacgccaaaaccaactttcccctcaacaacaacaacaccggagaaacttccgagggcaaaaccgatatttcagcttcgtccacaatgtcatcctcaacatcatcttcatcgctctcttccatcctcagcgccaaactgaggaaatgctgcaagtctccttccccatccctcacctgcctccgtcttgacacagccagctcccatatcggcgtctggcagaaacgggccggttcaaagtctgactccagctgggtcatgacggtggagctaggtcccgcaagctcctcccaagagactactagtaaagcttcacaagacgctattcttgctccgaccactgaagttgaaattggtggcagcagagaagaagtattggatgaggaagaaaaggttgctttgcaaatgatagaggagcttctcaatacaaactaaatcttatttgcttatatatatgtacctattttcattgctgatttacagccaaaataatcaattataccgtgtattttatagatgttttatattaaaaggttgttagctatatattgtttctctttttccacatttgtatctaataaagtattggtgtttgtaactaag

SEQ ID NO: 30300 - protein, 199 aa, Arabidopsis thaliana
  peptide (1)..(199): Ceres Seq. ID no. 13490391
  misc_feature (4)..(68): Pfam Name: AP2 domain Pfam Description: AP2 domain
  misc_feature (5)..(95): Homolog of NCBI NO: 38346619 NR Description: OSJNBa0074L08.10 [Oryza sativa (japonica
  misc_feature (5)..(82): Homolog of NCBI NO: 131754 NR Description: PPLZ02 PROTEIN
  misc_feature (6)..(67): Homolog of NCBI NO: 38343976 NR Description: OSJNBb0022F16.15 [Oryza sativa (japonica
  misc_feature (5)..(101): Homolog of NCBI NO: 18650662 NR Description: ethylene response factor 1 [Lycopersicon
  misc_feature (5)..(101): Homolog of NCBI NO: 15238727 NR Description: ethylene responsive element binding protein,
  misc_feature (1)..(147): Homolog of NCBI NO: 15239413 NR Description: AP2 domain transcription factor, putative
  misc_feature (1)..(197): Homolog of NCBI NO: 30689846 NR Description: AP2 domain transcription factor, putative
  misc_feature (1)..(197): Homolog of NCBI NO: 15238976 NR Description: putative protein; protein id: At5g11190.1
  misc_feature (1)..(199): Homolog of NCBI NO: 21553845 NR Description: putative ethylene responsive element [Arabidopsis
  misc_feature (1)..(199): Homolog of NCBI NO: 15218134 NR Description: ethylene responsive element binding factor 2
MVQTKKFRGVRQRHWGSWVAEIRHPLLKRRIWLGTFETAEEAARAYDEAAVLMSGRNAKTNFPLNNNNTGETSEGKTDISASSTMSSSTSSSSLSSILSAKLRKCCKSPSPSLTCLRLDTASSHIGVWQKRAGSKSDSSWVMTVELGPASSSQETTSKASQDAILAPTTEVEIGGSREEVLDEEEKVALQMIEELLNTN

SEQ ID NO: 30301 - protein, 147 aa, Arabidopsis thaliana
  peptide (1)..(147): Ceres Seq. ID no. 13490392
  misc_feature (1)..(43): Homolog of NCBI NO: 38346619 NR Description: OSJNBa0074L08.10 [Oryza sativa (japonica
  misc_feature (1)..(30): Homolog of NCBI NO: 131754 NR Description: PPLZ02 PROTEIN
  misc_feature (1)..(15): Homolog of NCBI NO: 38343976 NR Description: OSJNBb0022F16.15 [Oryza sativa (japonica
  misc_feature (1)..(49): Homolog of NCBI NO: 18650662 NR Description: ethylene response factor 1 [Lycopersicon
  misc_feature (1)..(49): Homolog of NCBI NO: 15238727 NR Description: ethylene responsive element binding protein,
  misc_feature (1)..(95): Homolog of NCBI NO: 15239413 NR Description: AP2 domain transcription factor, putative
  misc_feature (1)..(145): Homolog of NCBI NO: 30689846 NR Description: AP2 domain transcription factor, putative
  misc_feature (1)..(145): Homolog of NCBI NO: 15238976 NR Description: putative protein; protein id: At5g11190.1
  misc_feature (1)..(147): Homolog of NCBI NO: 21553845 NR Description: putative ethylene responsive element [Arabidopsis
  misc_feature (1)..(147): Homolog of NCBI NO: 15218134 NR Description: ethylene responsive element binding factor 2
MSGRNAKTNFPLNNNNTGETSEGKTDISASSTMSSSTSSSSLSSILSAKLRKCCKSPSPSLTCLRLDTASSHIGVWQKRAGSKSDSSWVMTVELGPASSSQETTSKASQDAILAPTTEVEIGGSREEVLDEEEKVALQMIEELLNTN

SEQ ID NO: 30302 - protein, 115 aa, Arabidopsis thaliana
  peptide (1)..(115): Ceres Seq. ID no. 13490393
  misc_feature (1)..(88): Homolog of NCBI NO: 32140997 NR Description: DRE binding factor 2 [Oryza sativa (japonica
  misc_feature (1)..(88): Homolog of NCBI NO: 27436378 NR Description: dehydration-responsive element binding protein 3
  misc_feature (1)..(11): Homolog of NCBI NO: 38346619 NR Description: OSJNBa0074L08.10 [Oryza sativa (japonica
  misc_feature (1)..(17): Homolog of NCBI NO: 18650662 NR Description: ethylene response factor 1 [Lycopersicon
  misc_feature (1)..(17): Homolog of NCBI NO: 15238727 NR Description: ethylene responsive element binding protein,
  misc_feature (1)..(63): Homolog of NCBI NO: 15239413 NR Description: AP2 domain transcription factor, putative
  misc_feature (1)..(113): Homolog of NCBI NO: 30689846 NR Description: AP2 domain transcription factor, putative
  misc_feature (1)..(113): Homolog of NCBI NO: 15238976 NR Description: putative protein; protein id: At5g11190.1
  misc_feature (1)..(115): Homolog of NCBI NO: 21553845 NR Description: putative ethylene responsive element [Arabidopsis
  misc_feature (1)..(115): Homolog of NCBI NO: 15218134 NR Description: ethylene responsive element binding factor 2
MSSSTSSSSLSSILSAKLRKCCKSPSPSLTCLRLDTASSHIGVWQKRAGSKSDSSWVMTVELGPASSSQETTSKASQDAILAPTTEVEIGGSREEVLDEEEKVALQMIEELLNTN

SEQ ID NO: 30303 - DNA, 762 bp, Arabidopsis thaliana
  misc_feature (1)..(762): Ceres Seq. ID no. 13490575
  misc_feature: MA Experiment ID: 108573 Result: Up-regulated in Transcription
  misc_feature: MA Experiment 108573 PARAMETER Experiment Name: At_Drought_cDNA_P Parameter: Timepoint (hr) Value: 6
  misc_feature: MA Experiment 108573 PARAMETER Experiment Name: At_Drought_cDNA_P Parameter: Tissue Value: Aerial
  misc_feature: MA Experiment 108573 PARAMETER Experiment Name: At_Drought_cDNA_P Parameter: Treatment Value: Drought vs. No Drought
  misc_feature: MA Experiment ID: 108595 Result: Down-regulated in Transcription
  misc_feature: MA Experiment 108595 PARAMETER Experiment Name: At_Ler-pi_Ovule_cDNA_P Parameter: Plant Line Value: null
  misc_feature: MA Experiment ID: 20000224 Result: Down-regulated in Transcription
  misc_feature: MA Experiment ID: 20000794 Result: Down-regulated in Transcription
  misc_feature: MA Experiment 20000794 PARAMETER Experiment Name: At_Petals_P Parameter: Age (day) Value: 23-25 days
  misc_feature: MA Experiment 20000794 PARAMETER Experiment Name: At_Petals_P Parameter: Plant Line Value: WS
  misc_feature: MA Experiment 20000794 PARAMETER Experiment Name: At_Petals_P Parameter: Tissue Value: Petals vs. Whole plant
acctaccttctccaatctcttttcgatttcgaattttccatctttcgattctcagtagtttcgtctcaatttcataattccattgtagccgataatgaattccgctttagattttgcttttccggctacatttccggttaaatcgagttctgttggcggacatcggattgcttcccctggattcagttcccgcttaagattgtgctctcttcctccttcttcatctatcaaggctgagtcatgtttaaaaagagacgtgcacaggcaaagaagcagtcttgagtcaatgttctgttatgataaaccaataccagaggaaataatcgaggagccagttggattatccatgtcagagagagagattggtgataatcagcgttgcacttgttgtgaagctaaaggtgcattgctttgttccacttgttctggaactggtctatatgtagattccattatggagagtcaaggcatcattgttaaagtccgttgcttaggttgtggtggaagtggtaatattatgtgcaaactttgtggtgggcgtggtcacgtaggacactgatgactccgtgtttcacttgtttgcactcatggttctgttttacctattcgccactttttctagctctgatcttattgtaaaagcctacttttttgagttccatacatagatttgtgttcttgtactgatgtaatctctagctaaactatgcacaatcttgtcccagactattcattttctgttgttatataaaatggtttccc

SEQ ID NO: 30304 - protein, 154 aa, Arabidopsis thaliana
  peptide (1)..(154): Ceres Seq. ID no. 13490576
  misc_feature (1)..(154): Homolog of NCBI NO: 21554941 NR Description: unknown [Arabidopsis thaliana]
  misc_feature (1)..(154): Homolog of NCBI NO: 15238662 NR Description: expressed protein [Arabidopsis thaliana]
MNSALDFAFPATFPVKSSSVGGHRIASPGFSSRLRLCSLPPSSSIKAESCLKRDVHRQRSSLESMFCYDKPIPEEIIEEPVGLSMSEREIGDNQRCTCCEAKGALLCSTCSGTGLYVDSIMESQGIIVKVRCLGCGGSGNIMCKLCGGRGHVGH

SEQ ID NO: 30305 - protein, 90 aa, Arabidopsis thaliana
  peptide (1)..(90): Ceres Seq. ID no. 13490577
  misc_feature (1)..(90): Homolog of NCBI NO: 21554941 NR Description: unknown [Arabidopsis thaliana]
  misc_feature (1)..(90): Homolog of NCBI NO: 15238662 NR Description: expressed protein [Arabidopsis thaliana]
MFCYDKPIPEEIIEEPVGLSMSEREIGDNQRCTCCEAKGALLCSTCSGTGLYVDSIMESQGIIVKVRCLGCGGSGNIMCKLCGGRGHVGH

SEQ ID NO: 30306 - DNA, 1910 bp, Arabidopsis thaliana
  misc_feature (1)..(1910): Ceres Seq. ID no. 13509014
  misc_feature: MA Experiment ID: 108461 Result: Down-regulated in Transcription
  misc_feature: MA Experiment 108461 PARAMETER Experiment Name: At_Germinating_Seeds_cDNA_P Parameter: Age (day) Value: 1 vs. 0
  misc_feature: MA Experiment 108461 PARAMETER Experiment Name: At_Germinating_Seeds_cDNA_P Parameter: Tissue Value: Germinating Seeds
  misc_feature: MA Experiment ID: 108462 Result: Down-regulated in Transcription
  misc_feature: MA Experiment 108462 PARAMETER Experiment Name: At_Germinating_Seeds_cDNA_P Parameter: Age (day) Value: 2 vs. 0
  misc_feature: MA Experiment 108462 PARAMETER Experiment Name: At_Germinating_Seeds_cDNA_P Parameter: Tissue Value: Germinating Seeds
  misc_feature: MA Experiment ID: 108464 Result: Down-regulated in Transcription
  misc_feature: MA Experiment 108464 PARAMETER Experiment Name: At_Germinating_Seeds_cDNA_P Parameter: Age (day) Value: 4 vs. 0
  misc_feature: MA Experiment 108464 PARAMETER Experiment Name: At_Germinating_Seeds_cDNA_P Parameter: Tissue Value: Germinating Seeds
  misc_feature: MA Experiment ID: 20000089 Result: Down-regulated in Transcription
  misc_feature: MA Experiment ID: 20000171 Result: Down-regulated in Transcription
  misc_feature: MA Experiment 20000171 PARAMETER Experiment Name: At_42deg_Heat_P Parameter: Age (day) Value: 14
  misc_feature: MA Experiment 20000171 PARAMETER Experiment Name: At_42deg_Heat_P Parameter: Organism Value: A. thaliana
  misc_feature: MA Experiment 20000171 PARAMETER Experiment Name: At_42deg_Heat_P Parameter: Plant Line Value: WS
  misc_feature: MA Experiment 20000171 PARAMETER Experiment Name: At_42deg_Heat_P Parameter: Temperature (deg C) Value: 42 vs. 22
  misc_feature: MA Experiment 20000171 PARAMETER Experiment Name: At_42deg_Heat_P Parameter: Timepoint (hr) Value: 1
  misc_feature: MA Experiment 20000171 PARAMETER Experiment Name: At_42deg_Heat_P Parameter: Tissue Value: Aerial
  misc_feature: MA Experiment ID: 20000179 Result: Up-regulated in Transcription
  misc_feature: MA Experiment 20000179 PARAMETER Experiment Name: At_Germinating_Seeds_P Parameter: Age (hr) Value: 6 vs. 0
  misc_feature: MA Experiment 20000179 PARAMETER Experiment Name: At_Germinating_Seeds_P Parameter: Tissue Value: Germinating Seeds
  misc_feature: MA Experiment ID: 20000185 Result: Down-regulated in Transcription
  misc_feature: MA Experiment 20000185 PARAMETER Experiment Name: At_Roots__P Parameter: Age (day) Value: 7 vs. 21
  misc_feature: MA Experiment 20000185 PARAMETER Experiment Name: At_Roots__P Parameter: Organism Value: A. thaliana
  misc_feature: MA Experiment 20000185 PARAMETER Experiment Name: At_Roots__P Parameter: Tissue Value: Roots vs. Whole Plant
  misc_feature: MA Experiment ID: 20000227 Result: Down-regulated in Transcription
  misc_feature: MA Experiment 20000227 PARAMETER Experiment Name: At_Root-Tips-vs-Tops_P Parameter: Tissue Value: Root Tips vs. Root Tops
  misc_feature: MA Experiment ID: 20000437 Result: Down-regulated in Transcription
  misc_feature: MA Experiment 20000437 PARAMETER Experiment Name: At_Drought_P Parameter: Age (day) Value: 8
  misc_feature: MA Experiment 20000437 PARAMETER Experiment Name: At_Drought_P Parameter: Organism Value: A. thaliana
  misc_feature: MA Experiment 20000437 PARAMETER Experiment Name: At_Drought_P Parameter: Plant Line Value: WS
  misc_feature: MA Experiment 20000437 PARAMETER Experiment Name: At_Drought_P Parameter: Timepoint (hr) Value: 24
  misc_feature: MA Experiment 20000437 PARAMETER Experiment Name: At_Drought_P Parameter: Tissue Value: Whole Plant
  misc_feature: MA Experiment 20000437 PARAMETER Experiment Name: At_Drought_P Parameter: Treatment Value: Drought vs. No Drought
  misc_feature: MA Experiment ID: 20000439 Result: Down-regulated in Transcription
  misc_feature: MA Experiment 20000439 PARAMETER Experiment Name: At_Roots__P Parameter: Age (day) Value: 14 vs. 21
  misc_feature: MA Experiment 20000439 PARAMETER Experiment Name: At_Roots__P Parameter: Organism Value: A. thaliana
  misc_feature: MA Experiment 20000439 PARAMETER Experiment Name: At_Roots__P Parameter: Tissue Value: Roots vs. Whole Plant
  misc_feature: MA Experiment ID: 20000495 Result: Down-regulated in Transcription
  misc_feature: MA Experiment 20000495 PARAMETER Experiment Name: At_Guard_Cells_P Parameter: Harvest Date Value: 8/2/2002
  misc_feature: MA Experiment 20000495 PARAMETER Experiment Name: At_Guard_Cells_P Parameter: Organism Value: A. thaliana
  misc_feature: MA Experiment 20000495 PARAMETER Experiment Name: At_Guard_Cells_P Parameter: Tissue Value: Guard Cells vs. Leaves
  misc_feature: MA Experiment ID: 20000573 Result: Down-regulated in Transcription
  misc_feature: MA Experiment 20000573 PARAMETER Experiment Name: At_100uM_ABA_Mutants__P Parameter: Organism Value: A. thaliana
  misc_feature: MA Experiment 20000573 PARAMETER Experiment Name: At_100uM_ABA_Mutants__P Parameter: Plant Line Value: CS22 vs. Ler wt
  misc_feature: MA Experiment 20000573 PARAMETER Experiment Name: At_100uM_ABA_Mutants__P Parameter: Timepoint (hr) Value: N/A
  misc_feature: MA Experiment 20000573 PARAMETER Experiment Name: At_100uM_ABA_Mutants__P Parameter: Tissue Value: Whole Plant
  misc_feature: MA Experiment 20000573 PARAMETER Experiment Name: At_100uM_ABA_Mutants__P Parameter: Treatment Value: None
  misc_feature: MA Experiment ID: 20000574 Result: Down-regulated in Transcription
  misc_feature: MA Experiment 20000574 PARAMETER Experiment Name: At_100uM_ABA_Mutants__P Parameter: Organism Value: A. thaliana
  misc_feature: MA Experiment 20000574 PARAMETER Experiment Name: At_100uM_ABA_Mutants__P Parameter: Plant Line Value: CS23 vs. Ler wt
  misc_feature: MA Experiment 20000574 PARAMETER Experiment Name: At_100uM_ABA_Mutants__P Parameter: Timepoint (hr) Value: N/A
  misc_feature: MA Experiment 20000574 PARAMETER Experiment Name: At_100uM_ABA_Mutants__P Parameter: Tissue Value: Whole Plant
  misc_feature: MA Experiment 20000574 PARAMETER Experiment Name: At_100uM_ABA_Mutants__P Parameter: Treatment Value: None
  misc_feature: MA Experiment ID: 20001248 Result: Down-regulated in Transcription
  misc_feature: MA Experiment 20001248 PARAMETER Experiment Name: At_Far-red-induction_P Parameter: Age (day) Value: 7
  misc_feature: MA Experiment 20001248 PARAMETER Experiment Name: At_Far-red-induction_P Parameter: Light Value: Far-red vs. White
  misc_feature: MA Experiment 20001248 PARAMETER Experiment Name: At_Far-red-induction_P Parameter: Organism Value: A. thaliana
  misc_feature: MA Experiment 20001248 PARAMETER Experiment Name: At_Far-red-induction_P Parameter: Plant Line Value: Columbia
  misc_feature: MA Experiment 20001248 PARAMETER Experiment Name: At_Far-red-induction_P Parameter: Timepoint (hr) Value: 4
  misc_feature: MA Experiment 20001248 PARAMETER Experiment Name: At_Far-red-induction_P Parameter: Tissue Value: Whole Plant
  misc_feature: MA Experiment ID: 20001560 Result: Down-regulated in Transcription
  misc_feature: MA Experiment 20001560 PARAMETER Experiment Name: At_Drought_Soil_Dry_P Parameter: Age (day) Value: 28
  misc_feature: MA Experiment 20001560 PARAMETER Experiment Name: At_Drought_Soil_Dry_P Parameter: Organism Value: A. thaliana
  misc_feature: MA Experiment 20001560 PARAMETER Experiment Name: At_Drought_Soil_Dry_P Parameter: Plant Line Value: WS
  misc_feature: MA Experiment 20001560 PARAMETER Experiment Name: At_Drought_Soil_Dry_P Parameter: Post Timepoint (hr) Value: None
  misc_feature: MA Experiment 20001560 PARAMETER Experiment Name: At_Drought_Soil_Dry_P Parameter: Post-Treatment Value: None
  misc_feature: MA Experiment 20001560 PARAMETER Experiment Name: At_Drought_Soil_Dry_P Parameter: Timepoint (day) Value: 14
  misc_feature: MA Experiment 20001560 PARAMETER Experiment Name: At_Drought_Soil_Dry_P Parameter: Treatment Value: Drought vs. No Drought
  misc_feature: MA Experiment ID: 20001905 Result: Down-regulated in Transcription
  misc_feature: MA Experiment 20001905 PARAMETER Experiment Name: At_Drought_Reproduction_P Parameter: Age (day) Value: 40
  misc_feature: MA Experiment 20001905 PARAMETER Experiment Name: At_Drought_Reproduction_P Parameter: Organism Value: A. thaliana
  misc_feature: MA Experiment 20001905 PARAMETER Experiment Name: At_Drought_Reproduction_P Parameter: Plant Line Value: WS
  misc_feature: MA Experiment 20001905 PARAMETER Experiment Name: At_Drought_Reproduction_P Parameter: Timepoint (day) Value: 10
  misc_feature: MA Experiment 20001905 PARAMETER Experiment Name: At_Drought_Reproduction_P Parameter: Tissue Value: Rosettes
  misc_feature: MA Experiment 20001905 PARAMETER Experiment Name: At_Drought_Reproduction_P Parameter: Treatment Value: Drought vs. No Drought
acttaactcatatcaaccttcgccggaaataatggctttcccgcgatttctttctctcctcgccgtcgtcactctctctcttttcctcaccaccactgatgcttcctctcgctctctatccactccacctaaaacgaacgtactcgacgtcgtttcatctctccagcaaacacaaactatcctctcactcgacccgactcgttcctcactcaccaccaccaaacccgaatccctatccgacccggttttcttcaattcatcttcaccactatctctagagcttcactctcgagacactttcgtcgcgtcacagcacaaagactacaaaagcttaacactcagtcgactcgagcgcgactcatcccgagtcgccggaatcgtcgcgaagatccgtttcgccgtcgaaggagtcgatagatccgatctcaaacccgtttacaacgaagatacacgataccaaaccgaggatctaacgacacctgtcgtctccggagcctctcaaggaagcggcgagtatttctcaagaatcggtgtcggaactccggcgaaagagatgtacttggttctcgacaccggaagcgacgtaaattggatccagtgtgaaccttgcgccgactgttaccaacagtccgacccggtttttaacccgacttcgtcttccacatacaaatctctcacttgctctgctccacagtgctctcttctcgaaacctccgcttgtcggtcaaacaaatgtctctaccaagttagttacggagacggatctttcaccgtcggtgaactcgctaccgatacggtgacgtttggtaactctggtaaaataaacaacgtcgctttgggttgtggtcacgacaacgaaggtctctttaccggagcagccggtttactcggtttaggcggtggtgttttatcgataaccaatcaaatgaaagcgacgtcgttttcttactgcctcgttgaccgtgactcgggaaagtcctcaagtcttgatttcaactcggtccaactcggtggcggagacgcgacggcgccgcttctacgtaacaaaaagatcgacactttctactacgtcggactcagtggattcagcgtcggtggtgaaaaagtcgtgctgcctgatgcgatcttcgatgtcgatgcttcgggaagcggaggagtgatcttggattgtggaaccgccgtgactcgtcttcagacgcaggcttataactcgctgcgtgacgcgtttcttaaactcaccgtgaatctcaaaaaaggatcttcgagcatctctctgttcgacacgtgttacgatttctcgtctctctccactgtgaaagtaccgacggttgcgtttcatttcacgggagggaagtcgcttgatttgccggcgaagaattatctgatccctgtggatgatagtggaacgttttgcttcgcttttgctccgacgtcgtcgtcgttgtcgatcatcgggaatgtgcagcagcaagggacacgtatcacttacgatctatccaaaaatgttatcggattgtcagggaataaatgctaaacatgtcaaagtagaaaaattaatagttttacgggtaatcagtaaaactttttatggtactagctagctacggtaacaagatgaaaacaaaatccttaagtgtgaatttttctaccttttttttaattaatcataagttattgtcgtcttttatcgaataataataggattaattaattttattataaagttgaaagtgttgttgtctcagcaagaagttttcagtagtgaagaagaagaagagtcaataaagtaagaagttacaaaaaagaagggtctttttgtaacaaaagtttagtcttcaaagaaacaaacagacttttgttgttgtggccctttaatgtccttcaatattttaaattatagtctgaatttt

SEQ ID NO: 30307 - protein, 510 aa, Arabidopsis thaliana
  peptide (1)..(510): Ceres Seq. ID no. 13509015
  misc_feature (120)..(508): Pfam Name: Eukaryotic aspartyl protease Pfam Description: Eukaryotic aspartyl protease
  misc_feature (120)..(508): Pfam Name: Eukaryotic aspartyl protease Pfam Description: Eukaryotic aspartyl protease
  misc_feature (120)..(508): Pfam Name: Eukaryotic aspartyl protease Pfam Description: Eukaryotic aspartyl protease
  misc_feature (120)..(508): Pfam Name: Eukaryotic aspartyl protease Pfam Description: Eukaryotic aspartyl protease
  misc_feature (86)..(510): Homolog of NCBI NO: 15290061 NR Description: nucleoid DNA-binding protein cnd41-like protein
  misc_feature (52)..(510): Homolog of NCBI NO: 15228618 NR Description: expressed protein [Arabidopsis thaliana]
  misc_feature (116)..(510): Homolog of NCBI NO: 15231010 NR Description: expressed protein [Arabidopsis thaliana]
  misc_feature (64)..(510): Homolog of NCBI NO: 21594980 NR Description: chloroplast nucleoid DNA binding protein,
  misc_feature (64)..(510): Homolog of NCBI NO: 15223368 NR Description: chloroplast nucleoid DNA binding protein -related
  misc_feature (86)..(510): Homolog of NCBI NO: 15290061 NR Description: nucleoid DNA-binding protein cnd41-like protein
  misc_feature (116)..(510): Homolog of NCBI NO: 15231010 NR Description: expressed protein [Arabidopsis thaliana]
  misc_feature (64)..(510): Homolog of NCBI NO: 15223368 NR Description: chloroplast nucleoid DNA binding protein -related
  misc_feature (64)..(510): Homolog of NCBI NO: 21594980 NR Description: chloroplast nucleoid DNA binding protein,
  misc_feature (116)..(510): Homolog of NCBI NO: 15231010 NR Description: expressed protein [Arabidopsis thaliana]
  misc_feature (52)..(510): Homolog of NCBI NO: 15228618 NR Description: expressed protein [Arabidopsis thaliana]
  misc_feature (86)..(510): Homolog of NCBI NO: 15290061 NR Description: nucleoid DNA-binding protein cnd41-like protein
  misc_feature (11)..(510): Homolog of NCBI NO: 15229656 NR Description: chloroplast nucleoid DNA-binding protein -related
  misc_feature (11)..(510): Homolog of NCBI NO: 19424106 NR Description: putative chloroplast nucleoid DNA-binding protein
  misc_feature (28)..(510): Homolog of NCBI NO: 15222611 NR Description: expressed protein [Arabidopsis thaliana]
  misc_feature (14)..(510): Homolog of NCBI NO: 34895664 NR Description: nucleoid DNA-binding protein cnd41-like protein
  misc_feature (53)..(510): Homolog of NCBI NO: 28392860 NR Description: unknown protein [Arabidopsis thaliana]
  misc_feature (11)..(510): Homolog of NCBI NO: 15229656 NR Description: chloroplast nucleoid DNA-binding protein -related
  misc_feature (11)..(510): Homolog of NCBI NO: 19424106 NR Description: putative chloroplast nucleoid DNA-binding protein
  misc_feature (28)..(510): Homolog of NCBI NO: 15222611 NR Description: expressed protein [Arabidopsis thaliana]
  misc_feature (14)..(510): Homolog of NCBI NO: 34895664 NR Description: nucleoid DNA-binding protein cnd41-like protein
  misc_feature (53)..(510): Homolog of NCBI NO: 28392860 NR Description: unknown protein [Arabidopsis thaliana]
  misc_feature (64)..(510): Homolog of NCBI NO: 15223368 NR Description: chloroplast nucleoid DNA binding protein -related
  misc_feature (64)..(510): Homolog of NCBI NO: 21594980 NR Description: chloroplast nucleoid DNA binding protein,
  misc_feature (116)..(510): Homolog of NCBI NO: 15231010 NR Description: expressed protein [Arabidopsis thaliana]
  misc_feature (52)..(510): Homolog of NCBI NO: 15228618 NR Description: expressed protein [Arabidopsis thaliana]
  misc_feature (86)..(510): Homolog of NCBI NO: 15290061 NR Description: nucleoid DNA-binding protein cnd41-like protein
  misc_feature (11)..(510): Homolog of NCBI NO: 15229656 NR Description: chloroplast nucleoid DNA-binding protein -related
  misc_feature (11)..(510): Homolog of NCBI NO: 19424106 NR Description: putative chloroplast nucleoid DNA-binding protein
  misc_feature (28)..(510): Homolog of NCBI NO: 15222611 NR Description: expressed protein [Arabidopsis thaliana]
  misc_feature (14)..(510): Homolog of NCBI NO: 34895664 NR Description: nucleoid DNA-binding protein cnd41-like protein
  misc_feature (53)..(510): Homolog of NCBI NO: 28392860 NR Description: unknown protein [Arabidopsis thaliana]
  misc_feature (64)..(510): Homolog of NCBI NO: 15223368 NR Description: chloroplast nucleoid DNA binding protein -related
  misc_feature (64)..(510): Homolog of NCBI NO: 21594980 NR Description: chloroplast nucleoid DNA binding protein,
  misc_feature (52)..(510): Homolog of NCBI NO: 15228618 NR Description: expressed protein [Arabidopsis thaliana]
  misc_feature (53)..(510): Homolog of NCBI NO: 28392860 NR Description: unknown protein [Arabidopsis thaliana]
  misc_feature (14)..(510): Homolog of NCBI NO: 34895664 NR Description: nucleoid DNA-binding protein cnd41-like protein
  misc_feature (28)..(510): Homolog of NCBI NO: 15222611 NR Description: expressed protein [Arabidopsis thaliana]
  misc_feature (11)..(510): Homolog of NCBI NO: 19424106 NR Description: putative chloroplast nucleoid DNA-binding protein
  misc_feature (11)..(510): Homolog of NCBI NO: 15229656 NR Description: chloroplast nucleoid DNA-binding protein -related
LNSYQPSPEIMAFPRFLSLLAVVTLSLFLTTTDASSRSLSTPPKTNVLDVVSSLQQTQTILSLDPTRSSLTTTKPESLSDPVFFNSSSPLSLELHSRDTFVASQHKDYKSLTLSRLERDSSRVAGIVAKIRFAVEGVDRSDLKPVYNEDTRYQTEDLTTPVVSGASQGSGEYFSRIGVGTPAKEMYLVLDTGSDVNWIQCEPCADCYQQSDPVFNPTSSSTYKSLTCSAPQCSLLETSACRSNKCLYQVSYGDGSFTVGELATDTVTFGNSGKINNVALGCGHDNEGLFTGAAGLLGLGGGVLSITNQMKATSFSYCLVDRDSGKSSSLDFNSVQLGGGDATAPLLRNKKIDTFYYVGLSGFSVGGEKVVLPDAIFDVDASGSGGVILDCGTAVTRLQTQAYNSLRDAFLKLTVNLKKGSSSISLFDTCYDFSSLSTVKVPTVAFHFTGGKSLDLPAKNYLIPVDDSGTFCFAFAPTSSSLSIIGNVQQQGTRITYDLSKNVIGLSGNKC

SEQ ID NO: 30308 - protein, 500 aa, Arabidopsis thaliana [sequence omitted]

SEQ ID NO: 30309 - protein, 326 aa, Arabidopsis thaliana
  peptide (1)..(326): Ceres Seq. ID no. 13509017
  misc_feature (1)..(324): Pfam Name: Eukaryotic aspartyl protease Pfam Description: Eukaryotic aspartyl protease
  misc_feature (1)..(324): Pfam Name: Eukaryotic aspartyl protease Pfam Description: Eukaryotic aspartyl protease
  misc_feature (1)..(324): Pfam Name: Eukaryotic aspartyl protease Pfam Description: Eukaryotic aspartyl protease
  misc_feature (1)..(324): Pfam Name: Eukaryotic aspartyl protease Pfam Description: Eukaryotic aspartyl protease
  misc_feature (1)..(326): Homolog of NCBI NO: 15290061 NR Description: nucleoid DNA-binding protein cnd41-like protein
  misc_feature (1)..(326): Homolog of NCBI NO: 15228618 NR Description: expressed protein [Arabidopsis thaliana]
  misc_feature (1)..(326): Homolog of NCBI NO: 15231010 NR Description: expressed protein [Arabidopsis thaliana]
  misc_feature (1)..(326): Homolog of NCBI NO: 21594980 NR Description: chloroplast nucleoid DNA binding protein,
  misc_feature (1)..(326): Homolog of NCBI NO: 15223368 NR Description: chloroplast nucleoid DNA binding protein -related
  misc_feature (1)..(326): Homolog of NCBI NO: 15290061 NR Description: nucleoid DNA-binding protein cnd41-like protein
  misc_feature (1)..(326): Homolog of NCBI NO: 15231010 NR Description: expressed protein [Arabidopsis thaliana]
  misc_feature (1)..(326): Homolog of NCBI NO: 15223368 NR Description: chloroplast nucleoid DNA binding protein -related
  misc_feature (1)..(326): Homolog of NCBI NO: 21594980 NR Description: chloroplast nucleoid DNA binding protein,
  misc_feature (1)..(326): Homolog of NCBI NO: 15231010 NR Description: expressed protein [Arabidopsis thaliana]
  misc_feature (1)..(326): Homolog of NCBI NO: 15228618 NR Description: expressed protein [Arabidopsis thaliana]
  misc_feature (1)..(326): Homolog of NCBI NO: 15290061 NR Description: nucleoid DNA-binding protein cnd41-like protein
  misc_feature (1)..(326): Homolog of NCBI NO: 15229656 NR Description: chloroplast nucleoid DNA-binding protein -related
  misc_feature (1)..(326): Homolog of NCBI NO: 19424106 NR Description: putative chloroplast nucleoid DNA-binding protein
  misc_feature (1)..(326): Homolog of NCBI NO: 15222611 NR Description: expressed protein [Arabidopsis thaliana]
  misc_feature (1)..(326): Homolog of NCBI NO: 34895664 NR Description: nucleoid DNA-binding protein cnd41-like protein
  misc_feature (1)..(326): Homolog of NCBI NO: 28392860 NR Description: unknown protein [Arabidopsis thaliana]
  misc_feature (1)..(326): Homolog of NCBI NO: 15229656 NR Description: chloroplast nucleoid DNA-binding protein -related
  misc_feature (1)..(326): Homolog of NCBI NO: 19424106 NR Description: putative chloroplast nucleoid DNA-binding protein
  misc_feature (1)..(326): Homolog of NCBI NO: 15222611 NR Description: expressed protein [Arabidopsis thaliana]
  misc_feature (1)..(326): Homolog of NCBI NO: 34895664 NR Description: nucleoid DNA-binding protein cnd41-like protein
  misc_feature (1)..(326): Homolog of NCBI NO: 28392860 NR Description: unknown protein [Arabidopsis thaliana]
  misc_feature (1)..(326): Homolog of NCBI NO: 15223368 NR Description: chloroplast nucleoid DNA binding protein -related
  misc_feature (1)..(326): Homolog of NCBI NO: 21594980 NR Description: chloroplast nucleoid DNA binding protein,
  misc_feature (1)..(326): Homolog of NCBI NO: 15231010 NR Description: expressed protein [Arabidopsis thaliana]
  misc_feature (1)..(326): Homolog of NCBI NO: 15228618 NR Description: expressed protein [Arabidopsis thaliana]
  misc_feature (1)..(326): Homolog of NCBI NO: 15290061 NR Description: nucleoid DNA-binding protein cnd41-like protein
  misc_feature (1)..(326): Homolog of NCBI NO: 15229656 NR Description: chloroplast nucleoid DNA-binding protein -related
  misc_feature (1)..(326): Homolog of NCBI NO: 19424106 NR Description: putative chloroplast nucleoid DNA-binding protein
  misc_feature (1)..(326): Homolog of NCBI NO: 15222611 NR Description: expressed protein [Arabidopsis thaliana]
  misc_feature (1)..(326): Homolog of NCBI NO: 34895664 NR Description: nucleoid DNA-binding protein cnd41-like protein
  misc_feature (1)..(326): Homolog of NCBI NO: 28392860 NR Description: unknown protein [Arabidopsis thaliana]
  misc_feature (1)..(326): Homolog of NCBI NO: 15223368 NR Description: chloroplast nucleoid DNA binding protein -related
  misc_feature (1)..(326): Homolog of NCBI NO: 21594980 NR Description: chloroplast nucleoid DNA binding protein,
  misc_feature (1)..(326): Homolog of NCBI NO: 15228618 NR Description: expressed protein [Arabidopsis thaliana]
  misc_feature (1)..(326): Homolog of NCBI NO: 28392860 NR Description: unknown protein [Arabidopsis thaliana]
  misc_feature (1)..(326): Homolog of NCBI NO: 34895664 NR Description: nucleoid DNA-binding protein cnd41-like protein
  misc_feature (1)..(326): Homolog of NCBI NO: 15222611 NR Description: expressed protein [Arabidopsis thaliana]
  misc_feature (1)..(326): Homolog of NCBI NO: 19424106 NR Description: putative chloroplast nucleoid DNA-binding protein
  misc_feature (1)..(326): Homolog of NCBI NO: 15229656 NR Description: chloroplast nucleoid DNA-binding protein -related
MYLVLDTGSDVNWIQCEPCADCYQQSDPVFNPTSSSTYKSLTCSAPQCSLLETSACRSNKCLYQVSYGDGSFTVGELATDTVTFGNSGKINNVALGCGHDNEGLFTGAAGLLGLGGGVLSITNQMKATSFSYCLVDRDSGKSSSLDFNSVQLGGGDATAPLLRNKKIDTFYYVGLSGFSVGGEKVVLPDAIFDVDASGSGGVILDCGTAVTRLQTQAYNSLRDAFLKLTVNLKKGSSSISLFDTCYDFSSLSTVKVPTVAFHFTGGKSLDLPAKNYLIPVDDSGTFCFAFAPTSSSLSIIGNVQQQGTRITYDLSKNVIGLSGNKC

SEQ ID NO: 30310 - DNA, 1448 bp, Arabidopsis thaliana
  misc_feature (1)..(1448): Ceres Seq. ID no. 13490608
  misc_feature: MA Experiment ID: 108595 Result: Down-regulated in Transcription
  misc_feature: MA Experiment 108595 PARAMETER Experiment Name: At_Ler-pi_Ovule_cDNA_P Parameter: Plant Line Value: null
  misc_feature: MA Experiment ID: 20000173 Result: Down-regulated in Transcription
  misc_feature: MA Experiment 20000173 PARAMETER Experiment Name: At_42deg_Heat_P Parameter: Age (day) Value: 14
  misc_feature: MA Experiment 20000173 PARAMETER Experiment Name: At_42deg_Heat_P Parameter: Organism Value: A. thaliana
  misc_feature: MA Experiment 20000173 PARAMETER Experiment Name: At_42deg_Heat_P Parameter: Plant Line Value: WS
  misc_feature: MA Experiment 20000173 PARAMETER Experiment Name: At_42deg_Heat_P Parameter: Temperature (deg C) Value: 42 vs. 22
  misc_feature: MA Experiment 20000173 PARAMETER Experiment Name: At_42deg_Heat_P Parameter: Timepoint (hr) Value: 6
  misc_feature: MA Experiment 20000173 PARAMETER Experiment Name: At_42deg_Heat_P Parameter: Tissue Value: Aerial
tgggagaagctattctcagattcacgacaccagttcgtcacaagcttcgagcccagctcggaaaacaaaattggaacttgctgcataaagtttagtttttttattgaatttggaaggatgattgggaatccagtaattcaagttccatcatcactaatgccatcatcctccatgattgcttgtcctcgagtttcacccaatggggttccttatcttccaccaaaacctagaactaggcatttagtggtcagagctgcatccaattccgatgctgctcatggtcaaccatcgtctgatggggggaagaatcctctcaccgttgttttggatgtgcccaggaatatatggagacagactttaaaacctttgagtgattttgggtttggtaagagaagtatttgggaaggtggtgttggtttgtttattgtctctggagctactcttcttgctcttagctgggcttggttgcgaggttttcaaatgcggtcgaagtttaggaaatatcagactgtgtttgagcttagtcatgcttctggtatttgcacgggaacaccggttaggatccgtggggttactgttggtacgattatccgtgttaatccttccttgaagaatattgaagctgttgctgagatagaagatgataagattattatcccgaggaattcattggttgaggtgaatcagtctggtcttctaatggaaactatgatcgacattatgcctaggaatccgataccagaaccttcagtaggacctctgcatcctgaatgtggtaaggaaggtctgatcgtttgtgataggcagacaataaaaggagtgcaaggagttagtttagatgaattagttggaattttcactcgtattggacgcgaagttgaggccattggtgttgccaatacgtattcgcttgctgagagagctgcttcggttattgaggaagcaaggccattgctcaaaaagattcaagccatggctgaagatgctcaacctttgctctctgagtttcgtgatagcggcttgctcaaggaagttgagtgtcttactcgaagccttacccaagcttctgacgatttgagaaaggttaattcgtcaattatgactcctgagaatacagaactcatacagaagtcaatctacactctggtttatactttgaagaacgtcgagagtataagctcagatattctgggattcacaggagatgaagccacaagaaaaaaccttaaactactcatcaaatccctaagcaggctactatgatcagcctgtagattttagactggataaataaaatccagaattttatggtaagcaagttttaaaaattcgaaaaatgtgttgtttcttctttagagttatttttgttttcgttttgtgttctgagattggggtttaatggagagacataattcagtttttataagaacaaaaatgtttgtttctct

SEQ ID NO: 30311 - protein, 420 aa, Arabidopsis thaliana
  peptide (1)..(420): Ceres Seq. ID no. 13490609
  misc_feature (138)..(274): Pfam Name: mce related protein Pfam Description: mce related protein
  misc_feature (131)..(396): Homolog of NCBI NO: 16329641 NR Description: hypothetical protein [Synechocystis sp. PCC 6803]
  misc_feature (323)..(420): Homolog of NCBI NO: 37523684 NR Description: hypothetical protein glr4115 [Gloeobacter
  misc_feature (130)..(352): Homolog of NCBI NO: 37523684 NR Description: hypothetical protein glr4115 [Gloeobacter
  misc_feature (130)..(417): Homolog of NCBI NO: 17227677 NR Description: hypothetical protein [Nostoc sp. PCC 7120]
  misc_feature (131)..(417): Homolog of NCBI NO: 22299950 NR Description: ORF_ID:tll2407~hypothetical protein
  misc_feature (124)..(417): Homolog of NCBI NO: 23128989 NR Description: hypothetical protein [Nostoc punctiforme]
  misc_feature (131)..(407): Homolog of NCBI NO: 23043318 NR Description: hypothetical protein [Trichodesmium erythraeum
  misc_feature (54)..(420): Homolog of NCBI NO: 34906054 NR Description: P0698H10.22 [Oryza sativa (japonica
  misc_feature (58)..(420): Homolog of NCBI NO: 21553847 NR Description: unknown [Arabidopsis thaliana]
  misc_feature (40)..(420): Homolog of NCBI NO: 18402572 NR Description: expressed protein [Arabidopsis thaliana]
WEKLFSDSRHQFVTSFEPSSENKIGTCCIKFSFFIEFGRMIGNPVIQVPSSLMPSSSMIACPRVSPNGVPYLPPKPRTRHLVVRAASNSDAAHGQPSSDGGKNPLTVVLDVPRNIWRQTLKPLSDFGFGKRSIWEGGVGLFIVSGATLLALSWAWLRGFQMRSKFRKYQTVFELSHASGICTGTPVRIRGVTVGTIIRVNPSLKNIEAVAEIEDDKIIIPRNSLVEVNQSGLLMETMIDIMPRNPIPEPSVGPLHPECGKEGLIVCDRQTIKGVQGVSLDELVGIFTRIGREVEAIGVANTYSLAERAASVIEEARPLLKKIQAMAEDAQPLLSEFRDSGLLKEVECLTRSLTQASDDLRKVNSSIMTPENTELIQKSIYTLVYTLKNVESISSDILGFTGDEATRKNLKLLIKSLSRLL

SEQ ID NO: 30312 - protein, 381 aa, Arabidopsis thaliana
  peptide (1)..(381): Ceres Seq. ID no. 13490610
  misc_feature (99)..(235): Pfam Name: mce related protein Pfam Description: mce related protein
  misc_feature (92)..(357): Homolog of NCBI NO: 16329641 NR Description: hypothetical protein [Synechocystis sp. PCC 6803]
  misc_feature (284)..(381): Homolog of NCBI NO: 37523684 NR Description: hypothetical protein glr4115 [Gloeobacter
  misc_feature (91)..(313): Homolog of NCBI NO: 37523684 NR Description: hypothetical protein glr4115 [Gloeobacter
  misc_feature (91)..(378): Homolog of NCBI NO: 17227677 NR Description: hypothetical protein [Nostoc sp. PCC 7120]
  misc_feature (92)..(378): Homolog of NCBI NO: 22299950 NR Description: ORF_ID:tll2407~hypothetical protein
  misc_feature (85)..(378): Homolog of NCBI NO: 23128989 NR Description: hypothetical protein [Nostoc punctiforme]
  misc_feature (92)..(368): Homolog of NCBI NO: 23043318 NR Description: hypothetical protein [Trichodesmium erythraeum
  misc_feature (15)..(381): Homolog of NCBI NO: 34906054 NR Description: P0698H10.22 [Oryza sativa (japonica
  misc_feature (19)..(381): Homolog of NCBI NO: 21553847 NR Description: unknown [Arabidopsis thaliana]
  misc_feature (1)..(381): Homolog of NCBI NO: 18402572 NR Description: expressed protein [Arabidopsis thaliana]
MIGNPVIQVPSSLMPSSSMIACPRVSPNGVPYLPPKPRTRHLVVRAASNSDAAHGQPSSDGGKNPLTVVLDVPRNIWRQTLKPLSDFGFGKRSIWEGGVGLFIVSGATLLALSWAWLRGFQMRSKFRKYQTVFELSHASGICTGTPVRIRGVTVGTIIRVNPSLKNIEAVAEIEDDKIIIPRNSLVEVNQSGLLMETMIDIMPRNPIPEPSVGPLHPECGKEGLIVCDRQTIKGVQGVSLDELVGIFTRIGREVEAIGVANTYSLAERAASVIEEARPLLKKIQAMAEDAQPLLSEFRDSGLLKEVECLTRSLTQASDDLRKVNSSIMTPENTELIQKSIYTLVYTLKNVESISSDILGFTGDEATRKNLKLLIKSLSRLL

SEQ ID NO: 30313 - protein, 368 aa, Arabidopsis thaliana
  peptide (1)..(368): Ceres Seq. ID no. 13490611
  misc_feature (86)..(222): Pfam Name: mce related protein Pfam Description: mce related protein
  misc_feature (79)..(344): Homolog of NCBI NO: 16329641 NR Description: hypothetical protein [Synechocystis sp. PCC 6803]
  misc_feature (271)..(368): Homolog of NCBI NO: 37523684 NR Description: hypothetical protein glr4115 [Gloeobacter
  misc_feature (78)..(300): Homolog of NCBI NO: 37523684 NR Description: hypothetical protein glr4115 [Gloeobacter
  misc_feature (78)..(365): Homolog of NCBI NO: 17227677 NR Description: hypothetical protein [Nostoc sp. PCC 7120]
  misc_feature (79)..(365): Homolog of NCBI NO: 22299950 NR Description: ORF_ID:tll2407~hypothetical protein
  misc_feature (72)..(365): Homolog of NCBI NO: 23128989 NR Description: hypothetical protein [Nostoc punctiforme]
  misc_feature (79)..(355): Homolog of NCBI NO: 23043318 NR Description: hypothetical protein [Trichodesmium erythraeum
  misc_feature (2)..(368): Homolog of NCBI NO: 34906054 NR Description: P0698H10.22 [Oryza sativa (japonica
  misc_feature (6)..(368): Homolog of NCBI NO: 21553847 NR Description: unknown [Arabidopsis thaliana]
  misc_feature (1)..(368): Homolog of NCBI NO: 18402572 NR Description: expressed protein [Arabidopsis thaliana]
MPSSSMIACPRVSPNGVPYLPPKPRTRHLVVRAASNSDAAHGQPSSDGGKNPLTVVLDVPRNIWRQTLKPLSDFGFGKRSIWEGGVGLFIVSGATLLALSWAWLRGFQMRSKFRKYQTVFELSHASGICTGTPVRIRGVTVGTIIRVNPSLKNIEAVAEIEDDKIIIPRNSLVEVNQSGLLMETMIDIMPRNPIPEPSVGPLHPECGKEGLIVCDRQTIKGVQGVSLDELVGIFTRIGREVEAIGVANTYSLAERAASVIEEARPLLKKIQAMAEDAQPLLSEFRDSGLLKEVECLTRSLTQASDDLRKVNSSIMTPENTELIQKSIYTLVYTLKNVESISSDILGFTGDEATRKNLKLLIKSLSRLL

SEQ ID NO: 30314 - DNA, 1121 bp, Arabidopsis thaliana
  misc_feature (1)..(1121): Ceres Seq. ID no. 12377558
  misc_feature: MA Experiment ID: 108434 Result: Down-regulated in Transcription
  misc_feature: MA Experiment 108434 PARAMETER Experiment Name: At_Root_Tips_cDNA_P Parameter: Tissue Value: Root Tips
  misc_feature: MA Experiment ID: 108461 Result: Up-regulated in Transcription
  misc_feature: MA Experiment 108461 PARAMETER Experiment Name: At_Germinating_Seeds_cDNA_P Parameter: Age (day) Value: 1 vs. 0
  misc_feature: MA Experiment 108461 PARAMETER Experiment Name: At_Germinating_Seeds_cDNA_P Parameter: Tissue Value: Germinating Seeds
  misc_feature: MA Experiment ID: 108462 Result: Up-regulated in Transcription
  misc_feature: MA Experiment 108462 PARAMETER Experiment Name: At_Germinating_Seeds_cDNA_P Parameter: Age (day) Value: 2 vs. 0
  misc_feature: MA Experiment 108462 PARAMETER Experiment Name: At_Germinating_Seeds_cDNA_P Parameter: Tissue Value: Germinating Seeds
  misc_feature: MA Experiment ID: 108463 Result: Up-regulated in Transcription
  misc_feature: MA Experiment 108463 PARAMETER Experiment Name: At_Germinating_Seeds_cDNA_P Parameter: Age (day) Value: 3 vs. 0
  misc_feature: MA Experiment 108463 PARAMETER Experiment Name: At_Germinating_Seeds_cDNA_P Parameter: Tissue Value: Germinating Seeds
  misc_feature: MA Experiment ID: 108464 Result: Up-regulated in Transcription
  misc_feature: MA Experiment 108464 PARAMETER Experiment Name: At_Germinating_Seeds_cDNA_P Parameter: Age (day) Value: 4 vs. 0
  misc_feature: MA Experiment 108464 PARAMETER Experiment Name: At_Germinating_Seeds_cDNA_P Parameter: Tissue Value: Germinating Seeds
  misc_feature: MA Experiment ID: 108573 Result: Down-regulated in Transcription
  misc_feature: MA Experiment 108573 PARAMETER Experiment Name: At_Drought_cDNA_P Parameter: Timepoint (hr) Value: 6
  misc_feature: MA Experiment 108573 PARAMETER Experiment Name: At_Drought_cDNA_P Parameter: Tissue Value: Aerial
  misc_feature: MA Experiment 108573 PARAMETER Experiment Name: At_Drought_cDNA_P Parameter: Treatment Value: Drought vs. No Drought
  misc_feature: MA Experiment ID: 108577 Result: Down-regulated in Transcription
  misc_feature: MA Experiment 108577 PARAMETER Experiment Name: At_42deg_Heat_cDNA_P Parameter: Temperature (deg C) Value: 42 vs. 22
  misc_feature: MA Experiment 108577 PARAMETER Experiment Name: At_42deg_Heat_cDNA_P Parameter: Timepoint (hr) Value: 6
  misc_feature: MA Experiment 108577 PARAMETER Experiment Name: At_42deg_Heat_cDNA_P Parameter: Tissue Value: Aerial
  misc_feature: MA Experiment ID: 108595 Result: Up-regulated in Transcription
  misc_feature: MA Experiment 108595 PARAMETER Experiment Name: At_Ler-pi_Ovule_cDNA_P Parameter: Plant Line Value: null
  misc_feature: MA Experiment ID: 20000113 Result: Down-regulated in Transcription
  misc_feature: MA Experiment 20000113 PARAMETER Experiment Name: At_42deg_Heat_cDNA_P Parameter: Temperature (deg C) Value: 42 vs. 22
  misc_feature: MA Experiment 20000113 PARAMETER Experiment Name: At_42deg_Heat_cDNA_P Parameter: Timepoint (hr) Value: 8
  misc_feature: MA Experiment 20000113 PARAMETER Experiment Name: At_42deg_Heat_cDNA_P Parameter: Tissue Value: Aerial
  misc_feature: MA Experiment ID: 20000173 Result: Down-regulated in Transcription
  misc_feature: MA Experiment 20000173 PARAMETER Experiment Name: At_42deg_Heat_P Parameter: Age (day) Value: 14
  misc_feature: MA Experiment 20000173 PARAMETER Experiment Name: At_42deg_Heat_P Parameter: Organism Value: A. thaliana
  misc_feature: MA Experiment 20000173 PARAMETER Experiment Name: At_42deg_Heat_P Parameter: Plant Line Value: WS
  misc_feature: MA Experiment 20000173 PARAMETER Experiment Name: At_42deg_Heat_P Parameter: Temperature (deg C) Value: 42 vs. 22
  misc_feature: MA Experiment 20000173 PARAMETER Experiment Name: At_42deg_Heat_P Parameter: Timepoint (hr) Value: 6
  misc_feature: MA Experiment 20000173 PARAMETER Experiment Name: At_42deg_Heat_P Parameter: Tissue Value: Aerial
  misc_feature: MA Experiment ID: 20000185 Result: Down-regulated in Transcription
  misc_feature: MA Experiment 20000185 PARAMETER Experiment Name: At_Roots__P Parameter: Age (day) Value: 7 vs. 21
  misc_feature: MA Experiment 20000185 PARAMETER Experiment Name: At_Roots__P Parameter: Organism Value: A. thaliana
  misc_feature: MA Experiment 20000185 PARAMETER Experiment Name: At_Roots__P Parameter: Tissue Value: Roots vs. Whole Plant
  misc_feature: MA Experiment ID: 20000227 Result: Down-regulated in Transcription
  misc_feature: MA Experiment 20000227 PARAMETER Experiment Name: At_Root-Tips-vs-Tops_P Parameter: Tissue Value: Root Tips vs. Root Tops
  misc_feature: MA Experiment ID: 20000573 Result: Down-regulated in Transcription
  misc_feature: MA Experiment 20000573 PARAMETER Experiment Name: At_100uM_ABA_Mutants__P Parameter: Organism Value: A. thaliana
  misc_feature: MA Experiment 20000573 PARAMETER Experiment Name: At_100uM_ABA_Mutants__P Parameter: Plant Line Value: CS22 vs. Ler wt
  misc_feature: MA Experiment 20000573 PARAMETER Experiment Name: At_100uM_ABA_Mutants__P Parameter: Timepoint (hr) Value: N/A
  misc_feature: MA Experiment 20000573 PARAMETER Experiment Name: At_100uM_ABA_Mutants__P Parameter: Tissue Value: Whole Plant
  misc_feature: MA Experiment 20000573 PARAMETER Experiment Name: At_100uM_ABA_Mutants__P Parameter: Treatment Value: None
  misc_feature: MA Experiment ID: 20000574 Result: Down-regulated in Transcription
  misc_feature: MA Experiment 20000574 PARAMETER Experiment Name: At_100uM_ABA_Mutants__P Parameter: Organism Value: A. thaliana
  misc_feature: MA Experiment 20000574 PARAMETER Experiment Name: At_100uM_ABA_Mutants__P Parameter: Plant Line Value: CS23 vs. Ler wt
  misc_feature: MA Experiment 20000574 PARAMETER Experiment Name: At_100uM_ABA_Mutants__P Parameter: Timepoint (hr) Value: N/A
  misc_feature: MA Experiment 20000574 PARAMETER Experiment Name: At_100uM_ABA_Mutants__P Parameter: Tissue Value: Whole Plant
  misc_feature: MA Experiment 20000574 PARAMETER Experiment Name: At_100uM_ABA_Mutants__P Parameter: Treatment Value: None
  misc_feature: MA Experiment ID: 20000709 Result: Down-regulated in Transcription
  misc_feature: MA Experiment 20000709 PARAMETER Experiment Name: At_15mM_NH4NO3_L-to-H_P Parameter: Age (hr) Value: 14
  misc_feature: MA Experiment 20000709 PARAMETER Experiment Name: At_15mM_NH4NO3_L-to-H_P Parameter: Organism Value: A. thaliana
  misc_feature: MA Experiment 20000709 PARAMETER Experiment Name: At_15mM_NH4NO3_L-to-H_P Parameter: Plant Line Value: WS
  misc_feature: MA Experiment 20000709 PARAMETER Experiment Name: At_15mM_NH4NO3_L-to-H_P Parameter: Timepoint (hr) Value: 4
  misc_feature: MA Experiment 20000709 PARAMETER Experiment Name: At_15mM_NH4NO3_L-to-H_P Parameter: Tissue Value: Aerial
  misc_feature: MA Experiment 20000709 PARAMETER Experiment Name: At_15mM_NH4NO3_L-to-H_P Parameter: Treatment Value: 15mM NH4NO3 vs. 30mM Mannitol
  misc_feature: MA Experiment ID: 20000794 Result: Down-regulated in Transcription
  misc_feature: MA Experiment 20000794 PARAMETER Experiment Name: At_Petals_P Parameter: Age (day) Value: 23-25 days
  misc_feature: MA Experiment 20000794 PARAMETER Experiment Name: At_Petals_P Parameter: Plant Line Value: WS
  misc_feature: MA Experiment 20000794 PARAMETER Experiment Name: At_Petals_P Parameter: Tissue Value: Petals vs. Whole plant
  misc_feature: MA Experiment ID: 20001557 Result: Down-regulated in Transcription
  misc_feature: MA Experiment 20001557 PARAMETER Experiment Name: At_Drought_Soil_Dry_P Parameter: Age (day) Value: 27
  misc_feature: MA Experiment 20001557 PARAMETER Experiment Name: At_Drought_Soil_Dry_P Parameter: Organism Value: A. thaliana
  misc_feature: MA Experiment 20001557 PARAMETER Experiment Name: At_Drought_Soil_Dry_P Parameter: Plant Line Value: WS
  misc_feature: MA Experiment 20001557 PARAMETER Experiment Name: At_Drought_Soil_Dry_P Parameter: Post Timepoint (hr) Value: 3
  misc_feature: MA Experiment 20001557 PARAMETER Experiment Name: At_Drought_Soil_Dry_P Parameter: Post-Treatment Value: Re-Water vs. No Drought
  misc_feature: MA Experiment 20001557 PARAMETER Experiment Name: At_Drought_Soil_Dry_P Parameter: Timepoint (day) Value: 13
  misc_feature: MA Experiment 20001557 PARAMETER Experiment Name: At_Drought_Soil_Dry_P Parameter: Treatment Value: Drought vs. No Drought
  misc_feature: MA Experiment ID: 20001558 Result: Down-regulated in Transcription
  misc_feature: MA Experiment 20001558 PARAMETER Experiment Name: At_Drought_Soil_Dry_P Parameter: Age (day) Value: 27
  misc_feature: MA Experiment 20001558 PARAMETER Experiment Name: At_Drought_Soil_Dry_P Parameter: Organism Value: A. thaliana
  misc_feature: MA Experiment 20001558 PARAMETER Experiment Name: At_Drought_Soil_Dry_P Parameter: Plant Line Value: WS
  misc_feature: MA Experiment 20001558 PARAMETER Experiment Name: At_Drought_Soil_Dry_P Parameter: Post Timepoint (hr) Value: 6
  misc_feature: MA Experiment 20001558 PARAMETER Experiment Name: At_Drought_Soil_Dry_P Parameter: Post-Treatment Value: Re-Water vs. No Drought
  misc_feature: MA Experiment 20001558 PARAMETER Experiment Name: At_Drought_Soil_Dry_P Parameter: Timepoint (day) Value: 13
  misc_feature: MA Experiment 20001558 PARAMETER Experiment Name: At_Drought_Soil_Dry_P Parameter: Treatment Value: Drought vs. No Drought
  misc_feature: MA Experiment ID: 20001560 Result: Down-regulated in Transcription
  misc_feature: MA Experiment 20001560 PARAMETER Experiment Name: At_Drought_Soil_Dry_P Parameter: Age (day) Value: 28
  misc_feature: MA Experiment 20001560 PARAMETER Experiment Name: At_Drought_Soil_Dry_P Parameter: Organism Value: A. thaliana
  misc_feature: MA Experiment 20001560 PARAMETER Experiment Name: At_Drought_Soil_Dry_P Parameter: Plant Line Value: WS
  misc_feature: MA Experiment 20001560 PARAMETER Experiment Name: At_Drought_Soil_Dry_P Parameter: Post Timepoint (hr) Value: None
  misc_feature: MA Experiment 20001560 PARAMETER Experiment Name: At_Drought_Soil_Dry_P Parameter: Post-Treatment Value: None
  misc_feature: MA Experiment 20001560 PARAMETER Experiment Name: At_Drought_Soil_Dry_P Parameter: Timepoint (day) Value: 14
  misc_feature: MA Experiment 20001560 PARAMETER Experiment Name: At_Drought_Soil_Dry_P Parameter: Treatment Value: Drought vs. No Drought
  misc_feature: MA Experiment ID: 20001904 Result: Down-regulated in Transcription
  misc_feature: MA Experiment 20001904 PARAMETER Experiment Name: At_Drought_Reproduction_P Parameter: Age (day) Value: 37
  misc_feature: MA Experiment 20001904 PARAMETER Experiment Name: At_Drought_Reproduction_P Parameter: Organism Value: A. thaliana
  misc_feature: MA Experiment 20001904 PARAMETER Experiment Name: At_Drought_Reproduction_P Parameter: Plant Line Value: WS
  misc_feature: MA Experiment 20001904 PARAMETER Experiment Name: At_Drought_Reproduction_P Parameter: Timepoint (day) Value: 7
  misc_feature: MA Experiment 20001904 PARAMETER Experiment Name: At_Drought_Reproduction_P Parameter: Tissue Value: Rosettes
  misc_feature: MA Experiment 20001904 PARAMETER Experiment Name: At_Drought_Reproduction_P Parameter: Treatment Value: Drought vs. No Drought
  misc_feature: MA Experiment ID: 20001905 Result: Down-regulated in Transcription
  misc_feature: MA Experiment 20001905 PARAMETER Experiment Name: At_Drought_Reproduction_P Parameter: Age (day) Value: 40
  misc_feature: MA Experiment 20001905 PARAMETER Experiment Name: At_Drought_Reproduction_P Parameter: Organism Value: A. thaliana
  misc_feature: MA Experiment 20001905 PARAMETER Experiment Name: At_Drought_Reproduction_P Parameter: Plant Line Value: WS
  misc_feature: MA Experiment 20001905 PARAMETER Experiment Name: At_Drought_Reproduction_P Parameter: Timepoint (day) Value: 10
  misc_feature: MA Experiment 20001905 PARAMETER Experiment Name: At_Drought_Reproduction_P Parameter: Tissue Value: Rosettes
  misc_feature: MA Experiment 20001905 PARAMETER Experiment Name: At_Drought_Reproduction_P Parameter: Treatment Value: Drought vs. No Drought
aaatcatctgatctttccctctctcagcaatgcatgatcttcgattttctatcagtgttcaaagctgaaaaaaatcgaactgggtctgttgatttcttcaggtctaaaatcagattagattagagaagaagaagaagaatgctggaagctgtagatagctcaggagtggtgaatggaggattcccgcagattcagagcttttacggcgattgcagtagtgaagaagagttatcggtattgccacgtcatacaaaagtggtggtcaccggaaacaaccggacgaaatcggtgcttgttggtcttcaaggtgttgtcaaaaaagctgtcggtctcggtggttggcattggctggttttgacaaatggaatagaagtaaagttgcagaggaatgcgcttagtgtccttgaacctcctactggaaacgaagaagacgatgatcttgatttcgaaaacacacagaggaatggctctgatatgacatctgaggacacactgaagcctcataagtcgaagctaagagggcagagatcatctcggtcatctcacaagacgatgagcaggtctctatcatctgactcgcaatcaaaaagttcgggttttactcctcctgaaaacatgaaggttgatcttagcaaattggaaatgcctgctttactgaattattggcgacattttaaccttgtggatgcaattccaaatccatcaaaggagcaactaattgacattgttcaaaggcacttcatgtctcagcaaatggatgagcttcaggttattgtggggtttgtccaagctgcaaagagaatgaagaaggcttgcaagtttcaatccaaagaatccagaaacactgatcttaactgcatcagctaaagaaaagccctgactcttaacaaatcctgtatgtacggtacatcaacttgtttaaccatttgtggcttgctaagtttagttcttctagtgatgtttggctaaagggtagatgttgtttcttctttgcttctgttgtttagccaatgtaagtaccatcaaaaaacccaaataactctctaaagctccctattggaaactatcttgtctgatacgatctggagtgaccggtatgttagaatgtaaatatgtttggt

SEQ ID NO: 30315 - protein, 242 aa, Arabidopsis thaliana; identical to SEQ ID NO: 24833
  peptide (1)..(242): Ceres Seq. ID no. 12377559
  misc_feature (204)..(223): Homolog of NCBI NO: 38567956 NR Description: OSJNBb0115I21.12 [Oryza sativa (japonica
  misc_feature (26)..(98): Homolog of NCBI NO: 38567956 NR Description: OSJNBb0115I21.12 [Oryza sativa (japonica
  misc_feature (26)..(223): Homolog of NCBI NO: 38346468 NR Description: OSJNBa0019G23.16 [Oryza sativa (japonica
  misc_feature (2)..(213): Homolog of NCBI NO: 18767383 NR Description: Hypothetical protein [Oryza sativa]
  misc_feature (1)..(213): Homolog of NCBI NO: 37533376 NR Description: hypothetical protein [Oryza sativa (japonica
  misc_feature (1)..(234): Homolog of NCBI NO: 15222092 NR Description: hypothetical protein; protein id: At1g75060.1
  misc_feature (1)..(242): Homolog of NCBI NO: 18394724 NR Description: expressed protein
  misc_feature (1)..(242): Homolog of NCBI NO: 25372870 NR Description: protein F18O14.5 [imported] - Arabidopsis

SEQ ID NO: 30316 - protein, 130 aa, Arabidopsis thaliana; identical to SEQ ID NO: 24834
  peptide (1)..(130): Ceres Seq. ID no. 12377560
  misc_feature (92)..(111): Homolog of NCBI NO: 38567956 NR Description: OSJNBb0115I21.12 [Oryza sativa (japonica
  misc_feature (1)..(111): Homolog of NCBI NO: 38346468 NR Description: OSJNBa0019G23.16 [Oryza sativa (japonica
  misc_feature (1)..(101): Homolog of NCBI NO: 18767383 NR Description: Hypothetical protein [Oryza sativa]
  misc_feature (1)..(101): Homolog of NCBI NO: 37533376 NR Description: hypothetical protein [Oryza sativa (japonica
  misc_feature (1)..(122): Homolog of NCBI NO: 15222092 NR Description: hypothetical protein; protein id: At1g75060.1
  misc_feature (1)..(130): Homolog of NCBI NO: 18394724 NR Description: expressed protein
  misc_feature (1)..(130): Homolog of NCBI NO: 25372870 NR Description: protein F18O14.5 [imported] - Arabidopsis

SEQ ID NO: 30317 - DNA, 1066 bp, Arabidopsis thaliana
  misc_feature (1)..(1066): Ceres Seq. ID no. 13488512
  misc_feature: MA Experiment ID: 108569 Result: Up-regulated in Transcription
  misc_feature: MA Experiment 108569 PARAMETER Experiment Name: At_0.001%_MeJA__cDNA_P Parameter: Timepoint (hr) Value: 6
  misc_feature: MA Experiment 108569 PARAMETER Experiment Name: At_0.001%_MeJA__cDNA_P Parameter: Tissue Value: Aerial
  misc_feature: MA Experiment 108569 PARAMETER Experiment Name: At_0.001%_MeJA__cDNA_P Parameter: Treatment Value: 0.001% MeJA vs. No Treatment
  misc_feature: MA Experiment ID: 108573 Result: Up-regulated in Transcription
  misc_feature: MA Experiment 108573 PARAMETER Experiment Name: At_Drought_cDNA_P Parameter: Timepoint (hr) Value: 6
  misc_feature: MA Experiment 108573 PARAMETER Experiment Name: At_Drought_cDNA_P Parameter: Tissue Value: Aerial
  misc_feature: MA Experiment 108573 PARAMETER Experiment Name: At_Drought_cDNA_P Parameter: Treatment Value: Drought vs. No Drought
  misc_feature: MA Experiment ID: 108585 Result: Up-regulated in Transcription
  misc_feature: MA Experiment 108585 PARAMETER Experiment Name: At_5mM_NaNP_cDNA_P Parameter: Timepoint (hr) Value: 6
  misc_feature: MA Experiment 108585 PARAMETER Experiment Name: At_5mM_NaNP_cDNA_P Parameter: Tissue Value: Aerial
  misc_feature: MA Experiment 108585 PARAMETER Experiment Name: At_5mM_NaNP_cDNA_P Parameter: Treatment Value: null
  misc_feature: MA Experiment ID: 108595 Result: Down-regulated in Transcription
  misc_feature: MA Experiment 108595 PARAMETER Experiment Name: At_Ler-pi_Ovule_cDNA_P Parameter: Plant Line Value: null
  misc_feature: MA Experiment ID: 20000112 Result: Up-regulated in Transcription
  misc_feature: MA Experiment 20000112 PARAMETER Experiment Name: At_42deg_Heat_cDNA_P Parameter: Temperature (deg C) Value: 42 vs. 22
  misc_feature: MA Experiment 20000112 PARAMETER Experiment Name: At_42deg_Heat_cDNA_P Parameter: Timepoint (hr) Value: 2
  misc_feature: MA Experiment 20000112 PARAMETER Experiment Name: At_42deg_Heat_cDNA_P Parameter: Tissue Value: Aerial
  misc_feature: MA Experiment ID: 20000171 Result: Up-regulated in Transcription
  misc_feature: MA Experiment 20000171 PARAMETER Experiment Name: At_42deg_Heat_P Parameter: Age (day) Value: 14
  misc_feature: MA Experiment 20000171 PARAMETER Experiment Name: At_42deg_Heat_P Parameter: Organism Value: A. thaliana
  misc_feature: MA Experiment 20000171 PARAMETER Experiment Name: At_42deg_Heat_P Parameter: Plant Line Value: WS
  misc_feature: MA Experiment 20000171 PARAMETER Experiment Name: At_42deg_Heat_P Parameter: Temperature (deg C) Value: 42 vs. 22
  misc_feature: MA Experiment 20000171 PARAMETER Experiment Name: At_42deg_Heat_P Parameter: Timepoint (hr) Value: 1
  misc_feature: MA Experiment 20000171 PARAMETER Experiment Name: At_42deg_Heat_P Parameter: Tissue Value: Aerial
  misc_feature: MA Experiment ID: 20000224 Result: Down-regulated in Transcription
  misc_feature: MA Experiment ID: 20000234 Result: Down-regulated in Transcription
  misc_feature: MA Experiment 20000234 PARAMETER Experiment Name: At_Siliques_P Parameter: Age (day) Value: 21
  misc_feature: MA Experiment 20000234 PARAMETER Experiment Name: At_Siliques_P Parameter: Organism Value: A. thaliana
  misc_feature: MA Experiment 20000234 PARAMETER Experiment Name: At_Siliques_P Parameter: Plant Line Value: WS
  misc_feature: MA Experiment 20000234 PARAMETER Experiment Name: At_Siliques_P Parameter: Tissue Value: Less Than 5mm Siliques vs. Whole Plant
aagactctgttttttcccaagatgtctggtttcctcttttgtttcgtccaaatctctactttttagggatcttgtccttctcttttctgctgattaaaaccctcgaatttgctccaattcgacgcgaaaaagggcattgagatggtgaatggagaatcatcaactagtacgtcttactctgatagtaacaatgacacaaatgatcaaggaggagactttgaatgtaacatttgtttcgaactagctcaagatccgattgtcactctctgtggccatctcttttgctggccttgcttataccgttggcttcaccaccattcacattctcaagaatgtccggtttgtaaagccgtggttcaagacgataagcttgttcctctttacggtagaggcaagaaccagactgacccgagatcaaaacgttatccgggtttacggattcctaaccgaccaacaggtcaaagacctgagactgctgctcctcctcctcagcctgaagctgcgagtaattttttcaactacggtattggtttgatgggtggaattatgccgatgatggcgactacgaggtttgggaatttcagtatggggtttggtggtttgttaccttctttgtttaactttcagtttcatggatttcatgatgctacgctttatggttcaacaccgggttatccttacggtggttatcataacggtttccgtggagttcctcctcgtggacaagagcgtcctatggctcgtggaggaaaccaaagtgatgcatttctgaagaatatcctcttttttgttggaatctgtgtggtgatatttctcatctggtgaaaacgaatcacatttggtgtatttccaggtatgatcaaacttacttacttggtgcaagttgtgtatgtaaatatggtaatagctgagtgtacttgtctgctatttcgacgttgttattgtatttttgttttgaagatgaaccgtgagtctacaagcttttttacacaactcttttgttgcttttgtgttttgtctaagcatcttatgaaaactagttgtgaaataaatggtgcgtgttatg

SEQ ID NO: 30318 - protein, 227 aa, Arabidopsis thaliana
  peptide (1)..(227): Ceres Seq. ID no. 13488513
  misc_feature (28)..(68): Pfam Name: Zinc finger, C3HC4 type (RING finger) Pfam Description: Zinc finger, C3HC4 type (RING finger)
  misc_feature (1)..(151): Homolog of NCBI NO: 15928691 NR Description: RIKEN cDNA 1700022N24 [Mus musculus]
  misc_feature (13)..(165): Homolog of NCBI NO: 29841097 NR Description: similar to GenBank Accession Number AJ428489
  misc_feature (17)..(225): Homolog of NCBI NO: 39581891 NR Description: Hypothetical protein CBG20152 [Caenorhabditis
  misc_feature (6)..(227): Homolog of NCBI NO: 17554742 NR Description: Ring finger protein RNF-5 (24.9 kD) (rnf-5)
  misc_feature (17)..(147): Homolog of NCBI NO: 15222064 NR Description: zinc finger (C3HC4-type RING finger) protein
  misc_feature (4)..(226): Homolog of NCBI NO: 34909840 NR Description: P0403C05.28 [Oryza sativa (japonica
  misc_feature (9)..(226): Homolog of NCBI NO: 29150403 NR Description: unknown protein [Oryza sativa (japonica
  misc_feature (15)..(225): Homolog of NCBI NO: 18394721 NR Description: zinc finger (C3HC4-type RING finger) protein
  misc_feature (1)..(227): Homolog of NCBI NO: 21553849 NR Description: putative RING zinc finger protein [Arabidopsis
  misc_feature (1)..(227): Homolog of NCBI NO: 15224062 NR Description: zinc finger (C3HC4-type RING finger) protein
MVNGESSTSTSYSDSNNDTNDQGGDFECNICFELAQDPIVTLCGHLFCWPCLYRWLHHHSHSQECPVCKAVVQDDKLVPLYGRGKNQTDPRSKRYPGLRIPNRPTGQRPETAAPPPQPEAASNFFNYGIGLMGGIMPMMATTRFGNFSMGFGGLLPSLFNFQFHGFHDATLYGSTPGYPYGGYHNGFRGVPPRGQERPMARGGNQSDAFLKNILFFVGICVVIFLIW

SEQ ID NO: 30319 - DNA, 934 bp, Arabidopsis thaliana
  misc_feature (1)..(934): Ceres Seq. ID no. 12340180
  misc_feature: MA Experiment ID: 108434 Result: Up-regulated in Transcription
  misc_feature: MA Experiment 108434 PARAMETER Experiment Name: At_Root_Tips_cDNA_P Parameter: Tissue Value: Root Tips
  misc_feature: MA Experiment ID: 108435 Result: Up-regulated in Transcription
  misc_feature: MA Experiment 108435 PARAMETER Experiment Name: At_stm_Mutants_cDNA_P Parameter: Plant Line Value: wt Landsburg vs stm
  misc_feature: MA Experiment 108435 PARAMETER Experiment Name: At_stm_Mutants_cDNA_P Parameter: Tissue Value: Shoot Apical Meristem Region
  misc_feature: MA Experiment ID: 108462 Result: Down-regulated in Transcription
  misc_feature: MA Experiment 108462 PARAMETER Experiment Name: At_Germinating_Seeds_cDNA_P Parameter: Age (day) Value: 2 vs. 0
  misc_feature: MA Experiment 108462 PARAMETER Experiment Name: At_Germinating_Seeds_cDNA_P Parameter: Tissue Value: Germinating Seeds
  misc_feature: MA Experiment ID: 108463 Result: Down-regulated in Transcription
  misc_feature: MA Experiment 108463 PARAMETER Experiment Name: At_Germinating_Seeds_cDNA_P Parameter: Age (day) Value: 3 vs. 0
  misc_feature: MA Experiment 108463 PARAMETER Experiment Name: At_Germinating_Seeds_cDNA_P Parameter: Tissue Value: Germinating Seeds
  misc_feature: MA Experiment ID: 108464 Result: Down-regulated in Transcription
  misc_feature: MA Experiment 108464 PARAMETER Experiment Name: At_Germinating_Seeds_cDNA_P Parameter: Age (day) Value: 4 vs. 0
  misc_feature: MA Experiment 108464 PARAMETER Experiment Name: At_Germinating_Seeds_cDNA_P Parameter: Tissue Value: Germinating Seeds
  misc_feature: MA Experiment ID: 108488 Result: Up-regulated in Transcription
  misc_feature: MA Experiment ID: 108573 Result: Down-regulated in Transcription
  misc_feature: MA Experiment 108573 PARAMETER Experiment Name: At_Drought_cDNA_P Parameter: Timepoint (hr) Value: 6
  misc_feature: MA Experiment 108573 PARAMETER Experiment Name: At_Drought_cDNA_P Parameter: Tissue Value: Aerial
  misc_feature: MA Experiment 108573 PARAMETER Experiment Name: At_Drought_cDNA_P Parameter: Treatment Value: Drought vs. No Drought
  misc_feature: MA Experiment ID: 108595 Result: Down-regulated in Transcription
  misc_feature: MA Experiment 108595 PARAMETER Experiment Name: At_Ler-pi_Ovule_cDNA_P Parameter: Plant Line Value: null
  misc_feature: MA Experiment ID: 20000234 Result: Up-regulated in Transcription
  misc_feature: MA Experiment 20000234 PARAMETER Experiment Name: At_Siliques_P Parameter: Age (day) Value: 21
  misc_feature: MA Experiment 20000234 PARAMETER Experiment Name: At_Siliques_P Parameter: Organism Value: A. thaliana
  misc_feature: MA Experiment 20000234 PARAMETER Experiment Name: At_Siliques_P Parameter: Plant Line Value: WS
  misc_feature: MA Experiment 20000234 PARAMETER Experiment Name: At_Siliques_P Parameter: Tissue Value: Less Than 5mm Siliques vs. Whole Plant
  misc_feature: MA Experiment ID: 20000495 Result: Up-regulated in Transcription
  misc_feature: MA Experiment 20000495 PARAMETER Experiment Name: At_Guard_Cells_P Parameter: Harvest Date Value: 8/2/2002
  misc_feature: MA Experiment 20000495 PARAMETER Experiment Name: At_Guard_Cells_P Parameter: Organism Value: A. thaliana
  misc_feature: MA Experiment 20000495 PARAMETER Experiment Name: At_Guard_Cells_P Parameter: Tissue Value: Guard Cells vs. Leaves
  misc_feature: MA Experiment ID: 20000794 Result: Down-regulated in Transcription
  misc_feature: MA Experiment 20000794 PARAMETER Experiment Name: At_Petals_P Parameter: Age (day) Value: 23-25 days
  misc_feature: MA Experiment 20000794 PARAMETER Experiment Name: At_Petals_P Parameter: Plant Line Value: WS
  misc_feature: MA Experiment 20000794 PARAMETER Experiment Name: At_Petals_P Parameter: Tissue Value: Petals vs. Whole plant
  misc_feature: MA Experiment ID: 20001557 Result: Up-regulated in Transcription
  misc_feature: MA Experiment 20001557 PARAMETER Experiment Name: At_Drought_Soil_Dry_P Parameter: Age (day) Value: 27
  misc_feature: MA Experiment 20001557 PARAMETER Experiment Name: At_Drought_Soil_Dry_P Parameter: Organism Value: A. thaliana
  misc_feature: MA Experiment 20001557 PARAMETER Experiment Name: At_Drought_Soil_Dry_P Parameter: Plant Line Value: WS
  misc_feature: MA Experiment 20001557 PARAMETER Experiment Name: At_Drought_Soil_Dry_P Parameter: Post Timepoint (hr) Value: 3
  misc_feature: MA Experiment 20001557 PARAMETER Experiment Name: At_Drought_Soil_Dry_P Parameter: Post-Treatment Value: Re-Water vs. No Drought
  misc_feature: MA Experiment 20001557 PARAMETER Experiment Name: At_Drought_Soil_Dry_P Parameter: Timepoint (day) Value: 13
  misc_feature: MA Experiment 20001557 PARAMETER Experiment Name: At_Drought_Soil_Dry_P Parameter: Treatment Value: Drought vs. No Drought
  misc_feature: MA Experiment ID: 20001558 Result: Up-regulated in Transcription
  misc_feature: MA Experiment 20001558 PARAMETER Experiment Name: At_Drought_Soil_Dry_P Parameter: Age (day) Value: 27
  misc_feature: MA Experiment 20001558 PARAMETER Experiment Name: At_Drought_Soil_Dry_P Parameter: Organism Value: A. thaliana
  misc_feature: MA Experiment 20001558 PARAMETER Experiment Name: At_Drought_Soil_Dry_P Parameter: Plant Line Value: WS
  misc_feature: MA Experiment 20001558 PARAMETER Experiment Name: At_Drought_Soil_Dry_P Parameter: Post Timepoint (hr) Value: 6
  misc_feature: MA Experiment 20001558 PARAMETER Experiment Name: At_Drought_Soil_Dry_P Parameter: Post-Treatment Value: Re-Water vs. No Drought
  misc_feature: MA Experiment 20001558 PARAMETER Experiment Name: At_Drought_Soil_Dry_P Parameter: Timepoint (day) Value: 13
  misc_feature: MA Experiment 20001558 PARAMETER Experiment Name: At_Drought_Soil_Dry_P Parameter: Treatment Value: Drought vs. No Drought
  misc_feature: MA Experiment ID: 20001560 Result: Up-regulated in Transcription
  misc_feature: MA Experiment 20001560 PARAMETER Experiment Name: At_Drought_Soil_Dry_P Parameter: Age (day) Value: 28
  misc_feature: MA Experiment 20001560 PARAMETER Experiment Name: At_Drought_Soil_Dry_P Parameter: Organism Value: A. thaliana
  misc_feature: MA Experiment 20001560 PARAMETER Experiment Name: At_Drought_Soil_Dry_P Parameter: Plant Line Value: WS
  misc_feature: MA Experiment 20001560 PARAMETER Experiment Name: At_Drought_Soil_Dry_P Parameter: Post Timepoint (hr) Value: None
  misc_feature: MA Experiment 20001560 PARAMETER Experiment Name: At_Drought_Soil_Dry_P Parameter: Post-Treatment Value: None
  misc_feature: MA Experiment 20001560 PARAMETER Experiment Name: At_Drought_Soil_Dry_P Parameter: Timepoint (day) Value: 14
  misc_feature: MA Experiment 20001560 PARAMETER Experiment Name: At_Drought_Soil_Dry_P Parameter: Treatment Value: Drought vs. No Drought
  misc_feature: MA Experiment ID: 20001757 Result: Up-regulated in Transcription
  misc_feature: MA Experiment 20001757 PARAMETER Experiment Name: At_50mM_NH4NO3_L-to-H_P Parameter: Timepoint (hr) Value: 6
  misc_feature: MA Experiment 20001757 PARAMETER Experiment Name: At_50mM_NH4NO3_L-to-H_P Parameter: Tissue Value: Leaf
  misc_feature: MA Experiment 20001757 PARAMETER Experiment Name: At_50mM_NH4NO3_L-to-H_P Parameter: Treatment Value: 50mM NH4NO3 vs 100mM Mannitol
  misc_feature: Phenotype: ROSETTE LEAVES Curled-Curled 2
  misc_feature: Phenotype: WHOLE PLANT Size-Small
  misc_feature: Phenotype: INFLORESCENCE Flowering Time-Late Flowering
  misc_feature: Phenotype: ROSETTE LEAVES Curled-Curled 1
  misc_feature: Phenotype: ROSETTE LEAVES Curled-Curled 2
  misc_feature: Phenotype: WHOLE PLANT Size-Small
  misc_feature: Phenotype: WHOLE PLANT Other
gttttgtcctccttctacgccgcacactatcttttcctctcactcagacttcctcttcatctcaagagaaatggctgaatccaaggtagtggttccagagtctgtgctaaagaagatcaagaggcaagaggaatgggcattggccaagaaagatgaagctgtagctgctaagaagaagagtgttgaggcccgcaagcttatcttcaagagagctgagcagtatgccaaagaatacgctgagaaggataacgagttgatccgattgaagcgggaggctaagttgaaaggaggtttctacgttgaccctgaggctaagttgctctttatcattcgtatccgtggtatcaatgccattgacccaaaaaccaagaagattctgcagctcctgcgtttgagacagatcttcaatggtgtgtttcttaaggtgaacaaggcaacagtaaacatgctgcgccgagttgaaccatacgtgacttacggatacccaaacttgaagagcgttaaggaactgatctacaaaagaggttatggaaagctgaaccaccagaggatagcacttactgacaactccattgtggatcaggctctcggaaagcatgggatcatctgcgttgaggatctcatccacgagatcatgactgttggacctcacttcaaggaagccaacaacttcctgtggccattccaattgaaggcaccactcggtggccttaagaagaagagaaaccactacgtcgaaggtggtgatgctggaaacagggagaatttcatcaacgagcttgtcaggagaatgaattgatgaaagcttccttctttatctttgcaaatttcaaagattttgggaccgagtttttttttttttttgttcaagttatcagagacttgtgatcttttatccgagataggctttttatgactaatcatgttattttcc

SEQ ID NO: 30320 - protein, 265 aa, Arabidopsis thaliana
  peptide (1)..(265): Ceres Seq. ID no. 12340181
  misc_feature (105)..(157): Pfam Name: Ribosomal protein L30p/L7e Pfam Description: Ribosomal protein L30p/L7e
  misc_feature (26)..(265): Homolog of NCBI NO: 32416114 NR Description: hypothetical protein [Neurospora crassa]
  misc_feature (31)..(264): Homolog of NCBI NO: 28630259 NR Description: ribosomal protein L7 [Branchiostoma lanceolatum]
  misc_feature (27)..(265): Homolog of NCBI NO: 38346542 NR Description: OSJNBa0035M09.3 [Oryza sativa (japonica
  misc_feature (20)..(265): Homolog of NCBI NO: 38637548 NR Description: putative 60S ribosomal protein L7
  misc_feature (24)..(265): Homolog of NCBI NO: 445613 NR Description: ribosomal protein L7
  misc_feature (25)..(265): Homolog of NCBI NO: 15231288 NR Description: ribosomal protein, putative
  misc_feature (24)..(265): Homolog of NCBI NO: 15226212 NR Description: putative ribosomal protein L7
  misc_feature (24)..(265): Homolog of NCBI NO: 27311547 NR Description: Unknown protein [Arabidopsis thaliana]
  misc_feature (24)..(265): Homolog of NCBI NO: 30689617 NR Description: 60S ribosomal protein L7 (RPL7C) [Arabidopsis
  misc_feature (23)..(265): Homolog of NCBI NO: 30689623 NR Description: 60S ribosomal protein L7 (RPL7C) [Arabidopsis
FCPPSTPHTIFSSHSDFLFISREMAESKVVVPESVLKKIKRQEEWALAKKDEAVAAKKKSVEARKLIFKRAEQYAKEYAEKDNELIRLKREAKLKGGFYVDPEAKLLFIIRIRGINAIDPKTKKILQLLRLRQIFNGVFLKVNKATVNMLRRVEPYVTYGYPNLKSVKELIYKRGYGKLNHQRIALTDNSIVDQALGKHGIICVEDLIHEIMTVGPHFKEANNFLWPFQLKAPLGGLKKKRNHYVEGGDAGNRENFINELVRRMN

SEQ ID NO: 30321 - protein, 242 aa, Arabidopsis thaliana; identical to SEQ ID NO: 23649
  peptide (1)..(242): Ceres Seq. ID no. 12340182
  misc_feature (82)..(134): Pfam Name: Ribosomal protein L30p/L7e Pfam Description: Ribosomal protein L30p/L7e
  misc_feature (3)..(242): Homolog of NCBI NO: 32416114 NR Description: hypothetical protein [Neurospora crassa]
  misc_feature (8)..(241): Homolog of NCBI NO: 28630259 NR Description: ribosomal protein L7 [Branchiostoma lanceolatum]
  misc_feature (4)..(242): Homolog of NCBI NO: 38346542 NR Description: OSJNBa0035M09.3 [Oryza sativa (japonica
  misc_feature (1)..(242): Homolog of NCBI NO: 38637548 NR Description: putative 60S ribosomal protein L7
  misc_feature (1)..(242): Homolog of NCBI NO: 445613 NR Description: ribosomal protein L7
  misc_feature (2)..(242): Homolog of NCBI NO: 15231288 NR Description: ribosomal protein, putative
  misc_feature (1)..(242): Homolog of NCBI NO: 15226212 NR Description: putative ribosomal protein L7
  misc_feature (1)..(242): Homolog of NCBI NO: 27311547 NR Description: Unknown protein [Arabidopsis thaliana]
  misc_feature (1)..(242): Homolog of NCBI NO: 30689617 NR Description: 60S ribosomal protein L7 (RPL7C) [Arabidopsis
  misc_feature (1)..(242): Homolog of NCBI NO: 30689623 NR Description: 60S ribosomal protein L7 (RPL7C) [Arabidopsis

SEQ ID NO: 30322 - DNA, 1512 bp, Arabidopsis thaliana
  misc_feature (1)..(1512): Ceres Seq. ID no. 13487654
  misc_feature: MA Experiment ID: 108434 Result: Down-regulated in Transcription
  misc_feature: MA Experiment 108434 PARAMETER Experiment Name: At_Root_Tips_cDNA_P Parameter: Tissue Value: Root Tips
  misc_feature: MA Experiment ID: 108461 Result: Up-regulated in Transcription
  misc_feature: MA Experiment 108461 PARAMETER Experiment Name: At_Germinating_Seeds_cDNA_P Parameter: Age (day) Value: 1 vs. 0
  misc_feature: MA Experiment 108461 PARAMETER Experiment Name: At_Germinating_Seeds_cDNA_P Parameter: Tissue Value: Germinating Seeds
  misc_feature: MA Experiment ID: 108463 Result: Up-regulated in Transcription
  misc_feature: MA Experiment 108463 PARAMETER Experiment Name: At_Germinating_Seeds_cDNA_P Parameter: Age (day) Value: 3 vs. 0
  misc_feature: MA Experiment 108463 PARAMETER Experiment Name: At_Germinating_Seeds_cDNA_P Parameter: Tissue Value: Germinating Seeds
  misc_feature: MA Experiment ID: 108464 Result: Up-regulated in Transcription
  misc_feature: MA Experiment 108464 PARAMETER Experiment Name: At_Germinating_Seeds_cDNA_P Parameter: Age (day) Value: 4 vs. 0
  misc_feature: MA Experiment 108464 PARAMETER Experiment Name: At_Germinating_Seeds_cDNA_P Parameter: Tissue Value: Germinating Seeds
  misc_feature: MA Experiment ID: 108474 Result: Down-regulated in Transcription
  misc_feature: MA Experiment 108474 PARAMETER Experiment Name: At_Drought_Flowers_cDNA_P Parameter: Timepoint (hr) Value: null
  misc_feature: MA Experiment 108474 PARAMETER Experiment Name: At_Drought_Flowers_cDNA_P Parameter: Treatment Value: Drought vs. No Drought
  misc_feature: MA Experiment ID: 108594 Result: Up-regulated in Transcription
  misc_feature: MA Experiment 108594 PARAMETER Experiment Name: At_Ler-rhl_Root_cDNA_P Parameter: Plant Line Value: null
  misc_feature: MA Experiment ID: 108668 Result: Down-regulated in Transcription
  misc_feature: MA Experiment 108668 PARAMETER Experiment Name: At_2mM_SA_cDNA_P Parameter: Plant Line Value: WS
  misc_feature: MA Experiment 108668 PARAMETER Experiment Name: At_2mM_SA_cDNA_P Parameter: Timepoint (hr) Value: 6
  misc_feature: MA Experiment 108668 PARAMETER Experiment Name: At_2mM_SA_cDNA_P Parameter: Treatment Value: 2mM SA vs. No Treatment
  misc_feature: MA Experiment ID: 20000184 Result: Up-regulated in Transcription
  misc_feature: MA Experiment 20000184 PARAMETER Experiment Name: At_Shoots__P Parameter: Age (day) Value: 7
  misc_feature: MA Experiment 20000184 PARAMETER Experiment Name: At_Shoots__P Parameter: Tissue Value: Shoots vs. Whole Plant
  misc_feature: MA Experiment ID: 20000185 Result: Up-regulated in Transcription
  misc_feature: MA Experiment 20000185 PARAMETER Experiment Name: At_Roots__P Parameter: Age (day) Value: 7 vs. 21
  misc_feature: MA Experiment 20000185 PARAMETER Experiment Name: At_Roots__P Parameter: Organism Value: A. thaliana
  misc_feature: MA Experiment 20000185 PARAMETER Experiment Name: At_Roots__P Parameter: Tissue Value: Roots vs. Whole Plant
  misc_feature: MA Experiment ID: 20000264 Result: Down-regulated in Transcription
  misc_feature: MA Experiment 20000264 PARAMETER Experiment Name: At_Open_Flower_P Parameter: Age (day) Value: 21
  misc_feature: MA Experiment 20000264 PARAMETER Experiment Name: At_Open_Flower_P Parameter: Plant Line Value: WS
  misc_feature: MA Experiment 20000264 PARAMETER Experiment Name: At_Open_Flower_P Parameter: Tissue Value: Open Flower vs. Whole Plant
  misc_feature: MA Experiment ID: 20000437 Result: Up-regulated in Transcription
  misc_feature: MA Experiment 20000437 PARAMETER Experiment Name: At_Drought_P Parameter: Age (day) Value: 8
  misc_feature: MA Experiment 20000437 PARAMETER Experiment Name: At_Drought_P Parameter: Organism Value: A. thaliana
  misc_feature: MA Experiment 20000437 PARAMETER Experiment Name: At_Drought_P Parameter: Plant Line Value: WS
  misc_feature: MA Experiment 20000437 PARAMETER Experiment Name: At_Drought_P Parameter: Timepoint (hr) Value: 24
  misc_feature: MA Experiment 20000437 PARAMETER Experiment Name: At_Drought_P Parameter: Tissue Value: Whole Plant
  misc_feature: MA Experiment 20000437 PARAMETER Experiment Name: At_Drought_P Parameter: Treatment Value: Drought vs. No Drought
  misc_feature: MA Experiment ID: 20000439 Result: Up-regulated in Transcription
  misc_feature: MA Experiment 20000439 PARAMETER Experiment Name: At_Roots__P Parameter: Age (day) Value: 14 vs. 21
  misc_feature: MA Experiment 20000439 PARAMETER Experiment Name: At_Roots__P Parameter: Organism Value: A. thaliana
  misc_feature: MA Experiment 20000439 PARAMETER Experiment Name: At_Roots__P Parameter: Tissue Value: Roots vs. Whole Plant
  misc_feature: MA Experiment ID: 20000451 Result: Down-regulated in Transcription
  misc_feature: MA Experiment 20000451 PARAMETER Experiment Name: At_CS6879_Shoots-Roots_P Parameter: Age (day) Value: 14
  misc_feature: MA Experiment 20000451 PARAMETER Experiment Name: At_CS6879_Shoots-Roots_P Parameter: Organism Value: A. thaliana
  misc_feature: MA Experiment 20000451 PARAMETER Experiment Name: At_CS6879_Shoots-Roots_P Parameter: Plant Line Value: CS6879 vs. WS
  misc_feature: MA Experiment 20000451 PARAMETER Experiment Name: At_CS6879_Shoots-Roots_P Parameter: Tissue Value: Roots
  misc_feature: MA Experiment ID: 20001910 Result: Down-regulated in Transcription
  misc_feature: MA Experiment 20001910 PARAMETER Experiment Name: At_Drought_Reproduction_P Parameter: Age (day) Value: 37
  misc_feature: MA Experiment 20001910 PARAMETER Experiment Name: At_Drought_Reproduction_P Parameter: Organism Value: A. thaliana
  misc_feature: MA Experiment 20001910 PARAMETER Experiment Name: At_Drought_Reproduction_P Parameter: Plant Line Value: WS
  misc_feature: MA Experiment 20001910 PARAMETER Experiment Name: At_Drought_Reproduction_P Parameter: Timepoint (day) Value: 7
  misc_feature: MA Experiment 20001910 PARAMETER Experiment Name: At_Drought_Reproduction_P Parameter: Tissue Value: Flowers
  misc_feature: MA Experiment 20001910 PARAMETER Experiment Name: At_Drought_Reproduction_P Parameter: Treatment Value: Drought vs. No Drought
tggcatgtgatatagaaatcaagatgggaagccaaggcatgagttcaccgagtcccttggtggtgaagaaatcgcaagtggttatagtgaaaccctcaaaggctacacctgatgtctctctttctctctccacactcgacaacgatccttatctcgaaaccctcgccaaaaccatctatgtctacgctccaccatccccaaacgaccacgtccacgatccagcttccctttttcagcaagctctctctgacgcccttgtctattactaccctctcgctggaaaacttcaccggggatcacacgaccatagactagaattgaggtgcagtcccgcggaaggagtcccctttgttagggcaaccgcagactgtactctctcttccctcaactatttgaaggacatggacactgacttataccaactcgtaccttgtgatgtagctgcgccctctggcgattacaaccctctggctttgcagatcactttgtttgcatgcggagggctcactcttgctacggccctctctcattccttgtgtgatggttttggagcgtctcagtttttcaaaaccttaactgagctcgccgcgggaaaaacacaacctagcatcatccccgtctgggacagacatcgtctcacttctaacaactttagcttaaacgaccaagtggaggagggacaagctcccaagctagttgattttggagaggcttgctcttctgcggcaacttctccctacacacccagcaacgacatggtatgtgagatcctcaacgtgacatccgaagatattactcagctcaaggagaaagttgcgggggtggtcacgactctagagattcttgcggcccacgtctggagagcaaggtgccgggccttgaagttaagtccagatgggacttctcttttcggaatggctgtgggtatacgccgcattgtggagccaccattaccggaagggtactacggaaacgcatttgtcaaagccaacgtagcaatgaaggctggagagttaagcaactcaccgttgtctcacgttgttcagctcattaaagaggcaaagaaagcggcacaggagaagaggtacgtgttggagcagttaagagagacagagaaaacgttgaagatgaatgtagcgtgtgaaggagggaaaggagcgttcatgttgcttactgattggaggcaacttggattgctagacgaaattgattttgggtatggaggatcagtgaatattataccattggtgcccaagtatctgccggatatttgtattttcttgccgaggaagcaaggtggtgttagagtgctagtcacgctgcccaaatctgtaatggtcaacttcaaggaacacataaatcccctaaatacatgaaattaataagcaggtgaatgtaattcacagtgtttctttaaaatatgaaaaggacctcatgcgattgtatatttaaagcttttgtttgctgtttgtttaagtttttcacatttggaaagtaatattttacaaaccg

SEQ ID NO: 30323 - protein, 457 aa, Arabidopsis thaliana
  peptide (1)..(457): Ceres Seq. ID no. 13487655
  misc_feature (19)..(455): Pfam Name: Transferase family Pfam Description: Transferase family
  misc_feature (21)..(449): Homolog of NCBI NO: 28558088 NR Description: 3'-N-debenzoyl-2'-deoxytaxol N-benzoyltransferase
  misc_feature (25)..(455): Homolog of NCBI NO: 10798748 NR Description: elicitor inducible gene product EIG-I24
  misc_feature (24)..(450): Homolog of NCBI NO: 25403354 NR Description: protein F1K23.12 [imported] - Arabidopsis
  misc_feature (24)..(450): Homolog of NCBI NO: 15218757 NR Description: transferase family [Arabidopsis thaliana]
  misc_feature (18)..(452): Homolog of NCBI NO: 15224685 NR Description: transferase family [Arabidopsis thaliana]
  misc_feature (13)..(455): Homolog of NCBI NO: 15227845 NR Description: transferase family [Arabidopsis thaliana]
  misc_feature (427)..(453): Homolog of NCBI NO: 15232745 NR Description: acyltransferase family [Arabidopsis thaliana]
  misc_feature (18)..(418): Homolog of NCBI NO: 15232745 NR Description: acyltransferase family [Arabidopsis thaliana]
  misc_feature (8)..(457): Homolog of NCBI NO: 21553850 NR Description: hypersensitivity-related protein-like protein
  misc_feature (8)..(457): Homolog of NCBI NO: 15240694 NR Description: transferase family [Arabidopsis thaliana]
ACDIEIKMGSQGMSSPSPLVVKKSQVVIVKPSKATPDVSLSLSTLDNDPYLETLAKTIYVYAPPSPNDHVHDPASLFQQALSDALVYYYPLAGKLHRGSHDHRLELRCSPAEGVPFVRATADCTLSSLNYLKDMDTDLYQLVPCDVAAPSGDYNPLALQITLFACGGLTLATALSHSLCDGFGASQFFKTLTELAAGKTQPSIIPVWDRHRLTSNNFSLNDQVEEGQAPKLVDFGEACSSAATSPYTPSNDMVCEILNVTSEDITQLKEKVAGVVTTLEILAAHVWRARCRALKLSPDGTSLFGMAVGIRRIVEPPLPEGYYGNAFVKANVAMKAGELSNSPLSHVVQLIKEAKKAAQEKRYVLEQLRETEKTLKMNVACEGGKGAFMLLTDWRQLGLLDEIDFGYGGSVNIIPLVPKYLPDICIFLPRKQGGVRVLVTLPKSVMVNFKEHINPLNT

SEQ ID NO: 30324 - protein, 450 aa, Arabidopsis thaliana
  peptide (1)..(450): Ceres Seq. ID no. 13487656
  misc_feature (12)..(448): Pfam Name: Transferase family Pfam Description: Transferase family
  misc_feature (14)..(442): Homolog of NCBI NO: 28558088 NR Description: 3'-N-debenzoyl-2'-deoxytaxol N-benzoyltransferase
  misc_feature (18)..(448): Homolog of NCBI NO: 10798748 NR Description: elicitor inducible gene product EIG-I24
  misc_feature (17)..(443): Homolog of NCBI NO: 25403354 NR Description: protein F1K23.12 [imported] - Arabidopsis
  misc_feature (17)..(443): Homolog of NCBI NO: 15218757 NR Description: transferase family [Arabidopsis thaliana]
  misc_feature (11)..(445): Homolog of NCBI NO: 15224685 NR Description: transferase family [Arabidopsis thaliana]
  misc_feature (6)..(448): Homolog of NCBI NO: 15227845 NR Description: transferase family [Arabidopsis thaliana]
  misc_feature (420)..(446): Homolog of NCBI NO: 15232745 NR Description: acyltransferase family [Arabidopsis thaliana]
  misc_feature (11)..(411): Homolog of NCBI NO: 15232745 NR Description: acyltransferase family [Arabidopsis thaliana]
  misc_feature (1)..(450): Homolog of NCBI NO: 21553850 NR Description: hypersensitivity-related protein-like protein
  misc_feature (1)..(450): Homolog of NCBI NO: 15240694 NR Description: transferase family [Arabidopsis thaliana]
MGSQGMSSPSPLVVKKSQVVIVKPSKATPDVSLSLSTLDNDPYLETLAKTIYVYAPPSPNDHVHDPASLFQQALSDALVYYYPLAGKLHRGSHDHRLELRCSPAEGVPFVRATADCTLSSLNYLKDMDTDLYQLVPCDVAAPSGDYNPLALQITLFACGGLTLATALSHSLCDGFGASQFFKTLTELAAGKTQPSIIPVWDRHRLTSNNFSLNDQVEEGQAPKLVDFGEACSSAATSPYTPSNDMVCEILNVTSEDITQLKEKVAGVVTTLEILAAHVWRARCRALKLSPDGTSLFGMAVGIRRIVEPPLPEGYYGNAFVKANVAMKAGELSNSPLSHVVQLIKEAKKAAQEKRYVLEQLRETEKTLKMNVACEGGKGAFMLLTDWRQLGLLDEIDFGYGGSVNIIPLVPKYLPDICIFLPRKQGGVRVLVTLPKSVMVNFKEHINPLNT

SEQ ID NO: 30325 - protein, 445 aa, Arabidopsis thaliana
  peptide (1)..(445): Ceres Seq. ID no. 13487657
  misc_feature (7)..(443): Pfam Name: Transferase family Pfam Description: Transferase family
  misc_feature (9)..(437): Homolog of NCBI NO: 28558088 NR Description: 3'-N-debenzoyl-2'-deoxytaxol N-benzoyltransferase
  misc_feature (13)..(443): Homolog of NCBI NO: 10798748 NR Description: elicitor inducible gene product EIG-I24
  misc_feature (12)..(438): Homolog of NCBI NO: 25403354 NR Description: protein F1K23.12 [imported] - Arabidopsis
  misc_feature (12)..(438): Homolog of NCBI NO: 15218757 NR Description: transferase family [Arabidopsis thaliana]
  misc_feature (6)..(440): Homolog of NCBI NO: 15224685 NR Description: transferase family [Arabidopsis thaliana]
  misc_feature (1)..(443): Homolog of NCBI NO: 15227845 NR Description: transferase family [Arabidopsis thaliana]
  misc_feature (415)..(441): Homolog of NCBI NO: 15232745 NR Description: acyltransferase family [Arabidopsis thaliana]
  misc_feature (6)..(406): Homolog of NCBI NO: 15232745 NR Description: acyltransferase family [Arabidopsis thaliana]
  misc_feature (1)..(445): Homolog of NCBI NO: 21553850 NR Description: hypersensitivity-related protein-like protein
  misc_feature (1)..(445): Homolog of NCBI NO: 15240694 NR Description: transferase family [Arabidopsis thaliana]
MSSPSPLVVKKSQVVIVKPSKATPDVSLSLSTLDNDPYLETLAKTIYVYAPPSPNDHVHDPASLFQQALSDALVYYYPLAGKLHRGSHDHRLELRCSPAEGVPFVRATADCTLSSLNYLKDMDTDLYQLVPCDVAAPSGDYNPLALQITLFACGGLTLATALSHSLCDGFGASQFFKTLTELAAGKTQPSIIPVWDRHRLTSNNFSLNDQVEEGQAPKLVDFGEACSSAATSPYTPSNDMVCEILNVTSEDITQLKEKVAGVVTTLEILAAHVWRARCRALKLSPDGTSLFGMAVGIRRIVEPPLPEGYYGNAFVKANVAMKAGELSNSPLSHVVQLIKEAKKAAQEKRYVLEQLRETEKTLKMNVACEGGKGAFMLLTDWRQLGLLDEIDFGYGGSVNIIPLVPKYLPDICIFLPRKQGGVRVLVTLPKSVMVNFKEHINPLNT

SEQ ID NO: 30326 - DNA, 1190 bp, Arabidopsis thaliana
  misc_feature (1)..(1190): Ceres Seq. ID no. 12385283
  misc_feature: MA Experiment ID: 108463 Result: Down-regulated in Transcription
  misc_feature: MA Experiment 108463 PARAMETER Experiment Name: At_Germinating_Seeds_cDNA_P Parameter: Age (day) Value: 3 vs. 0
  misc_feature: MA Experiment 108463 PARAMETER Experiment Name: At_Germinating_Seeds_cDNA_P Parameter: Tissue Value: Germinating Seeds
  misc_feature: MA Experiment ID: 108464 Result: Down-regulated in Transcription
  misc_feature: MA Experiment 108464 PARAMETER Experiment Name: At_Germinating_Seeds_cDNA_P Parameter: Age (day) Value: 4 vs. 0
  misc_feature: MA Experiment 108464 PARAMETER Experiment Name: At_Germinating_Seeds_cDNA_P Parameter: Tissue Value: Germinating Seeds
  misc_feature: MA Experiment ID: 20000069 Result: Down-regulated in Transcription
  misc_feature: MA Experiment 20000069 PARAMETER Experiment Name: At_100uM_ABA_Mutants_cDNA_P Parameter: Plant Line Value: CS23
  misc_feature: MA Experiment 20000069 PARAMETER Experiment Name: At_100uM_ABA_Mutants_cDNA_P Parameter: Timepoint (hr) Value: 6
  misc_feature: MA Experiment 20000069 PARAMETER Experiment Name: At_100uM_ABA_Mutants_cDNA_P Parameter: Tissue Value: Aerial
  misc_feature: MA Experiment 20000069 PARAMETER Experiment Name: At_100uM_ABA_Mutants_cDNA_P Parameter: Treatment Value: 100uM ABA vs. No Treatment
  misc_feature: MA Experiment ID: 20000117 Result: Down-regulated in Transcription
  misc_feature: MA Experiment 20000117 PARAMETER Experiment Name: At_100uM_ABA_Mutants_cDNA_P Parameter: Plant Line Value: Columbia
  misc_feature: MA Experiment 20000117 PARAMETER Experiment Name: At_100uM_ABA_Mutants_cDNA_P Parameter: Timepoint (hr) Value: 6
  misc_feature: MA Experiment 20000117 PARAMETER Experiment Name: At_100uM_ABA_Mutants_cDNA_P Parameter: Tissue Value: Aerial
  misc_feature: MA Experiment 20000117 PARAMETER Experiment Name: At_100uM_ABA_Mutants_cDNA_P Parameter: Treatment Value: 100uM ABA vs. No Treatment
  misc_feature: MA Experiment ID: 20000184 Result: Up-regulated in Transcription
  misc_feature: MA Experiment 20000184 PARAMETER Experiment Name: At_Shoots__P Parameter: Age (day) Value: 7
  misc_feature: MA Experiment 20000184 PARAMETER Experiment Name: At_Shoots__P Parameter: Tissue Value: Shoots vs. Whole Plant
  misc_feature: MA Experiment ID: 20000224 Result: Down-regulated in Transcription
  misc_feature: MA Experiment ID: 20000794 Result: Down-regulated in Transcription
  misc_feature: MA Experiment 20000794 PARAMETER Experiment Name: At_Petals_P Parameter: Age (day) Value: 23-25 days
  misc_feature: MA Experiment 20000794 PARAMETER Experiment Name: At_Petals_P Parameter: Plant Line Value: WS
  misc_feature: MA Experiment 20000794 PARAMETER Experiment Name: At_Petals_P Parameter: Tissue Value: Petals vs. Whole plant
  misc_feature: MA Experiment ID: 20001558 Result: Up-regulated in Transcription
  misc_feature: MA Experiment 20001558 PARAMETER Experiment Name: At_Drought_Soil_Dry_P Parameter: Age (day) Value: 27
  misc_feature: MA Experiment 20001558 PARAMETER Experiment Name: At_Drought_Soil_Dry_P Parameter: Organism Value: A. thaliana
  misc_feature: MA Experiment 20001558 PARAMETER Experiment Name: At_Drought_Soil_Dry_P Parameter: Plant Line Value: WS
  misc_feature: MA Experiment 20001558 PARAMETER Experiment Name: At_Drought_Soil_Dry_P Parameter: Post Timepoint (hr) Value: 6
  misc_feature: MA Experiment 20001558 PARAMETER Experiment Name: At_Drought_Soil_Dry_P Parameter: Post-Treatment Value: Re-Water vs. No Drought
  misc_feature: MA Experiment 20001558 PARAMETER Experiment Name: At_Drought_Soil_Dry_P Parameter: Timepoint (day) Value: 13
  misc_feature: MA Experiment 20001558 PARAMETER Experiment Name: At_Drought_Soil_Dry_P Parameter: Treatment Value: Drought vs. No Drought
  misc_feature: MA Experiment ID: 20001757 Result: Up-regulated in Transcription
  misc_feature: MA Experiment 20001757 PARAMETER Experiment Name: At_50mM_NH4NO3_L-to-H_P Parameter: Timepoint (hr) Value: 6
  misc_feature: MA Experiment 20001757 PARAMETER Experiment Name: At_50mM_NH4NO3_L-to-H_P Parameter: Tissue Value: Leaf
  misc_feature: MA Experiment 20001757 PARAMETER Experiment Name: At_50mM_NH4NO3_L-to-H_P Parameter: Treatment Value: 50mM NH4NO3 vs 100mM Mannitol
agaaaccctaaaaatccttattgtagcagctggagcaatatatatcccaatttgccgcaactagggttttctcttcctcacgcaaagcaatacatcgcagtctcccactgattcagcagctctttgaactactcttcgacaatggccgaacgtggtggagaacgtggtgttgagcgtggtggagaacgtggtgatttcggacgaggattcggaggccgtggaggtcgtggagatcgtggagggcgtggacgtggaggccgtggtggtcgtcgtggagggcgtgccagtgaagaagagaaatgggttccagtgaccaagcttggtcgtctcgtggcggctggtcatatcaagcagatagagcagatctatcttcattcactcccggttaaggagtaccagatcattgatatgctcatcggtccaacattgaaggatgaggtaatgaaaatcatgccggttcagaaacaaaccagggctggtcaaaggactagattcaaggcctttgttgtcgttggagatggtaatggtcatgttgggttgggagtgaaatgctctaaggaagttgctacggccattagaggagcgattattctcgctaagctgtctgttgttccagtgaggagaggttactggggtaacaagattgggaagccacatacggttccttgtaaggtgactgggaagtgtggatctgtgacagtgaggatggttccagctcctagaggttctggtattgtggctgctagagttcctaagaaggttcttcaattcgctggaattgatgatgttttcacttcctccaggggatccaccaaaactcttggaaacttcgtcaaggctacattcgattgccttcagaagacttacggattccttaccccagagttctggaaggagacaagattctctagatcaccataccaagagcacactgatttcctggcgtccaaggctctttcgaccagcaaacccgacccagtggttgaagaccaagcctaaacaatgcttccaccttgtgttctttttggattataatccttcatgagttaattttggttgaacctttggtagtatatgttgctggattgtgcaccttctgttttcatctcctcttccaaactactttatttttgcttatggatcttaatgttctagttttgcttttacttttgttgagaaaagttaaatcc

SEQ ID NO: 30327 - protein, 285 aa, Arabidopsis thaliana
  peptide (1)..(285): Ceres Seq. ID no. 12385284
  misc_feature (178)..(251): Pfam Name: Ribosomal protein S5, C-terminal domain Pfam Description: Ribosomal protein S5, C-terminal domain
  misc_feature (1)..(282): Homolog of NCBI NO: 30103021 NR Description: putative 40S ribosomal protein S2
  misc_feature (1)..(282): Homolog of NCBI NO: 34393314 NR Description: putative 40S ribosomal protein S2
  misc_feature (7)..(267): Homolog of NCBI NO: 15230312 NR Description: 40S ribosomal protein S2 homolog
  misc_feature (3)..(285): Homolog of NCBI NO: 25294520 NR Description: hypothetical protein RF12
  misc_feature (1)..(285): Homolog of NCBI NO: 21539457 NR Description: ribosomal protein S2, putative [Arabidopsis
  misc_feature (1)..(285): Homolog of NCBI NO: 21618011 NR Description: ribosomal protein S2, putative [Arabidopsis
  misc_feature (1)..(285): Homolog of NCBI NO: 15217951 NR Description: ribosomal protein S2, putative; protein id:
  misc_feature (1)..(285): Homolog of NCBI NO: 18406325 NR Description: ribosomal protein S2, putative
  misc_feature (1)..(285): Homolog of NCBI NO: 21553851 NR Description: 40S ribosomal protein S2 [Arabidopsis thaliana]
  misc_feature (1)..(285): Homolog of NCBI NO: 15227443 NR Description: 40S ribosomal protein S2
MAERGGERGVERGGERGDFGRGFGGRGGRGDRGGRGRGGRGGRRGGRASEEEKWVPVTKLGRLVAAGHIKQIEQIYLHSLPVKEYQIIDMLIGPTLKDEVMKIMPVQKQTRAGQRTRFKAFVVVGDGNGHVGLGVKCSKEVATAIRGAIILAKLSVVPVRRGYWGNKIGKPHTVPCKVTGKCGSVTVRMVPAPRGSGIVAARVPKKVLQFAGIDDVFTSSRGSTKTLGNFVKATFDCLQKTYGFLTPEFWKETRFSRSPYQEHTDFLASKALSTSKPDPVVEDQA

SEQ ID NO: 30328 - protein, 196 aa, Arabidopsis thaliana
  peptide (1)..(196): Ceres Seq. ID no. 12385285
  misc_feature (89)..(162): Pfam Name: Ribosomal protein S5, C-terminal domain Pfam Description: Ribosomal protein S5, C-terminal domain
  misc_feature (1)..(193): Homolog of NCBI NO: 30103021 NR Description: putative 40S ribosomal protein S2
  misc_feature (1)..(193): Homolog of NCBI NO: 34393314 NR Description: putative 40S ribosomal protein S2
  misc_feature (1)..(178): Homolog of NCBI NO: 15230312 NR Description: 40S ribosomal protein S2 homolog
  misc_feature (1)..(196): Homolog of NCBI NO: 25294520 NR Description: hypothetical protein RF12
  misc_feature (1)..(196): Homolog of NCBI NO: 21539457 NR Description: ribosomal protein S2, putative [Arabidopsis
  misc_feature (1)..(196): Homolog of NCBI NO: 21618011 NR Description: ribosomal protein S2, putative [Arabidopsis
  misc_feature (1)..(196): Homolog of NCBI NO: 15217951 NR Description: ribosomal protein S2, putative; protein id:
  misc_feature (1)..(196): Homolog of NCBI NO: 18406325 NR Description: ribosomal protein S2, putative
  misc_feature (1)..(196): Homolog of NCBI NO: 21553851 NR Description: 40S ribosomal protein S2 [Arabidopsis thaliana]
  misc_feature (1)..(196): Homolog of NCBI NO: 15227443 NR Description: 40S ribosomal protein S2
MLIGPTLKDEVMKIMPVQKQTRAGQRTRFKAFVVVGDGNGHVGLGVKCSKEVATAIRGAIILAKLSVVPVRRGYWGNKIGKPHTVPCKVTGKCGSVTVRMVPAPRGSGIVAARVPKKVLQFAGIDDVFTSSRGSTKTLGNFVKATFDCLQKTYGFLTPEFWKETRFSRSPYQEHTDFLASKALSTSKPDPVVEDQA

SEQ ID NO: 30329 - protein, 185 aa, Arabidopsis thaliana
  peptide (1)..(185): Ceres Seq. ID no. 12385286
  misc_feature (78)..(151): Pfam Name: Ribosomal protein S5, C-terminal domain Pfam Description: Ribosomal protein S5, C-terminal domain
  misc_feature (1)..(182): Homolog of NCBI NO: 30103021 NR Description: putative 40S ribosomal protein S2
  misc_feature (1)..(182): Homolog of NCBI NO: 34393314 NR Description: putative 40S ribosomal protein S2
  misc_feature (1)..(167): Homolog of NCBI NO: 15230312 NR Description: 40S ribosomal protein S2 homolog
  misc_feature (1)..(185): Homolog of NCBI NO: 25294520 NR Description: hypothetical protein RF12
  misc_feature (1)..(185): Homolog of NCBI NO: 21539457 NR Description: ribosomal protein S2, putative [Arabidopsis
  misc_feature (1)..(185): Homolog of NCBI NO: 21618011 NR Description: ribosomal protein S2, putative [Arabidopsis
  misc_feature (1)..(185): Homolog of NCBI NO: 15217951 NR Description: ribosomal protein S2, putative; protein id:
  misc_feature (1)..(185): Homolog of NCBI NO: 18406325 NR Description: ribosomal protein S2, putative
  misc_feature (1)..(185): Homolog of NCBI NO: 21553851 NR Description: 40S ribosomal protein S2 [Arabidopsis thaliana]
  misc_feature (1)..(185): Homolog of NCBI NO: 15227443 NR Description: 40S ribosomal protein S2
MKIMPVQKQTRAGQRTRFKAFVVVGDGNGHVGLGVKCSKEVATAIRGAIILAKLSVVPVRRGYWGNKIGKPHTVPCKVTGKCGSVTVRMVPAPRGSGIVAARVPKKVLQFAGIDDVFTSSRGSTKTLGNFVKATFDCLQKTYGFLTPEFWKETRFSRSPYQEHTDFLASKALSTSKPDPVVEDQA

SEQ ID NO: 30330 - DNA, 821 bp, Arabidopsis thaliana
  misc_feature (1)..(821): Ceres Seq. ID no. 12482404
  misc_feature: MA Experiment ID: 108434 Result: Down-regulated in Transcription
  misc_feature: MA Experiment 108434 PARAMETER Experiment Name: At_Root_Tips_cDNA_P Parameter: Tissue Value: Root Tips
  misc_feature: MA Experiment ID: 108461 Result: Up-regulated in Transcription
  misc_feature: MA Experiment 108461 PARAMETER Experiment Name: At_Germinating_Seeds_cDNA_P Parameter: Age (day) Value: 1 vs. 0
  misc_feature: MA Experiment 108461 PARAMETER Experiment Name: At_Germinating_Seeds_cDNA_P Parameter: Tissue Value: Germinating Seeds
  misc_feature: MA Experiment ID: 108464 Result: Up-regulated in Transcription
  misc_feature: MA Experiment 108464 PARAMETER Experiment Name: At_Germinating_Seeds_cDNA_P Parameter: Age (day) Value: 4 vs. 0
  misc_feature: MA Experiment 108464 PARAMETER Experiment Name: At_Germinating_Seeds_cDNA_P Parameter: Tissue Value: Germinating Seeds
  misc_feature: MA Experiment ID: 108594 Result: Down-regulated in Transcription
  misc_feature: MA Experiment 108594 PARAMETER Experiment Name: At_Ler-rhl_Root_cDNA_P Parameter: Plant Line Value: null
  misc_feature: MA Experiment ID: 108595 Result: Down-regulated in Transcription
  misc_feature: MA Experiment 108595 PARAMETER Experiment Name: At_Ler-pi_Ovule_cDNA_P Parameter: Plant Line Value: null
  misc_feature: MA Experiment ID: 20000185 Result: Up-regulated in Transcription
  misc_feature: MA Experiment 20000185 PARAMETER Experiment Name: At_Roots__P Parameter: Age (day) Value: 7 vs. 21
  misc_feature: MA Experiment 20000185 PARAMETER Experiment Name: At_Roots__P Parameter: Organism Value: A. thaliana
  misc_feature: MA Experiment 20000185 PARAMETER Experiment Name: At_Roots__P Parameter: Tissue Value: Roots vs. Whole Plant
  misc_feature: MA Experiment ID: 20000227 Result: Down-regulated in Transcription
  misc_feature: MA Experiment 20000227 PARAMETER Experiment Name: At_Root-Tips-vs-Tops_P Parameter: Tissue Value: Root Tips vs. Root Tops
  misc_feature: MA Experiment ID: 20000439 Result: Up-regulated in Transcription
  misc_feature: MA Experiment 20000439 PARAMETER Experiment Name: At_Roots__P Parameter: Age (day) Value: 14 vs. 21
  misc_feature: MA Experiment 20000439 PARAMETER Experiment Name: At_Roots__P Parameter: Organism Value: A. thaliana
  misc_feature: MA Experiment 20000439 PARAMETER Experiment Name: At_Roots__P Parameter: Tissue Value: Roots vs. Whole Plant
  misc_feature: MA Experiment ID: 20000495 Result: Down-regulated in Transcription
  misc_feature: MA Experiment 20000495 PARAMETER Experiment Name: At_Guard_Cells_P Parameter: Harvest Date Value: 8/2/2002
  misc_feature: MA Experiment 20000495 PARAMETER Experiment Name: At_Guard_Cells_P Parameter: Organism Value: A. thaliana
  misc_feature: MA Experiment 20000495 PARAMETER Experiment Name: At_Guard_Cells_P Parameter: Tissue Value: Guard Cells vs. Leaves
  misc_feature: MA Experiment ID: 20000496 Result: Down-regulated in Transcription
  misc_feature: MA Experiment 20000496 PARAMETER Experiment Name: At_Guard_Cells_P Parameter: Harvest Date Value: 7/19/2002
  misc_feature: MA Experiment 20000496 PARAMETER Experiment Name: At_Guard_Cells_P Parameter: Organism Value: Canola
  misc_feature: MA Experiment 20000496 PARAMETER Experiment Name: At_Guard_Cells_P Parameter: Tissue Value: Guard Cells vs. Leaves
  misc_feature: MA Experiment ID: 20001451 Result: Down-regulated in Transcription
  misc_feature: MA Experiment 20001451 PARAMETER Experiment Name: At_Far-red-induction_P Parameter: Age (day) Value: 7
  misc_feature: MA Experiment 20001451 PARAMETER Experiment Name: At_Far-red-induction_P Parameter: Light Value: Far-red vs. White
  misc_feature: MA Experiment 20001451 PARAMETER Experiment Name: At_Far-red-induction_P Parameter: Organism Value: A. thaliana
  misc_feature: MA Experiment 20001451 PARAMETER Experiment Name: At_Far-red-induction_P Parameter: Plant Line Value: Columbia
  misc_feature: MA Experiment 20001451 PARAMETER Experiment Name: At_Far-red-induction_P Parameter: Timepoint (hr) Value: 24
  misc_feature: MA Experiment 20001451 PARAMETER Experiment Name: At_Far-red-induction_P Parameter: Tissue Value: Whole Plant
agtggactctctgtctttttatgtattccttcacctaatctctcatcctttcttcatcggtcaacattttctcaaactctctctaatccataaaaatggaagcagtaacggcgattaagccacttatcagagtcgctgctctctctggttctctccggaaaacctccttccatactggtctcctccgcgctgcgattgatttgacgaaagaatcggttccgggattgcaaattgagtatatagatatatcaccgttaccgttaattaacacggatcttgaagtcaacggtacttatcctccagttgttgaagctttccgacagaagattcttgaagctgatagtatcttgtttgcttctcctgagtataacttctctgtttcagctccacttaagaatgctcttgactgggcttcaagaccacctaatgtttgggcggacaaaccagctgctattataagcaccggtggaggttttggtggaggaagatcgcagtaccatcttcgacaaatcggagtcttccttgatcttcatttcatcaacaaacccgagtttactctcaatgcatttcagccacctcagaaatttgatgcagaaggaaaccttgtcgatgaagtgactaaggagaggttgaaacaagtccttctctcgttacaagcattcacacttcgacttcaaggtaagtaaatgaagtggattaattcttgatcatttgagattggtcgtgtgataaaaataatgccaattgttgtgataataaacagtgtataacactctatttctcattcatttatgttttattaaacgattggtgaactggtg

SEQ ID NO: 30331 - protein, 196 aa, Arabidopsis thaliana
  peptide (1)..(196): Ceres Seq. ID no. 12482405
  misc_feature (11)..(181): Pfam Name: NADPH-dependent FMN reductase Pfam Description: NADPH-dependent FMN reductase
  misc_feature (11)..(194): Homolog of NCBI NO: 26250454 NR Description: Hypothetical protein yieF [Escherichia coli
  misc_feature (11)..(194): Homolog of NCBI NO: 16767134 NR Description: putative oxidoreductase [Salmonella typhimurium
  misc_feature (1)..(194): Homolog of NCBI NO: 16762479 NR Description: conserved hypothetical protein
  misc_feature (11)..(186): Homolog of NCBI NO: 22406524 NR Description: hypothetical protein [Ferroplasma acidarmanus]
  misc_feature (11)..(195): Homolog of NCBI NO: 15596401 NR Description: conserved hypothetical protein [Pseudomonas
  misc_feature (1)..(196): Homolog of NCBI NO: 34906652 NR Description: putative NADPH:quinone oxidoreductase
  misc_feature (1)..(196): Homolog of NCBI NO: 34906648 NR Description: putative NADPH:quinone oxidoreductase
  misc_feature (6)..(196): Homolog of NCBI NO: 24745889 NR Description: NAD(P)H:quinone oxidoreductase [Solanum tuberosum]
  misc_feature (1)..(196): Homolog of NCBI NO: 5002232 NR Description: NADPH:quinone oxidoreductase [Arabidopsis
  misc_feature (1)..(196): Homolog of NCBI NO: 15232856 NR Description: NADPH:quinone oxidoreductase (NQR)
MEAVTAIKPLIRVAALSGSLRKTSFHTGLLRAAIDLTKESVPGLQIEYIDISPLPLINTDLEVNGTYPPVVEAFRQKILEADSILFASPEYNFSVSAPLKNALDWASRPPNVWADKPAAIISTGGGFGGGRSQYHLRQIGVFLDLHFINKPEFTLNAFQPPQKFDAEGNLVDEVTKERLKQVLLSLQAFTLRLQGK

SEQ ID NO: 30332 - DNA, 1033 bp, Arabidopsis thaliana
  misc_feature (1)..(1033): Ceres Seq. ID no. 12327338
  misc_feature: MA Experiment ID: 108461 Result: Up-regulated in Transcription
  misc_feature: MA Experiment 108461 PARAMETER Experiment Name: At_Germinating_Seeds_cDNA_P Parameter: Age (day) Value: 1 vs. 0
  misc_feature: MA Experiment 108461 PARAMETER Experiment Name: At_Germinating_Seeds_cDNA_P Parameter: Tissue Value: Germinating Seeds
  misc_feature: MA Experiment ID: 108462 Result: Up-regulated in Transcription
  misc_feature: MA Experiment 108462 PARAMETER Experiment Name: At_Germinating_Seeds_cDNA_P Parameter: Age (day) Value: 2 vs. 0
  misc_feature: MA Experiment 108462 PARAMETER Experiment Name: At_Germinating_Seeds_cDNA_P Parameter: Tissue Value: Germinating Seeds
  misc_feature: MA Experiment ID: 108463 Result: Up-regulated in Transcription
  misc_feature: MA Experiment 108463 PARAMETER Experiment Name: At_Germinating_Seeds_cDNA_P Parameter: Age (day) Value: 3 vs. 0
  misc_feature: MA Experiment 108463 PARAMETER Experiment Name: At_Germinating_Seeds_cDNA_P Parameter: Tissue Value: Germinating Seeds
  misc_feature: MA Experiment ID: 108464 Result: Up-regulated in Transcription
  misc_feature: MA Experiment 108464 PARAMETER Experiment Name: At_Germinating_Seeds_cDNA_P Parameter: Age (day) Value: 4 vs. 0
  misc_feature: MA Experiment 108464 PARAMETER Experiment Name: At_Germinating_Seeds_cDNA_P Parameter: Tissue Value: Germinating Seeds
  misc_feature: MA Experiment ID: 108595 Result: Down-regulated in Transcription
  misc_feature: MA Experiment 108595 PARAMETER Experiment Name: At_Ler-pi_Ovule_cDNA_P Parameter: Plant Line Value: null
  misc_feature: MA Experiment ID: 20000090 Result: Down-regulated in Transcription
  misc_feature: MA Experiment ID: 20000180 Result: Up-regulated in Transcription
  misc_feature: MA Experiment 20000180 PARAMETER Experiment Name: At_Germinating_Seeds_P Parameter: Age (hr) Value: 24 vs. 0
  misc_feature: MA Experiment 20000180 PARAMETER Experiment Name: At_Germinating_Seeds_P Parameter: Tissue Value: Germinating Seeds
  misc_feature: MA Experiment ID: 20000227 Result: Down-regulated in Transcription
  misc_feature: MA Experiment 20000227 PARAMETER Experiment Name: At_Root-Tips-vs-Tops_P Parameter: Tissue Value: Root Tips vs. Root Tops
  misc_feature: MA Experiment ID: 20000234 Result: Down-regulated in Transcription
  misc_feature: MA Experiment 20000234 PARAMETER Experiment Name: At_Siliques_P Parameter: Age (day) Value: 21
  misc_feature: MA Experiment 20000234 PARAMETER Experiment Name: At_Siliques_P Parameter: Organism Value: A. thaliana
  misc_feature: MA Experiment 20000234 PARAMETER Experiment Name: At_Siliques_P Parameter: Plant Line Value: WS
  misc_feature: MA Experiment 20000234 PARAMETER Experiment Name: At_Siliques_P Parameter: Tissue Value: Less Than 5mm Siliques vs. Whole Plant
  misc_feature: MA Experiment ID: 20000235 Result: Down-regulated in Transcription
  misc_feature: MA Experiment 20000235 PARAMETER Experiment Name: At_Siliques_P Parameter: Age (day) Value: 21
  misc_feature: MA Experiment 20000235 PARAMETER Experiment Name: At_Siliques_P Parameter: Organism Value: A. thaliana
  misc_feature: MA Experiment 20000235 PARAMETER Experiment Name: At_Siliques_P Parameter: Plant Line Value: WS
  misc_feature: MA Experiment 20000235 PARAMETER Experiment Name: At_Siliques_P Parameter: Tissue Value: 5-10mm Siliques vs. Whole Plant
  misc_feature: MA Experiment ID: 20000264 Result: Down-regulated in Transcription
  misc_feature: MA Experiment 20000264 PARAMETER Experiment Name: At_Open_Flower_P Parameter: Age (day) Value: 21
  misc_feature: MA Experiment 20000264 PARAMETER Experiment Name: At_Open_Flower_P Parameter: Plant Line Value: WS
  misc_feature: MA Experiment 20000264 PARAMETER Experiment Name: At_Open_Flower_P Parameter: Tissue Value: Open Flower vs. Whole Plant
  misc_feature: MA Experiment ID: 20000265 Result: Down-regulated in Transcription
  misc_feature: MA Experiment 20000265 PARAMETER Experiment Name: At_Open_Flower_P Parameter: Age (day) Value: 21
  misc_feature: MA Experiment 20000265 PARAMETER Experiment Name: At_Open_Flower_P Parameter: Plant Line Value: WS
  misc_feature: MA Experiment 20000265 PARAMETER Experiment Name: At_Open_Flower_P Parameter: Tissue Value: Closed Flower vs. Whole Plant
  misc_feature: MA Experiment ID: 20000286 Result: Down-regulated in Transcription
  misc_feature: MA Experiment 20000286 PARAMETER Experiment Name: At_Open_Flower_P Parameter: Age (day) Value: 21
  misc_feature: MA Experiment 20000286 PARAMETER Experiment Name: At_Open_Flower_P Parameter: Plant Line Value: WS
  misc_feature: MA Experiment 20000286 PARAMETER Experiment Name: At_Open_Flower_P Parameter: Tissue Value: Half Open vs. Whole Plant
  misc_feature: MA Experiment ID: 20000437 Result: Up-regulated in Transcription
  misc_feature: MA Experiment 20000437 PARAMETER Experiment Name: At_Drought_P Parameter: Age (day) Value: 8
  misc_feature: MA Experiment 20000437 PARAMETER Experiment Name: At_Drought_P Parameter: Organism Value: A. thaliana
  misc_feature: MA Experiment 20000437 PARAMETER Experiment Name: At_Drought_P Parameter: Plant Line Value: WS
  misc_feature: MA Experiment 20000437 PARAMETER Experiment Name: At_Drought_P Parameter: Timepoint (hr) Value: 24
  misc_feature: MA Experiment 20000437 PARAMETER Experiment Name: At_Drought_P Parameter: Tissue Value: Whole Plant
  misc_feature: MA Experiment 20000437 PARAMETER Experiment Name: At_Drought_P Parameter: Treatment Value: Drought vs. No Drought
  misc_feature: MA Experiment ID: 20000439 Result: Down-regulated in Transcription
  misc_feature: MA Experiment 20000439 PARAMETER Experiment Name: At_Roots__P Parameter: Age (day) Value: 14 vs. 21
  misc_feature: MA Experiment 20000439 PARAMETER Experiment Name: At_Roots__P Parameter: Organism Value: A. thaliana
  misc_feature: MA Experiment 20000439 PARAMETER Experiment Name: At_Roots__P Parameter: Tissue Value: Roots vs. Whole Plant
  misc_feature: MA Experiment ID: 20000496 Result: Down-regulated in Transcription
  misc_feature: MA Experiment 20000496 PARAMETER Experiment Name: At_Guard_Cells_P Parameter: Harvest Date Value: 7/19/2002
  misc_feature: MA Experiment 20000496 PARAMETER Experiment Name: At_Guard_Cells_P Parameter: Organism Value: Canola
  misc_feature: MA Experiment 20000496 PARAMETER Experiment Name: At_Guard_Cells_P Parameter: Tissue Value: Guard Cells vs. Leaves
  misc_feature: MA Experiment ID: 20000794 Result: Down-regulated in Transcription
  misc_feature: MA Experiment 20000794 PARAMETER Experiment Name: At_Petals_P Parameter: Age (day) Value: 23-25 days
  misc_feature: MA Experiment 20000794 PARAMETER Experiment Name: At_Petals_P Parameter: Plant Line Value: WS
  misc_feature: MA Experiment 20000794 PARAMETER Experiment Name: At_Petals_P Parameter: Tissue Value: Petals vs. Whole plant
  misc_feature: MA Experiment ID: 20001451 Result: Up-regulated in Transcription
  misc_feature: MA Experiment 20001451 PARAMETER Experiment Name: At_Far-red-induction_P Parameter: Age (day) Value: 7
  misc_feature: MA Experiment 20001451 PARAMETER Experiment Name: At_Far-red-induction_P Parameter: Light Value: Far-red vs. White
  misc_feature: MA Experiment 20001451 PARAMETER Experiment Name: At_Far-red-induction_P Parameter: Organism Value: A. thaliana
  misc_feature: MA Experiment 20001451 PARAMETER Experiment Name: At_Far-red-induction_P Parameter: Plant Line Value: Columbia
  misc_feature: MA Experiment 20001451 PARAMETER Experiment Name: At_Far-red-induction_P Parameter: Timepoint (hr) Value: 24
  misc_feature: MA Experiment 20001451 PARAMETER Experiment Name: At_Far-red-induction_P Parameter: Tissue Value: Whole Plant
  misc_feature: MA Experiment ID: 20001757 Result: Up-regulated in Transcription
  misc_feature: MA Experiment 20001757 PARAMETER Experiment Name: At_50mM_NH4NO3_L-to-H_P Parameter: Timepoint (hr) Value: 6
  misc_feature: MA Experiment 20001757 PARAMETER Experiment Name: At_50mM_NH4NO3_L-to-H_P Parameter: Tissue Value: Leaf
  misc_feature: MA Experiment 20001757 PARAMETER Experiment Name: At_50mM_NH4NO3_L-to-H_P Parameter: Treatment Value: 50mM NH4NO3 vs 100mM Mannitol
agttctcagtttgtcaccatcctcgagcagcttttgagctttgaaggttcgaaaatggatcgaattgcgtctgcgactttctcttgccctgcgatttcattgtcccgcgtctgtagaatcagcccttttggcttaaacattaaaaccaaccatagaaagagattctcgtgtcgagtagctgtagcttctggagagacttcggccagggtcgtcgtcgacaatgaacttgacttagaacacaagaaacacgatctactgagagctgttcaagacactcaacgaggactcactgccacttctgatcaacgatctatcattgaggaggctctggtgactgtggaagggtttaatggcggtgaagaaattgatccagtgaagttagatggaacatggaggctacaatatacatctgcacctgatgttgttgttctgtttgaagctgcttcaagacttcccttctttcaggtagggcaggtctttcagaagtttgagtgcagagatagatccgacggtgggatcattcggaatgttgttcagtggagtcttccaagcttgttggaggagcaagaaggtgcaacacttgttgttaccgcgaaatttgataaggtctctagtcgaaacatctaccttcagtttgaagagataagtgttagaaacattaacatcaatgagcagcttcaagctcttatcgcacctgcaatacttccacgctcatttctaagcctacagcttttgcagtttatccgtactttcaaagctcagattccagtaaacgcaaccagcccaggaaggagatctgtaggtggattgtattacctatcgtatctcgataacaacatgcttttgggacggtctgtaggaggaggaggagtatttgtctttacaaaatctcaacccctcgagctgtgagcatcagacaaatctataaaactctgtttttgactgtataatcacagaaaaaagaagaacattatgttagcagattctgtttatgtacaatctattcgggttttattgaagatcttgtacaatt

SEQ ID NO: 30333 - protein, 302 aa, Arabidopsis thaliana
  peptide (1)..(302): Ceres Seq. ID no. 12327339
  misc_feature (79)..(295): Pfam Name: PAP_fibrillin Pfam Description: PAP_fibrillin
  misc_feature (195)..(258): Homolog of NCBI NO: 37535940 NR Description: unknown protein [Oryza sativa (japonica
  misc_feature (19)..(302): Homolog of NCBI NO: 21553852 NR Description: unknown [Arabidopsis thaliana]
  misc_feature (19)..(302): Homolog of NCBI NO: 18407205 NR Description: Expressed protein
SSQFVTILEQLLSFEGSKMDRIASATFSCPAISLSRVCRISPFGLNIKTNHRKRFSCRVAVASGETSARVVVDNELDLEHKKHDLLRAVQDTQRGLTATSDQRSIIEEALVTVEGFNGGEEIDPVKLDGTWRLQYTSAPDVVVLFEAASRLPFFQVGQVFQKFECRDRSDGGIIRNVVQWSLPSLLEEQEGATLVVTAKFDKVSSRNIYLQFEEISVRNININEQLQALIAPAILPRSFLSLQLLQFIRTFKAQIPVNATSPGRRSVGGLYYLSYLDNNMLLGRSVGGGGVFVFTKSQPLEL

SEQ ID NO: 30334 - protein, 284 aa, Arabidopsis thaliana
  peptide (1)..(284): Ceres Seq. ID no. 12327340
  misc_feature (61)..(277): Pfam Name: PAP_fibrillin Pfam Description: PAP_fibrillin
  misc_feature (177)..(240): Homolog of NCBI NO: 37535940 NR Description: unknown protein [Oryza sativa (japonica
  misc_feature (1)..(284): Homolog of NCBI NO: 21553852 NR Description: unknown [Arabidopsis thaliana]
  misc_feature (1)..(284): Homolog of NCBI NO: 18407205 NR Description: Expressed protein
MDRIASATFSCPAISLSRVCRISPFGLNIKTNHRKRFSCRVAVASGETSARVVVDNELDLEHKKHDLLRAVQDTQRGLTATSDQRSIIEEALVTVEGFNGGEEIDPVKLDGTWRLQYTSAPDVVVLFEAASRLPFFQVGQVFQKFECRDRSDGGIIRNVVQWSLPSLLEEQEGATLVVTAKFDKVSSRNIYLQFEEISVRNININEQLQALIAPAILPRSFLSLQLLQFIRTFKAQIPVNATSPGRRSVGGLYYLSYLDNNMLLGRSVGGGGVFVFTKSQPLEL

SEQ ID NO: 30335 - DNA, 1929 bp, Arabidopsis thaliana
  misc_feature (1)..(1929): Ceres Seq. ID no. 12324454
  misc_feature: MA Experiment ID: 108585 Result: Down-regulated in Transcription
  misc_feature: MA Experiment 108585 PARAMETER Experiment Name: At_5mM_NaNP_cDNA_P Parameter: Timepoint (hr) Value: 6
  misc_feature: MA Experiment 108585 PARAMETER Experiment Name: At_5mM_NaNP_cDNA_P Parameter: Tissue Value: Aerial
  misc_feature: MA Experiment 108585 PARAMETER Experiment Name: At_5mM_NaNP_cDNA_P Parameter: Treatment Value: null
  misc_feature: MA Experiment ID: 108595 Result: Down-regulated in Transcription
  misc_feature: MA Experiment 108595 PARAMETER Experiment Name: At_Ler-pi_Ovule_cDNA_P Parameter: Plant Line Value: null
  misc_feature: MA Experiment ID: 108668 Result: Down-regulated in Transcription
  misc_feature: MA Experiment 108668 PARAMETER Experiment Name: At_2mM_SA_cDNA_P Parameter: Plant Line Value: WS
  misc_feature: MA Experiment 108668 PARAMETER Experiment Name: At_2mM_SA_cDNA_P Parameter: Timepoint (hr) Value: 6
  misc_feature: MA Experiment 108668 PARAMETER Experiment Name: At_2mM_SA_cDNA_P Parameter: Treatment Value: 2mM SA vs. No Treatment
  misc_feature: MA Experiment ID: 20000307 Result: Up-regulated in Transcription
  misc_feature: MA Experiment 20000307 PARAMETER Experiment Name: At_Germinating_Seeds_Sub_P Parameter: Age (hr) Value: 24 vs. 0
  misc_feature: MA Experiment 20000307 PARAMETER Experiment Name: At_Germinating_Seeds_Sub_P Parameter: Organism Value: A. thaliana
  misc_feature: MA Experiment 20000307 PARAMETER Experiment Name: At_Germinating_Seeds_Sub_P Parameter: Plant Line Value: WS
  misc_feature: MA Experiment 20000307 PARAMETER Experiment Name: At_Germinating_Seeds_Sub_P Parameter: Tissue Value: Germinating Seeds
atcaatggctgcttttgcttctggtttggctataatcttcaactctccttcactaaaccctgtcacaactcaagcgaccttcctttcttcgaatcggattcgttcctctcctcgcgttttcagtggatttcacagcctccgacgtcgcggcttccggcgattctctcaaaatgttatccccgaccggtttaatagcttctcatgtaattgcttatccgccgtatccaccagcactatcgattacgagttcacggatggtggcaaagaggtggaattaagattgaggttaaagacaggtgagatactttctccaaaggatatatctgttgacgcagatggaacatcgttagccgttaaagaaaagcggaatggattgctgattacacttctagagactaaccatctctttgagaagattatgccctctgaaacaatatggtacatagacgaagatcagttggttgtgaatatgaagaaggtggatggggaattgaagtggcctgatattgtcgagtcctgggagtctttgactgcaggaatgatgcaacttcttaaaggtgcatcaatctacattgttggagattcaactgaaatcaaccaaaaagtgtctcgagagctagccgttggccttgggtacagtcctttagattcaaaggaattgctggaaagcttttccaagcaaacaatcgattcttggattcttgcagaagggccggattctgtagctgaagcagagagttcggtattggaaagcttgagcagccatgtgcgtactgttgtctcaactttgggaggtaaacatggagctgcggggagagctgatcagtggagacatctttactccggatttaccgtttgggtatcacagactgaagccacagatgaagagtcagctaaagaagaagcgaggagaagtaagcaagagagggagattgggtattcaaacgccgacgttgtggtgaagctccaaggttgggacccgacgcatgcaaagagcgtggctcaggcttccttgagtgcacttaagcaactgatcatctcagacaagggacttccaggtaagaagagtttgtacatacgcttgggatgccgtggcgattggcccaatataaaaccgccgggatgggatccatcgtctgacactggacctcatccacagtttacataaacagtgtcaagacatgctttttgctctctcctacaaacgaatgctcttgaagaaattttctgttattgttgtcattgtcaatggtatttaattgttaaagaagttgtatattggataatttgagaattgactaccaatctgagttttaaatggcacaaagcgcaccatggcacagagagtcctttagtgcgctatgtgccatggctcaccaaagcgcgcgctttttggatctgtggcgttctcttaacagattctctgcatatggttttagccttcaagcttatatcgtctatggtgttctatttagaaaaattagggattttacatcttctaactggttaaaatgtcgtgggttaagagagttttcgcctgaacacaagaggcgatcgctttgccaccttgtgcatcggccaaggctcacgtatggcgtgcgcatcatagatgtcgcctcgcctccacgtcttgttgccctattcttagagcatcggtgcgctatgcgccatggcacgccattagcgcgctttttaaaaccaaggattgaactgaaaactgctcctgctgattttcggtttccaacaacaaaccaaacgaggcactgcttcacccgttacattgagttccacaggtgcacaactgcaaaaggtgaggatgcaaatgaatgcgagaggttcgccaagtactaccgcgctctctgccctggggaatgggttgacaagtggaatgagcagagggagactggaacattccctggccctctttga

SEQ ID NO: 30336 - protein, 388 aa, Arabidopsis thaliana
  peptide (1)..(388): Ceres Seq. ID no. 12324455
  misc_feature (187)..(342): Pfam Name: Shikimate kinase Pfam Description: Shikimate kinase
  misc_feature (183)..(287): Homolog of NCBI NO: 37522279 NR Description: shikimate kinase [Gloeobacter violaceus]
  misc_feature (254)..(383): Homolog of NCBI NO: 37537148 NR Description: unknown protein [Oryza sativa (japonica
  misc_feature (82)..(253): Homolog of NCBI NO: 37537148 NR Description: unknown protein [Oryza sativa (japonica
  misc_feature (82)..(355): Homolog of NCBI NO: 25408383 NR Description: hypothetical protein At2g35500 [imported] -
  misc_feature (2)..(388): Homolog of NCBI NO: 18403860 NR Description: expressed protein
SMAAFASGLAIIFNSPSLNPVTTQATFLSSNRIRSSPRVFSGFHSLRRRGFRRFSQNVIPDRFNSFSCNCLSAVSTSTIDYEFTDGGKEVELRLRLKTGEILSPKDISVDADGTSLAVKEKRNGLLITLLETNHLFEKIMPSETIWYIDEDQLVVNMKKVDGELKWPDIVESWESLTAGMMQLLKGASIYIVGDSTEINQKVSRELAVGLGYSPLDSKELLESFSKQTIDSWILAEGPDSVAEAESSVLESLSSHVRTVVSTLGGKHGAAGRADQWRHLYSGFTVWVSQTEATDEESAKEEARRSKQEREIGYSNADVVVKLQGWDPTHAKSVAQASLSALKQLIISDKGLPGKKSLYIRLGCRGDWPNIKPPGWDPSSDTGPHPQFT

SEQ ID NO: 30337 - protein, 387 aa, Arabidopsis thaliana
  peptide (1)..(387): Ceres Seq. ID no. 12324456
  misc_feature (186)..(341): Pfam Name: Shikimate kinase Pfam Description: Shikimate kinase
  misc_feature (182)..(286): Homolog of NCBI NO: 37522279 NR Description: shikimate kinase [Gloeobacter violaceus]
  misc_feature (253)..(382): Homolog of NCBI NO: 37537148 NR Description: unknown protein [Oryza sativa (japonica
  misc_feature (81)..(252): Homolog of NCBI NO: 37537148 NR Description: unknown protein [Oryza sativa (japonica
  misc_feature (81)..(354): Homolog of NCBI NO: 25408383 NR Description: hypothetical protein At2g35500 [imported] -
  misc_feature (1)..(387): Homolog of NCBI NO: 18403860 NR Description: expressed protein
MAAFASGLAIIFNSPSLNPVTTQATFLSSNRIRSSPRVFSGFHSLRRRGFRRFSQNVIPDRFNSFSCNCLSAVSTSTIDYEFTDGGKEVELRLRLKTGEILSPKDISVDADGTSLAVKEKRNGLLITLLETNHLFEKIMPSETIWYIDEDQLVVNMKKVDGELKWPDIVESWESLTAGMMQLLKGASIYIVGDSTEINQKVSRELAVGLGYSPLDSKELLESFSKQTIDSWILAEGPDSVAEAESSVLESLSSHVRTVVSTLGGKHGAAGRADQWRHLYSGFTVWVSQTEATDEESAKEEARRSKQEREIGYSNADVVVKLQGWDPTHAKSVAQASLSALKQLIISDKGLPGKKSLYIRLGCRGDWPNIKPPGWDPSSDTGPHPQFT

SEQ ID NO: 30338 - protein, 249 aa, Arabidopsis thaliana
  peptide (1)..(249): Ceres Seq. ID no. 12324457
  misc_feature (48)..(203): Pfam Name: Shikimate kinase Pfam Description: Shikimate kinase
  misc_feature (44)..(148): Homolog of NCBI NO: 37522279 NR Description: shikimate kinase [Gloeobacter violaceus]
  misc_feature (115)..(244): Homolog of NCBI NO: 37537148 NR Description: unknown protein [Oryza sativa (japonica
  misc_feature (1)..(114): Homolog of NCBI NO: 37537148 NR Description: unknown protein [Oryza sativa (japonica
  misc_feature (1)..(216): Homolog of NCBI NO: 25408383 NR Description: hypothetical protein At2g35500 [imported] -
  misc_feature (1)..(249): Homolog of NCBI NO: 18403860 NR Description: expressed protein
MPSETIWYIDEDQLVVNMKKVDGELKWPDIVESWESLTAGMMQLLKGASIYIVGDSTEINQKVSRELAVGLGYSPLDSKELLESFSKQTIDSWILAEGPDSVAEAESSVLESLSSHVRTVVSTLGGKHGAAGRADQWRHLYSGFTVWVSQTEATDEESAKEEARRSKQEREIGYSNADVVVKLQGWDPTHAKSVAQASLSALKQLIISDKGLPGKKSLYIRLGCRGDWPNIKPPGWDPSSDTGPHPQFT

SEQ ID NO: 30339 - DNA, 1267 bp, Arabidopsis thaliana
  misc_feature (1)..(1267): Ceres Seq. ID no. 13487841
  misc_feature: MA Experiment ID: 20000184 Result: Up-regulated in Transcription
  misc_feature: MA Experiment 20000184 PARAMETER Experiment Name: At_Shoots__P Parameter: Age (day) Value: 7
  misc_feature: MA Experiment 20000184 PARAMETER Experiment Name: At_Shoots__P Parameter: Tissue Value: Shoots vs. Whole Plant
  misc_feature: MA Experiment ID: 20000495 Result: Up-regulated in Transcription
  misc_feature: MA Experiment 20000495 PARAMETER Experiment Name: At_Guard_Cells_P Parameter: Harvest Date Value: 8/2/2002
  misc_feature: MA Experiment 20000495 PARAMETER Experiment Name: At_Guard_Cells_P Parameter: Organism Value: A. thaliana
  misc_feature: MA Experiment 20000495 PARAMETER Experiment Name: At_Guard_Cells_P Parameter: Tissue Value: Guard Cells vs. Leaves
  misc_feature: MA Experiment ID: 20001557 Result: Up-regulated in Transcription
  misc_feature: MA Experiment 20001557 PARAMETER Experiment Name: At_Drought_Soil_Dry_P Parameter: Age (day) Value: 27
  misc_feature: MA Experiment 20001557 PARAMETER Experiment Name: At_Drought_Soil_Dry_P Parameter: Organism Value: A. thaliana
  misc_feature: MA Experiment 20001557 PARAMETER Experiment Name: At_Drought_Soil_Dry_P Parameter: Plant Line Value: WS
  misc_feature: MA Experiment 20001557 PARAMETER Experiment Name: At_Drought_Soil_Dry_P Parameter: Post Timepoint (hr) Value: 3
  misc_feature: MA Experiment 20001557 PARAMETER Experiment Name: At_Drought_Soil_Dry_P Parameter: Post-Treatment Value: Re-Water vs. No Drought
  misc_feature: MA Experiment 20001557 PARAMETER Experiment Name: At_Drought_Soil_Dry_P Parameter: Timepoint (day) Value: 13
  misc_feature: MA Experiment 20001557 PARAMETER Experiment Name: At_Drought_Soil_Dry_P Parameter: Treatment Value: Drought vs. No Drought
  misc_feature: MA Experiment ID: 20001911 Result: Down-regulated in Transcription
  misc_feature: MA Experiment 20001911 PARAMETER Experiment Name: At_Drought_Reproduction_P Parameter: Age (day) Value: 40
  misc_feature: MA Experiment 20001911 PARAMETER Experiment Name: At_Drought_Reproduction_P Parameter: Organism Value: A. thaliana
  misc_feature: MA Experiment 20001911 PARAMETER Experiment Name: At_Drought_Reproduction_P Parameter: Plant Line Value: WS
  misc_feature: MA Experiment 20001911 PARAMETER Experiment Name: At_Drought_Reproduction_P Parameter: Timepoint (day) Value: 10
  misc_feature: MA Experiment 20001911 PARAMETER Experiment Name: At_Drought_Reproduction_P Parameter: Tissue Value: Flowers
  misc_feature: MA Experiment 20001911 PARAMETER Experiment Name: At_Drought_Reproduction_P Parameter: Treatment Value: Drought vs. No Drought
aataatgtgttgcaaaagaggcaaactatacaacgtgaaagtggtaggtctaccagatcccataccctcattttaatggcggagattacaagggaaagagacaactccaattcaaagctctgattttttccaccaatccccattttttcccttttacaattcttaagctagttttatacttttcttcttcctttcatttgggttaagagaagccatggataccgagtttctccgaaccctagatcgtcagattcttttgggtgtcttcgttgctttcgtcgccgttggtgctggtgctgcttattttcttacatcctccaagaaacgcagagtgtgtttggatccagagaatttcaaggagttcaagcttgttaagagacatcagcttagtcacaatgtggccaagttcgtttttgaactcccaacttctacttctgtgttgggtcttcccattggacaacacatcagttgcaggggaaaggatggtcaaggagaggatgttattaagccatacaccccgactacgttagactctgacgttggacgtttcgaacttgtcattaagatgtatccgcaaggacggatgtctcatcatttcagggagatgcgtgttggagaccatcttgccgtaaagggaccaaagggtaggttcaagtatcaaccaggtcagtttagggcatttggaatgcttgctggaggttcaggcatcactcccatgttccaagtggccagagcaattctagaaaacccaacagacaagacaaaggtgcatctcatttacgccaacgtcacatacgacgacattctcttgaaggaagaattggagggtcttactaccaattaccctgaacaatttaaaatcttctatgttttgaaccagcctccggaagtatgggatggtggtgttggatttgtatcaaaggaaatgattcagactcattgccctgcacctgcatctgatattcagatcctaagatgcggaccaccgccaatgaacaaggccatggctgcaaaccttgaagctctgggatactctccggagatgcaattccagttctgatctgaatatcttcttttggttgctctgaaacggaactcataataatttagttacaatcccaactacgagagttgtgtcttaactgagtgagagttgtatttctgttgtgtgtttgttagcccacttgaaagtttccattgattggtttacgaattggttagacattttggttcacctataccggtttggtgcaaacactttgatgct

SEQ ID NO: 30340 - protein, 281 aa, Arabidopsis thaliana
  peptide (1)..(281): Ceres Seq. ID no. 13487842
  misc_feature (153)..(267): Pfam Name: Oxidoreductase NAD-binding domain Pfam Description: Oxidoreductase NAD-binding domain
  misc_feature (38)..(273): Homolog of NCBI NO: 27924030 NR Description: reductase [Fusarium sporotrichioides]
  misc_feature (18)..(273): Homolog of NCBI NO: 19075352 NR Description: putative nadh-cytochrome b5 reductase
  misc_feature (38)..(273): Homolog of NCBI NO: 29126014 NR Description: putative NADH cytb-reductase [Gibberella zeae]
  misc_feature (38)..(273): Homolog of NCBI NO: 28202143 NR Description: reductase [Gibberella zeae]
  misc_feature (13)..(274): Homolog of NCBI NO: 40739560 NR Description: hypothetical protein AN6366.2 [Aspergillus
  misc_feature (21)..(273): Homolog of NCBI NO: 6070342 NR Description: NADH-cytochrome b5 reductase [Mortierella alpina]
  misc_feature (118)..(281): Homolog of NCBI NO: 16648905 NR Description: NADH-cytochrome b5 reductase [Arabidopsis
  misc_feature (4)..(281): Homolog of NCBI NO: 4336205 NR Description: cytochrome b5 reductase [Zea mays]
  misc_feature (4)..(281): Homolog of NCBI NO: 17221690 NR Description: cytochrome b5 reductase isoform II [Zea mays]
  misc_feature (1)..(281): Homolog of NCBI NO: 15238025 NR Description: NADH-cytochrome b5 reductase [Arabidopsis
MDTEFLRTLDRQILLGVFVAFVAVGAGAAYFLTSSKKRRVCLDPENFKEFKLVKRHQLSHNVAKFVFELPTSTSVLGLPIGQHISCRGKDGQGEDVIKPYTPTTLDSDVGRFELVIKMYPQGRMSHHFREMRVGDHLAVKGPKGRFKYQPGQFRAFGMLAGGSGITPMFQVARAILENPTDKTKVHLIYANVTYDDILLKEELEGLTTNYPEQFKIFYVLNQPPEVWDGGVGFVSKEMIQTHCPAPASDIQILRCGPPPMNKAMAANLEALGYSPEMQFQF

SEQ ID NO: 30341 - protein, 164 aa, Arabidopsis thaliana
  peptide (1)..(164): Ceres Seq. ID no. 13487843
  misc_feature (36)..(150): Pfam Name: Oxidoreductase NAD-binding domain Pfam Description: Oxidoreductase NAD-binding domain
  misc_feature (1)..(156): Homolog of NCBI NO: 27924030 NR Description: reductase [Fusarium sporotrichioides]
  misc_feature (1)..(156): Homolog of NCBI NO: 19075352 NR Description: putative nadh-cytochrome b5 reductase
  misc_feature (1)..(156): Homolog of NCBI NO: 29126014 NR Description: putative NADH cytb-reductase [Gibberella zeae]
  misc_feature (1)..(156): Homolog of NCBI NO: 28202143 NR Description: reductase [Gibberella zeae]
  misc_feature (1)..(157): Homolog of NCBI NO: 40739560 NR Description: hypothetical protein AN6366.2 [Aspergillus
  misc_feature (1)..(156): Homolog of NCBI NO: 6070342 NR Description: NADH-cytochrome b5 reductase [Mortierella alpina]
  misc_feature (1)..(164): Homolog of NCBI NO: 16648905 NR Description: NADH-cytochrome b5 reductase [Arabidopsis
  misc_feature (1)..(164): Homolog of NCBI NO: 4336205 NR Description: cytochrome b5 reductase [Zea mays]
  misc_feature (1)..(164): Homolog of NCBI NO: 17221690 NR Description: cytochrome b5 reductase isoform II [Zea mays]
  misc_feature (1)..(164): Homolog of NCBI NO: 15238025 NR Description: NADH-cytochrome b5 reductase [Arabidopsis
MYPQGRMSHHFREMRVGDHLAVKGPKGRFKYQPGQFRAFGMLAGGSGITPMFQVARAILENPTDKTKVHLIYANVTYDDILLKEELEGLTTNYPEQFKIFYVLNQPPEVWDGGVGFVSKEMIQTHCPAPASDIQILRCGPPPMNKAMAANLEALGYSPEMQFQF

SEQ ID NO: 30342 - protein, 158 aa, Arabidopsis thaliana
  peptide (1)..(158): Ceres Seq. ID no. 13487844
  misc_feature (30)..(144): Pfam Name: Oxidoreductase NAD-binding domain Pfam Description: Oxidoreductase NAD-binding domain
  misc_feature (1)..(150): Homolog of NCBI NO: 27924030 NR Description: reductase [Fusarium sporotrichioides]
  misc_feature (1)..(150): Homolog of NCBI NO: 19075352 NR Description: putative nadh-cytochrome b5 reductase
  misc_feature (1)..(150): Homolog of NCBI NO: 29126014 NR Description: putative NADH cytb-reductase [Gibberella zeae]
  misc_feature (1)..(150): Homolog of NCBI NO: 28202143 NR Description: reductase [Gibberella zeae]
  misc_feature (1)..(151): Homolog of NCBI NO: 40739560 NR Description: hypothetical protein AN6366.2 [Aspergillus
  misc_feature (1)..(150): Homolog of NCBI NO: 6070342 NR Description: NADH-cytochrome b5 reductase [Mortierella alpina]
  misc_feature (1)..(158): Homolog of NCBI NO: 16648905 NR Description: NADH-cytochrome b5 reductase [Arabidopsis
  misc_feature (1)..(158): Homolog of NCBI NO: 4336205 NR Description: cytochrome b5 reductase [Zea mays]
  misc_feature (1)..(158): Homolog of NCBI NO: 17221690 NR Description: cytochrome b5 reductase isoform II [Zea mays]
  misc_feature (1)..(158): Homolog of NCBI NO: 15238025 NR Description: NADH-cytochrome b5 reductase [Arabidopsis
MSHHFREMRVGDHLAVKGPKGRFKYQPGQFRAFGMLAGGSGITPMFQVARAILENPTDKTKVHLIYANVTYDDILLKEELEGLTTNYPEQFKIFYVLNQPPEVWDGGVGFVSKEMIQTHCPAPASDIQILRCGPPPMNKAMAANLEALGYSPEMQFQF

SEQ ID NO: 30343 - DNA, 1139 bp, Arabidopsis thaliana
  misc_feature (1)..(1139): Ceres Seq. ID no. 12396159
  misc_feature: MA Experiment ID: 108462 Result: Up-regulated in Transcription
  misc_feature: MA Experiment 108462 PARAMETER Experiment Name: At_Germinating_Seeds_cDNA_P Parameter: Age (day) Value: 2 vs. 0
  misc_feature: MA Experiment 108462 PARAMETER Experiment Name: At_Germinating_Seeds_cDNA_P Parameter: Tissue Value: Germinating Seeds
  misc_feature: MA Experiment ID: 108463 Result: Up-regulated in Transcription
  misc_feature: MA Experiment 108463 PARAMETER Experiment Name: At_Germinating_Seeds_cDNA_P Parameter: Age (day) Value: 3 vs. 0
  misc_feature: MA Experiment 108463 PARAMETER Experiment Name: At_Germinating_Seeds_cDNA_P Parameter: Tissue Value: Germinating Seeds
  misc_feature: MA Experiment ID: 108464 Result: Up-regulated in Transcription
  misc_feature: MA Experiment 108464 PARAMETER Experiment Name: At_Germinating_Seeds_cDNA_P Parameter: Age (day) Value: 4 vs. 0
  misc_feature: MA Experiment 108464 PARAMETER Experiment Name: At_Germinating_Seeds_cDNA_P Parameter: Tissue Value: Germinating Seeds
  misc_feature: MA Experiment ID: 108595 Result: Down-regulated in Transcription
  misc_feature: MA Experiment 108595 PARAMETER Experiment Name: At_Ler-pi_Ovule_cDNA_P Parameter: Plant Line Value: null
  misc_feature: MA Experiment ID: 20000113 Result: Up-regulated in Transcription
  misc_feature: MA Experiment 20000113 PARAMETER Experiment Name: At_42deg_Heat_cDNA_P Parameter: Temperature (deg C) Value: 42 vs. 22
  misc_feature: MA Experiment 20000113 PARAMETER Experiment Name: At_42deg_Heat_cDNA_P Parameter: Timepoint (hr) Value: 8
  misc_feature: MA Experiment 20000113 PARAMETER Experiment Name: At_42deg_Heat_cDNA_P Parameter: Tissue Value: Aerial
  misc_feature: MA Experiment ID: 20000179 Result: Up-regulated in Transcription
  misc_feature: MA Experiment 20000179 PARAMETER Experiment Name: At_Germinating_Seeds_P Parameter: Age (hr) Value: 6 vs. 0
  misc_feature: MA Experiment 20000179 PARAMETER Experiment Name: At_Germinating_Seeds_P Parameter: Tissue Value: Germinating Seeds
  misc_feature: MA Experiment ID: 20000180 Result: Up-regulated in Transcription
  misc_feature: MA Experiment 20000180 PARAMETER Experiment Name: At_Germinating_Seeds_P Parameter: Age (hr) Value: 24 vs. 0
  misc_feature: MA Experiment 20000180 PARAMETER Experiment Name: At_Germinating_Seeds_P Parameter: Tissue Value: Germinating Seeds
  misc_feature: MA Experiment ID: 20000185 Result: Down-regulated in Transcription
  misc_feature: MA Experiment 20000185 PARAMETER Experiment Name: At_Roots__P Parameter: Age (day) Value: 7 vs. 21
  misc_feature: MA Experiment 20000185 PARAMETER Experiment Name: At_Roots__P Parameter: Organism Value: A. thaliana
  misc_feature: MA Experiment 20000185 PARAMETER Experiment Name: At_Roots__P Parameter: Tissue Value: Roots vs. Whole Plant
  misc_feature: MA Experiment ID: 20000224 Result: Down-regulated in Transcription
  misc_feature: MA Experiment ID: 20000264 Result: Down-regulated in Transcription
  misc_feature: MA Experiment 20000264 PARAMETER Experiment Name: At_Open_Flower_P Parameter: Age (day) Value: 21
  misc_feature: MA Experiment 20000264 PARAMETER Experiment Name: At_Open_Flower_P Parameter: Plant Line Value: WS
  misc_feature: MA Experiment 20000264 PARAMETER Experiment Name: At_Open_Flower_P Parameter: Tissue Value: Open Flower vs. Whole Plant
  misc_feature: MA Experiment ID: 20000286 Result: Down-regulated in Transcription
  misc_feature: MA Experiment 20000286 PARAMETER Experiment Name: At_Open_Flower_P Parameter: Age (day) Value: 21
  misc_feature: MA Experiment 20000286 PARAMETER Experiment Name: At_Open_Flower_P Parameter: Plant Line Value: WS
  misc_feature: MA Experiment 20000286 PARAMETER Experiment Name: At_Open_Flower_P Parameter: Tissue Value: Half Open vs. Whole Plant
  misc_feature: MA Experiment ID: 20000439 Result: Down-regulated in Transcription
  misc_feature: MA Experiment 20000439 PARAMETER Experiment Name: At_Roots__P Parameter: Age (day) Value: 14 vs. 21
  misc_feature: MA Experiment 20000439 PARAMETER Experiment Name: At_Roots__P Parameter: Organism Value: A. thaliana
  misc_feature: MA Experiment 20000439 PARAMETER Experiment Name: At_Roots__P Parameter: Tissue Value: Roots vs. Whole Plant
  misc_feature: MA Experiment ID: 20000794 Result: Down-regulated in Transcription
  misc_feature: MA Experiment 20000794 PARAMETER Experiment Name: At_Petals_P Parameter: Age (day) Value: 23-25 days
  misc_feature: MA Experiment 20000794 PARAMETER Experiment Name: At_Petals_P Parameter: Plant Line Value: WS
  misc_feature: MA Experiment 20000794 PARAMETER Experiment Name: At_Petals_P Parameter: Tissue Value: Petals vs. Whole plant
  misc_feature: MA Experiment ID: 20001904 Result: Down-regulated in Transcription
  misc_feature: MA Experiment 20001904 PARAMETER Experiment Name: At_Drought_Reproduction_P Parameter: Age (day) Value: 37
  misc_feature: MA Experiment 20001904 PARAMETER Experiment Name: At_Drought_Reproduction_P Parameter: Organism Value: A. thaliana
  misc_feature: MA Experiment 20001904 PARAMETER Experiment Name: At_Drought_Reproduction_P Parameter: Plant Line Value: WS
  misc_feature: MA Experiment 20001904 PARAMETER Experiment Name: At_Drought_Reproduction_P Parameter: Timepoint (day) Value: 7
  misc_feature: MA Experiment 20001904 PARAMETER Experiment Name: At_Drought_Reproduction_P Parameter: Tissue Value: Rosettes
  misc_feature: MA Experiment 20001904 PARAMETER Experiment Name: At_Drought_Reproduction_P Parameter: Treatment Value: Drought vs. No Drought
  misc_feature: MA Experiment ID: 20001905 Result: Down-regulated in Transcription
  misc_feature: MA Experiment 20001905 PARAMETER Experiment Name: At_Drought_Reproduction_P Parameter: Age (day) Value: 40
  misc_feature: MA Experiment 20001905 PARAMETER Experiment Name: At_Drought_Reproduction_P Parameter: Organism Value: A. thaliana
  misc_feature: MA Experiment 20001905 PARAMETER Experiment Name: At_Drought_Reproduction_P Parameter: Plant Line Value: WS
  misc_feature: MA Experiment 20001905 PARAMETER Experiment Name: At_Drought_Reproduction_P Parameter: Timepoint (day) Value: 10
  misc_feature: MA Experiment 20001905 PARAMETER Experiment Name: At_Drought_Reproduction_P Parameter: Tissue Value: Rosettes
  misc_feature: MA Experiment 20001905 PARAMETER Experiment Name: At_Drought_Reproduction_P Parameter: Treatment Value: Drought vs. No Drought
  misc_feature: MA Experiment ID: 20001906 Result: Down-regulated in Transcription
  misc_feature: MA Experiment 20001906 PARAMETER Experiment Name: At_Drought_Reproduction_P Parameter: Age (day) Value: 35
  misc_feature: MA Experiment 20001906 PARAMETER Experiment Name: At_Drought_Reproduction_P Parameter: Organism Value: A. thaliana
  misc_feature: MA Experiment 20001906 PARAMETER Experiment Name: At_Drought_Reproduction_P Parameter: Plant Line Value: WS
  misc_feature: MA Experiment 20001906 PARAMETER Experiment Name: At_Drought_Reproduction_P Parameter: Timepoint (day) Value: 5
  misc_feature: MA Experiment 20001906 PARAMETER Experiment Name: At_Drought_Reproduction_P Parameter: Tissue Value: Siliques
  misc_feature: MA Experiment 20001906 PARAMETER Experiment Name: At_Drought_Reproduction_P Parameter: Treatment Value: Drought vs. No Drought
  misc_feature: MA Experiment ID: 20001911 Result: Down-regulated in Transcription
  misc_feature: MA Experiment 20001911 PARAMETER Experiment Name: At_Drought_Reproduction_P Parameter: Age (day) Value: 40
  misc_feature: MA Experiment 20001911 PARAMETER Experiment Name: At_Drought_Reproduction_P Parameter: Organism Value: A. thaliana
  misc_feature: MA Experiment 20001911 PARAMETER Experiment Name: At_Drought_Reproduction_P Parameter: Plant Line Value: WS
  misc_feature: MA Experiment 20001911 PARAMETER Experiment Name: At_Drought_Reproduction_P Parameter: Timepoint (day) Value: 10
  misc_feature: MA Experiment 20001911 PARAMETER Experiment Name: At_Drought_Reproduction_P Parameter: Tissue Value: Flowers
  misc_feature: MA Experiment 20001911 PARAMETER Experiment Name: At_Drought_Reproduction_P Parameter: Treatment Value: Drought vs. No Drought
gactccattattatccctctctctacaaaaaaaacagtagagagagatatagagagcatcaatggcgtcgtcgtcaagactttgcgattcgtgcaaatcgacggcagcaactctattctgccgcgcagacgccgcgtttctctgcggcgactgcgacggtaagatccacacagctaacaaactcgcatcacgtcacgaacgagtttggctatgtgaagtatgcgaacaagcaccagcacacgtcacgtgcaaagctgacgccgctgcgttatgcgtcacgtgcgaccgtgatatccactcagctaatccactctctcgccgccacgagcgcgtaccaatcactcctttctacgacgctgtaggtccagcaaaatccgcttcctcctccgtcaatttcgtagatgaagatggcggtgacgtcactgcttcgtggcttttagctaaagaaggaatcgaaatcactaatttgttctccgatcttgattatccgaagattgaggtaacgtcggaggagaatagctccggtaacgacggagttgttcctgtgcagaataagttgtttcttaacgaagattacttcaatttcgatctctctgcttccaaaatttctcaacaaggattcaatttcatcaaccaaactgtttcgacgagaacgatagatgtaccgttggtgcctgaaagtggaggagtgacggcggagatgacgaacacggagacgccagctgtgcagttatcaccggcggagagggaagcaagggttttgaggtatagagagaagaggaagaatcggaaatttgagaagacgattaggtatgcgtcgcgtaaagcttacgctgagatgaggccgagaatcaaaggacgttttgctaagagaacagattcgagagagaatgatggtggagacgtcggagtttatggcggattcggtgttgttccgagtttctgatattttccggtgaaagaaacatggtagtagtatatcggttaatagcagattaaggataattaaaactaaaatgtttcctgatttaatcaggggctaagttattgttagaagattgttgttttttgaattaattctcacaattgtatcctaaattatatagtttacttaatgttgaactaataaattttgattt

SEQ ID NO: 30344 - protein, 294 aa, Arabidopsis thaliana
  peptide (1)..(294): Ceres Seq. ID no. 12396160
  misc_feature (3)..(50): Pfam Name: B-box zinc finger Pfam Description: B-box zinc finger
  misc_feature (139)..(294): Homolog of NCBI NO: 21594050 NR Description: CONSTANS-like B-box zinc finger protein-like
  misc_feature (3)..(157): Homolog of NCBI NO: 17433047 NR Description: Zinc finger protein constans-like 15
  misc_feature (139)..(294): Homolog of NCBI NO: 17433047 NR Description: Zinc finger protein constans-like 15
  misc_feature (168)..(294): Homolog of NCBI NO: 4091804 NR Description: CONSTANS-like protein 1 [Malus x domestica]
  misc_feature (6)..(185): Homolog of NCBI NO: 4091804 NR Description: CONSTANS-like protein 1 [Malus x domestica]
  misc_feature (168)..(294): Homolog of NCBI NO: 30689668 NR Description: CONSTANS B-box zinc finger family protein
  misc_feature (1)..(176): Homolog of NCBI NO: 30689668 NR Description: CONSTANS B-box zinc finger family protein
  misc_feature (4)..(294): Homolog of NCBI NO: 7488604 NR Description: CONSTANS protein homolog COL1 - radish
  misc_feature (1)..(294): Homolog of NCBI NO: 21553854 NR Description: zinc finger protein constans-like 8 [Arabidopsis
  misc_feature (1)..(294): Homolog of NCBI NO: 15224620 NR Description: CONSTANS B-box zinc finger family protein
MASSSRLCDSCKSTAATLFCRADAAFLCGDCDGKIHTANKLASRHERVWLCEVCEQAPAHVTCKADAAALCVTCDRDIHSANPLSRRHERVPITPFYDAVGPAKSASSSVNFVDEDGGDVTASWLLAKEGIEITNLFSDLDYPKIEVTSEENSSGNDGVVPVQNKLFLNEDYFNFDLSASKISQQGFNFINQTVSTRTIDVPLVPESGGVTAEMTNTETPAVQLSPAEREARVLRYREKRKNRKFEKTIRYASRKAYAEMRPRIKGRFAKRTDSRENDGGDVGVYGGFGVVPSF

SEQ ID NO: 30345 - DNA, 1082 bp, Arabidopsis thaliana
  misc_feature (1)..(1082): Ceres Seq. ID no. 13500301
  misc_feature: MA Experiment ID: 108569 Result: Up-regulated in Transcription
  misc_feature: MA Experiment 108569 PARAMETER Experiment Name: At_0.001%_MeJA__cDNA_P Parameter: Timepoint (hr) Value: 6
  misc_feature: MA Experiment 108569 PARAMETER Experiment Name: At_0.001%_MeJA__cDNA_P Parameter: Tissue Value: Aerial
  misc_feature: MA Experiment 108569 PARAMETER Experiment Name: At_0.001%_MeJA__cDNA_P Parameter: Treatment Value: 0.001% MeJA vs. No Treatment
  misc_feature: MA Experiment ID: 108573 Result: Up-regulated in Transcription
  misc_feature: MA Experiment 108573 PARAMETER Experiment Name: At_Drought_cDNA_P Parameter: Timepoint (hr) Value: 6
  misc_feature: MA Experiment 108573 PARAMETER Experiment Name: At_Drought_cDNA_P Parameter: Tissue Value: Aerial
  misc_feature: MA Experiment 108573 PARAMETER Experiment Name: At_Drought_cDNA_P Parameter: Treatment Value: Drought vs. No Drought
  misc_feature: MA Experiment ID: 20000071 Result: Up-regulated in Transcription
  misc_feature: MA Experiment 20000071 PARAMETER Experiment Name: At_100uM_ABA_Mutants_cDNA_P Parameter: Plant Line Value: CS8104
  misc_feature: MA Experiment 20000071 PARAMETER Experiment Name: At_100uM_ABA_Mutants_cDNA_P Parameter: Timepoint (hr) Value: 6
  misc_feature: MA Experiment 20000071 PARAMETER Experiment Name: At_100uM_ABA_Mutants_cDNA_P Parameter: Tissue Value: Aerial
  misc_feature: MA Experiment 20000071 PARAMETER Experiment Name: At_100uM_ABA_Mutants_cDNA_P Parameter: Treatment Value: 100uM ABA vs. No Treatment
  misc_feature: MA Experiment ID: 20000086 Result: Up-regulated in Transcription
  misc_feature: MA Experiment 20000086 PARAMETER Experiment Name: At_100uM_ABA_Mutants_cDNA_P Parameter: Plant Line Value: CS22
  misc_feature: MA Experiment 20000086 PARAMETER Experiment Name: At_100uM_ABA_Mutants_cDNA_P Parameter: Timepoint (hr) Value: 6
  misc_feature: MA Experiment 20000086 PARAMETER Experiment Name: At_100uM_ABA_Mutants_cDNA_P Parameter: Tissue Value: Aerial
  misc_feature: MA Experiment 20000086 PARAMETER Experiment Name: At_100uM_ABA_Mutants_cDNA_P Parameter: Treatment Value: 100uM ABA vs. No Treatment
  misc_feature: MA Experiment ID: 20000171 Result: Down-regulated in Transcription
  misc_feature: MA Experiment 20000171 PARAMETER Experiment Name: At_42deg_Heat_P Parameter: Age (day) Value: 14
  misc_feature: MA Experiment 20000171 PARAMETER Experiment Name: At_42deg_Heat_P Parameter: Organism Value: A. thaliana
  misc_feature: MA Experiment 20000171 PARAMETER Experiment Name: At_42deg_Heat_P Parameter: Plant Line Value: WS
  misc_feature: MA Experiment 20000171 PARAMETER Experiment Name: At_42deg_Heat_P Parameter: Temperature (deg C) Value: 42 vs. 22
  misc_feature: MA Experiment 20000171 PARAMETER Experiment Name: At_42deg_Heat_P Parameter: Timepoint (hr) Value: 1
  misc_feature: MA Experiment 20000171 PARAMETER Experiment Name: At_42deg_Heat_P Parameter: Tissue Value: Aerial
  misc_feature: MA Experiment ID: 20000234 Result: Down-regulated in Transcription
  misc_feature: MA Experiment 20000234 PARAMETER Experiment Name: At_Siliques_P Parameter: Age (day) Value: 21
  misc_feature: MA Experiment 20000234 PARAMETER Experiment Name: At_Siliques_P Parameter: Organism Value: A. thaliana
  misc_feature: MA Experiment 20000234 PARAMETER Experiment Name: At_Siliques_P Parameter: Plant Line Value: WS
  misc_feature: MA Experiment 20000234 PARAMETER Experiment Name: At_Siliques_P Parameter: Tissue Value: Less Than 5mm Siliques vs. Whole Plant
  misc_feature: MA Experiment ID: 20000265 Result: Down-regulated in Transcription
  misc_feature: MA Experiment 20000265 PARAMETER Experiment Name: At_Open_Flower_P Parameter: Age (day) Value: 21
  misc_feature: MA Experiment 20000265 PARAMETER Experiment Name: At_Open_Flower_P Parameter: Plant Line Value: WS
  misc_feature: MA Experiment 20000265 PARAMETER Experiment Name: At_Open_Flower_P Parameter: Tissue Value: Closed Flower vs. Whole Plant
  misc_feature: MA Experiment ID: 20000794 Result: Up-regulated in Transcription
  misc_feature: MA Experiment 20000794 PARAMETER Experiment Name: At_Petals_P Parameter: Age (day) Value: 23-25 days
  misc_feature: MA Experiment 20000794 PARAMETER Experiment Name: At_Petals_P Parameter: Plant Line Value: WS
  misc_feature: MA Experiment 20000794 PARAMETER Experiment Name: At_Petals_P Parameter: Tissue Value: Petals vs. Whole plant
gatgaagaagaaggtggtgaacttgtatttggaggtgttgatccaaatcatttcaagggcaaacatacatatgttcctgtgacacaaaagggctactggcagtttgacatgggtgatgttcttattggcggtgcacccactgggttctgtgaaagtggctgttctgcgatagcagattctggtacatctttgcttgccggtccaacgactataatcaccatgataaaccatgctattggagcagctggagttgttagccagcagtgcaagactgttgtggatcaatacgggcagaccattttggatttacttttgtctgagacccaaccgaagaaaatctgctcgcagattggtctgtgtacttttgatggtacccgtggtgtcagtatgggcattgagtcggtggtggacaaggaaaacgccaaattgtctaatggtgttggagatgctgcgtgttctgcatgtgagatggctgttgtgtggatccagagccagttgaggcaaaacatgactcaagagcgcatattgaactacgtcaacgagctatgtgaacgcctccccagcccaatgggagagtctgcagttgactgtgcacaactgtcaacaatgcccactgtttcacttaccattggaggcaaagtatttgatcttgctccagaagagtatgttctgaaagttggtgagggacctgtggcacagtgcatcagtggttttattgctcttgacgttgctccacctcgtggacctctctggatcttgggagatgtgttcatgggcaaataccacaccgtatttgactttggtaacgaacaggtcgggtttgcagaggcagcctaaacacgatctggttggtgtcgcgtatggttttagtatgaacaatctgcgtctcaagtgttgtttgtatgttttctggagttgaggactttgagtcgtagtagaaatggtggcgcagttccttttaagttgtttcctaacgaaaaaaggcctttgtagttttgaaggcattggctttgtaaataccttctaagtaagttcgatggtgaaaaaactgaaaactttaataaagcctgcctcttttgttt

SEQ ID NO: 30346 - protein, 278 aa, Arabidopsis thaliana
  peptide (1)..(278): Ceres Seq. ID no. 13500302
  misc_feature (1)..(128): Pfam Name: Eukaryotic aspartyl protease Pfam Description: Eukaryotic aspartyl protease
  misc_feature (1)..(278): Homolog of NCBI NO: 12231174 NR Description: aspartic proteinase 2 [Nepenthes alata]
  misc_feature (1)..(278): Homolog of NCBI NO: 7435837 NR Description: aspartic proteinase (EC 3.4.23.-) - cowpea
  misc_feature (1)..(278): Homolog of NCBI NO: 20800441 NR Description: aspartic proteinase [Vigna unguiculata]
  misc_feature (1)..(278): Homolog of NCBI NO: 2811025 NR Description: Aspartic proteinase precursor
  misc_feature (3)..(277): Homolog of NCBI NO: 22330379 NR Description: aspartic protease -related [Arabidopsis thaliana]
  misc_feature (1)..(247): Homolog of NCBI NO: 541919 NR Description: aspartic proteinase (EC 3.4.23.-) - wild cabbage
  misc_feature (1)..(278): Homolog of NCBI NO: 7488553 NR Description: aspartic proteinase (EC 3.4.23.-) - wild cabbage
  misc_feature (1)..(278): Homolog of NCBI NO: 7435838 NR Description: probable aspartic proteinase (EC 3.4.23.-) 1 -
  misc_feature (1)..(278): Homolog of NCBI NO: 15221141 NR Description: aspartic proteinase -related [Arabidopsis
  misc_feature (1)..(278): Homolog of NCBI NO: 1354272 NR Description: aspartic proteinase [Arabidopsis thaliana]
DEEEGGELVFGGVDPNHFKGKHTYVPVTQKGYWQFDMGDVLIGGAPTGFCESGCSAIADSGTSLLAGPTTIITMINHAIGAAGVVSQQCKTVVDQYGQTILDLLLSETQPKKICSQIGLCTFDGTRGVSMGIESVVDKENAKLSNGVGDAACSACEMAVVWIQSQLRQNMTQERILNYVNELCERLPSPMGESAVDCAQLSTMPTVSLTIGGKVFDLAPEEYVLKVGEGPVAQCISGFIALDVAPPRGPLWILGDVFMGKYHTVFDFGNEQVGFAEAA

SEQ ID NO: 30347 - protein, 242 aa, Arabidopsis thaliana
  peptide (1)..(242): Ceres Seq. ID no. 13500303
  misc_feature (1)..(92): Pfam Name: Eukaryotic aspartyl protease Pfam Description: Eukaryotic aspartyl protease
  misc_feature (1)..(242): Homolog of NCBI NO: 12231174 NR Description: aspartic proteinase 2 [Nepenthes alata]
  misc_feature (1)..(242): Homolog of NCBI NO: 7435837 NR Description: aspartic proteinase (EC 3.4.23.-) - cowpea
  misc_feature (1)..(242): Homolog of NCBI NO: 20800441 NR Description: aspartic proteinase [Vigna unguiculata]
  misc_feature (1)..(242): Homolog of NCBI NO: 2811025 NR Description: Aspartic proteinase precursor
  misc_feature (1)..(241): Homolog of NCBI NO: 22330379 NR Description: aspartic protease -related [Arabidopsis thaliana]
  misc_feature (1)..(211): Homolog of NCBI NO: 541919 NR Description: aspartic proteinase (EC 3.4.23.-) - wild cabbage
  misc_feature (1)..(242): Homolog of NCBI NO: 7488553 NR Description: aspartic proteinase (EC 3.4.23.-) - wild cabbage
  misc_feature (1)..(242): Homolog of NCBI NO: 7435838 NR Description: probable aspartic proteinase (EC 3.4.23.-) 1 -
  misc_feature (1)..(242): Homolog of NCBI NO: 15221141 NR Description: aspartic proteinase -related [Arabidopsis
  misc_feature (1)..(242): Homolog of NCBI NO: 1354272 NR Description: aspartic proteinase [Arabidopsis thaliana]
MGDVLIGGAPTGFCESGCSAIADSGTSLLAGPTTIITMINHAIGAAGVVSQQCKTVVDQYGQTILDLLLSETQPKKICSQIGLCTFDGTRGVSMGIESVVDKENAKLSNGVGDAACSACEMAVVWIQSQLRQNMTQERILNYVNELCERLPSPMGESAVDCAQLSTMPTVSLTIGGKVFDLAPEEYVLKVGEGPVAQCISGFIALDVAPPRGPLWILGDVFMGKYHTVFDFGNEQVGFAEAA

SEQ ID NO: 30348 - protein, 205 aa, Arabidopsis thaliana
  peptide (1)..(205): Ceres Seq. ID no. 13500304
  misc_feature (1)..(55): Pfam Name: Eukaryotic aspartyl protease Pfam Description: Eukaryotic aspartyl protease
  misc_feature (1)..(205): Homolog of NCBI NO: 12231174 NR Description: aspartic proteinase 2 [Nepenthes alata]
  misc_feature (1)..(205): Homolog of NCBI NO: 7435837 NR Description: aspartic proteinase (EC 3.4.23.-) - cowpea
  misc_feature (1)..(205): Homolog of NCBI NO: 20800441 NR Description: aspartic proteinase [Vigna unguiculata]
  misc_feature (1)..(205): Homolog of NCBI NO: 2811025 NR Description: Aspartic proteinase precursor
  misc_feature (1)..(204): Homolog of NCBI NO: 22330379 NR Description: aspartic protease -related [Arabidopsis thaliana]
  misc_feature (1)..(174): Homolog of NCBI NO: 541919 NR Description: aspartic proteinase (EC 3.4.23.-) - wild cabbage
  misc_feature (1)..(205): Homolog of NCBI NO: 7488553 NR Description: aspartic proteinase (EC 3.4.23.-) - wild cabbage
  misc_feature (1)..(205): Homolog of NCBI NO: 7435838 NR Description: probable aspartic proteinase (EC 3.4.23.-) 1 -
  misc_feature (1)..(205): Homolog of NCBI NO: 15221141 NR Description: aspartic proteinase -related [Arabidopsis
  misc_feature (1)..(205): Homolog of NCBI NO: 1354272 NR Description: aspartic proteinase [Arabidopsis thaliana]
MINHAIGAAGVVSQQCKTVVDQYGQTILDLLLSETQPKKICSQIGLCTFDGTRGVSMGIESVVDKENAKLSNGVGDAACSACEMAVVWIQSQLRQNMTQERILNYVNELCERLPSPMGESAVDCAQLSTMPTVSLTIGGKVFDLAPEEYVLKVGEGPVAQCISGFIALDVAPPRGPLWILGDVFMGKYHTVFDFGNEQVGFAEAA

SEQ ID NO: 30349 - DNA, 962 bp, Arabidopsis thaliana
  misc_feature (1)..(962): Ceres Seq. ID no. 12322291
  misc_feature: MA Experiment ID: 108435 Result: Down-regulated in Transcription
  misc_feature: MA Experiment 108435 PARAMETER Experiment Name: At_stm_Mutants_cDNA_P Parameter: Plant Line Value: wt Landsburg vs stm
  misc_feature: MA Experiment 108435 PARAMETER Experiment Name: At_stm_Mutants_cDNA_P Parameter: Tissue Value: Shoot Apical Meristem Region
  misc_feature: MA Experiment ID: 108461 Result: Up-regulated in Transcription
  misc_feature: MA Experiment 108461 PARAMETER Experiment Name: At_Germinating_Seeds_cDNA_P Parameter: Age (day) Value: 1 vs. 0
  misc_feature: MA Experiment 108461 PARAMETER Experiment Name: At_Germinating_Seeds_cDNA_P Parameter: Tissue Value: Germinating Seeds
  misc_feature: MA Experiment ID: 108462 Result: Up-regulated in Transcription
  misc_feature: MA Experiment 108462 PARAMETER Experiment Name: At_Germinating_Seeds_cDNA_P Parameter: Age (day) Value: 2 vs. 0
  misc_feature: MA Experiment 108462 PARAMETER Experiment Name: At_Germinating_Seeds_cDNA_P Parameter: Tissue Value: Germinating Seeds
  misc_feature: MA Experiment ID: 108463 Result: Up-regulated in Transcription
  misc_feature: MA Experiment 108463 PARAMETER Experiment Name: At_Germinating_Seeds_cDNA_P Parameter: Age (day) Value: 3 vs. 0
  misc_feature: MA Experiment 108463 PARAMETER Experiment Name: At_Germinating_Seeds_cDNA_P Parameter: Tissue Value: Germinating Seeds
  misc_feature: MA Experiment ID: 108464 Result: Up-regulated in Transcription
  misc_feature: MA Experiment 108464 PARAMETER Experiment Name: At_Germinating_Seeds_cDNA_P Parameter: Age (day) Value: 4 vs. 0
  misc_feature: MA Experiment 108464 PARAMETER Experiment Name: At_Germinating_Seeds_cDNA_P Parameter: Tissue Value: Germinating Seeds
  misc_feature: MA Experiment ID: 108488 Result: Up-regulated in Transcription
  misc_feature: MA Experiment ID: 108595 Result: Down-regulated in Transcription
  misc_feature: MA Experiment 108595 PARAMETER Experiment Name: At_Ler-pi_Ovule_cDNA_P Parameter: Plant Line Value: null
  misc_feature: MA Experiment ID: 20000069 Result: Down-regulated in Transcription
  misc_feature: MA Experiment 20000069 PARAMETER Experiment Name: At_100uM_ABA_Mutants_cDNA_P Parameter: Plant Line Value: CS23
  misc_feature: MA Experiment 20000069 PARAMETER Experiment Name: At_100uM_ABA_Mutants_cDNA_P Parameter: Timepoint (hr) Value: 6
  misc_feature: MA Experiment 20000069 PARAMETER Experiment Name: At_100uM_ABA_Mutants_cDNA_P Parameter: Tissue Value: Aerial
  misc_feature: MA Experiment 20000069 PARAMETER Experiment Name: At_100uM_ABA_Mutants_cDNA_P Parameter: Treatment Value: 100uM ABA vs. No Treatment
  misc_feature: MA Experiment ID: 20000070 Result: Down-regulated in Transcription
  misc_feature: MA Experiment 20000070 PARAMETER Experiment Name: At_100uM_ABA_Mutants_cDNA_P Parameter: Plant Line Value: CS24
  misc_feature: MA Experiment 20000070 PARAMETER Experiment Name: At_100uM_ABA_Mutants_cDNA_P Parameter: Timepoint (hr) Value: 6
  misc_feature: MA Experiment 20000070 PARAMETER Experiment Name: At_100uM_ABA_Mutants_cDNA_P Parameter: Tissue Value: Aerial
  misc_feature: MA Experiment 20000070 PARAMETER Experiment Name: At_100uM_ABA_Mutants_cDNA_P Parameter: Treatment Value: 100uM ABA vs. No Treatment
  misc_feature: MA Experiment ID: 20000071 Result: Down-regulated in Transcription
  misc_feature: MA Experiment 20000071 PARAMETER Experiment Name: At_100uM_ABA_Mutants_cDNA_P Parameter: Plant Line Value: CS8104
  misc_feature: MA Experiment 20000071 PARAMETER Experiment Name: At_100uM_ABA_Mutants_cDNA_P Parameter: Timepoint (hr) Value: 6
  misc_feature: MA Experiment 20000071 PARAMETER Experiment Name: At_100uM_ABA_Mutants_cDNA_P Parameter: Tissue Value: Aerial
  misc_feature: MA Experiment 20000071 PARAMETER Experiment Name: At_100uM_ABA_Mutants_cDNA_P Parameter: Treatment Value: 100uM ABA vs. No Treatment
  misc_feature: MA Experiment ID: 20000086 Result: Down-regulated in Transcription
  misc_feature: MA Experiment 20000086 PARAMETER Experiment Name: At_100uM_ABA_Mutants_cDNA_P Parameter: Plant Line Value: CS22
  misc_feature: MA Experiment 20000086 PARAMETER Experiment Name: At_100uM_ABA_Mutants_cDNA_P Parameter: Timepoint (hr) Value: 6
  misc_feature: MA Experiment 20000086 PARAMETER Experiment Name: At_100uM_ABA_Mutants_cDNA_P Parameter: Tissue Value: Aerial
  misc_feature: MA Experiment 20000086 PARAMETER Experiment Name: At_100uM_ABA_Mutants_cDNA_P Parameter: Treatment Value: 100uM ABA vs. No Treatment
  misc_feature: MA Experiment ID: 20000087 Result: Down-regulated in Transcription
  misc_feature: MA Experiment 20000087 PARAMETER Experiment Name: At_100uM_ABA_Mutants_cDNA_P Parameter: Plant Line Value: WS
  misc_feature: MA Experiment 20000087 PARAMETER Experiment Name: At_100uM_ABA_Mutants_cDNA_P Parameter: Timepoint (hr) Value: 6
  misc_feature: MA Experiment 20000087 PARAMETER Experiment Name: At_100uM_ABA_Mutants_cDNA_P Parameter: Tissue Value: Aerial
  misc_feature: MA Experiment 20000087 PARAMETER Experiment Name: At_100uM_ABA_Mutants_cDNA_P Parameter: Treatment Value: 100uM ABA vs. No Treatment
  misc_feature: MA Experiment ID: 20000117 Result: Down-regulated in Transcription
  misc_feature: MA Experiment 20000117 PARAMETER Experiment Name: At_100uM_ABA_Mutants_cDNA_P Parameter: Plant Line Value: Columbia
  misc_feature: MA Experiment 20000117 PARAMETER Experiment Name: At_100uM_ABA_Mutants_cDNA_P Parameter: Timepoint (hr) Value: 6
  misc_feature: MA Experiment 20000117 PARAMETER Experiment Name: At_100uM_ABA_Mutants_cDNA_P Parameter: Tissue Value: Aerial
  misc_feature: MA Experiment 20000117 PARAMETER Experiment Name: At_100uM_ABA_Mutants_cDNA_P Parameter: Treatment Value: 100uM ABA vs. No Treatment
  misc_feature: MA Experiment ID: 20000180 Result: Up-regulated in Transcription
  misc_feature: MA Experiment 20000180 PARAMETER Experiment Name: At_Germinating_Seeds_P Parameter: Age (hr) Value: 24 vs. 0
  misc_feature: MA Experiment 20000180 PARAMETER Experiment Name: At_Germinating_Seeds_P Parameter: Tissue Value: Germinating Seeds
  misc_feature: MA Experiment ID: 20000184 Result: Up-regulated in Transcription
  misc_feature: MA Experiment 20000184 PARAMETER Experiment Name: At_Shoots__P Parameter: Age (day) Value: 7
  misc_feature: MA Experiment 20000184 PARAMETER Experiment Name: At_Shoots__P Parameter: Tissue Value: Shoots vs. Whole Plant
  misc_feature: MA Experiment ID: 20000185 Result: Down-regulated in Transcription
  misc_feature: MA Experiment 20000185 PARAMETER Experiment Name: At_Roots__P Parameter: Age (day) Value: 7 vs. 21
  misc_feature: MA Experiment 20000185 PARAMETER Experiment Name: At_Roots__P Parameter: Organism Value: A. thaliana
  misc_feature: MA Experiment 20000185 PARAMETER Experiment Name: At_Roots__P Parameter: Tissue Value: Roots vs. Whole Plant
  misc_feature: MA Experiment ID: 20000438 Result: Up-regulated in Transcription
  misc_feature: MA Experiment 20000438 PARAMETER Experiment Name: At_Shoots__P Parameter: Age (day) Value: 14
  misc_feature: MA Experiment 20000438 PARAMETER Experiment Name: At_Shoots__P Parameter: Tissue Value: Shoots vs. Whole Plant
  misc_feature: MA Experiment ID: 20000439 Result: Down-regulated in Transcription
  misc_feature: MA Experiment 20000439 PARAMETER Experiment Name: At_Roots__P Parameter: Age (day) Value: 14 vs. 21
  misc_feature: MA Experiment 20000439 PARAMETER Experiment Name: At_Roots__P Parameter: Organism Value: A. thaliana
  misc_feature: MA Experiment 20000439 PARAMETER Experiment Name: At_Roots__P Parameter: Tissue Value: Roots vs. Whole Plant
  misc_feature: MA Experiment ID: 20000495 Result: Down-regulated in Transcription
  misc_feature: MA Experiment 20000495 PARAMETER Experiment Name: At_Guard_Cells_P Parameter: Harvest Date Value: 8/2/2002
  misc_feature: MA Experiment 20000495 PARAMETER Experiment Name: At_Guard_Cells_P Parameter: Organism Value: A. thaliana
  misc_feature: MA Experiment 20000495 PARAMETER Experiment Name: At_Guard_Cells_P Parameter: Tissue Value: Guard Cells vs. Leaves
  misc_feature: MA Experiment ID: 20000794 Result: Down-regulated in Transcription
  misc_feature: MA Experiment 20000794 PARAMETER Experiment Name: At_Petals_P Parameter: Age (day) Value: 23-25 days
  misc_feature: MA Experiment 20000794 PARAMETER Experiment Name: At_Petals_P Parameter: Plant Line Value: WS
  misc_feature: MA Experiment 20000794 PARAMETER Experiment Name: At_Petals_P Parameter: Tissue Value: Petals vs. Whole plant
  misc_feature: MA Experiment ID: 20001248 Result: Down-regulated in Transcription
  misc_feature: MA Experiment 20001248 PARAMETER Experiment Name: At_Far-red-induction_P Parameter: Age (day) Value: 7
  misc_feature: MA Experiment 20001248 PARAMETER Experiment Name: At_Far-red-induction_P Parameter: Light Value: Far-red vs. White
  misc_feature: MA Experiment 20001248 PARAMETER Experiment Name: At_Far-red-induction_P Parameter: Organism Value: A. thaliana
  misc_feature: MA Experiment 20001248 PARAMETER Experiment Name: At_Far-red-induction_P Parameter: Plant Line Value: Columbia
  misc_feature: MA Experiment 20001248 PARAMETER Experiment Name: At_Far-red-induction_P Parameter: Timepoint (hr) Value: 4
  misc_feature: MA Experiment 20001248 PARAMETER Experiment Name: At_Far-red-induction_P Parameter: Tissue Value: Whole Plant
  misc_feature: MA Experiment ID: 20001450 Result: Down-regulated in Transcription
  misc_feature: MA Experiment 20001450 PARAMETER Experiment Name: At_Far-red-induction_P Parameter: Age (day) Value: 7
  misc_feature: MA Experiment 20001450 PARAMETER Experiment Name: At_Far-red-induction_P Parameter: Light Value: Far-red vs. White
  misc_feature: MA Experiment 20001450 PARAMETER Experiment Name: At_Far-red-induction_P Parameter: Organism Value: A. thaliana
  misc_feature: MA Experiment 20001450 PARAMETER Experiment Name: At_Far-red-induction_P Parameter: Plant Line Value: Columbia
  misc_feature: MA Experiment 20001450 PARAMETER Experiment Name: At_Far-red-induction_P Parameter: Timepoint (hr) Value: 8
  misc_feature: MA Experiment 20001450 PARAMETER Experiment Name: At_Far-red-induction_P Parameter: Tissue Value: Whole Plant
  misc_feature: MA Experiment ID: 20001451 Result: Down-regulated in Transcription
  misc_feature: MA Experiment 20001451 PARAMETER Experiment Name: At_Far-red-induction_P Parameter: Age (day) Value: 7
  misc_feature: MA Experiment 20001451 PARAMETER Experiment Name: At_Far-red-induction_P Parameter: Light Value: Far-red vs. White
  misc_feature: MA Experiment 20001451 PARAMETER Experiment Name: At_Far-red-induction_P Parameter: Organism Value: A. thaliana
  misc_feature: MA Experiment 20001451 PARAMETER Experiment Name: At_Far-red-induction_P Parameter: Plant Line Value: Columbia
  misc_feature: MA Experiment 20001451 PARAMETER Experiment Name: At_Far-red-induction_P Parameter: Timepoint (hr) Value: 24
  misc_feature: MA Experiment 20001451 PARAMETER Experiment Name: At_Far-red-induction_P Parameter: Tissue Value: Whole Plant
  misc_feature: MA Experiment ID: 20001557 Result: Down-regulated in Transcription
  misc_feature: MA Experiment 20001557 PARAMETER Experiment Name: At_Drought_Soil_Dry_P Parameter: Age (day) Value: 27
  misc_feature: MA Experiment 20001557 PARAMETER Experiment Name: At_Drought_Soil_Dry_P Parameter: Organism Value: A. thaliana
  misc_feature: MA Experiment 20001557 PARAMETER Experiment Name: At_Drought_Soil_Dry_P Parameter: Plant Line Value: WS
  misc_feature: MA Experiment 20001557 PARAMETER Experiment Name: At_Drought_Soil_Dry_P Parameter: Post Timepoint (hr) Value: 3
  misc_feature: MA Experiment 20001557 PARAMETER Experiment Name: At_Drought_Soil_Dry_P Parameter: Post-Treatment Value: Re-Water vs. No Drought
  misc_feature: MA Experiment 20001557 PARAMETER Experiment Name: At_Drought_Soil_Dry_P Parameter: Timepoint (day) Value: 13
  misc_feature: MA Experiment 20001557 PARAMETER Experiment Name: At_Drought_Soil_Dry_P Parameter: Treatment Value: Drought vs. No Drought
  misc_feature: MA Experiment ID: 20001757 Result: Up-regulated in Transcription
  misc_feature: MA Experiment 20001757 PARAMETER Experiment Name: At_50mM_NH4NO3_L-to-H_P Parameter: Timepoint (hr) Value: 6
  misc_feature: MA Experiment 20001757 PARAMETER Experiment Name: At_50mM_NH4NO3_L-to-H_P Parameter: Tissue Value: Leaf
  misc_feature: MA Experiment 20001757 PARAMETER Experiment Name: At_50mM_NH4NO3_L-to-H_P Parameter: Treatment Value: 50mM NH4NO3 vs 100mM Mannitol
  misc_feature: MA Experiment ID: 20001905 Result: Down-regulated in Transcription
  misc_feature: MA Experiment 20001905 PARAMETER Experiment Name: At_Drought_Reproduction_P Parameter: Age (day) Value: 40
  misc_feature: MA Experiment 20001905 PARAMETER Experiment Name: At_Drought_Reproduction_P Parameter: Organism Value: A. thaliana
  misc_feature: MA Experiment 20001905 PARAMETER Experiment Name: At_Drought_Reproduction_P Parameter: Plant Line Value: WS
  misc_feature: MA Experiment 20001905 PARAMETER Experiment Name: At_Drought_Reproduction_P Parameter: Timepoint (day) Value: 10
  misc_feature: MA Experiment 20001905 PARAMETER Experiment Name: At_Drought_Reproduction_P Parameter: Tissue Value: Rosettes
  misc_feature: MA Experiment 20001905 PARAMETER Experiment Name: At_Drought_Reproduction_P Parameter: Treatment Value: Drought vs. No Drought
  misc_feature: Phenotype: WHOLE PLANT Color-Yellow-Green Viable 1
  misc_feature: Phenotype: INFLORESCENCE Flowering Time-Late Flowering
  misc_feature: Phenotype: WHOLE PLANT Color-Yellow-Green Viable 1
  misc_feature: Phenotype: INFLORESCENCE Flowering Time-Late Flowering
  misc_feature: Phenotype: ROSETTE LEAVES Curled-Curled 2
  misc_feature: Phenotype: WHOLE PLANT Color-Yellow-Green Viable 1
  misc_feature: Phenotype: INFLORESCENCE Flowering Time-Late Flowering
acacataacacacacacatcttcttcctctctttatcttcttcttctctgtttctctaagaagatagaacaatcccaagattctcctcttatttgatcaaccatgtcgaatgtcttgctatccccaaacggctacgtatttgcatcgcctaaacctcttggcagattcatcaattcaaagtccggcggacggaaacttttcttctccgtcgttagagcttcttccgatgatgctgattgtaatgccgaagaatgtgctcccgagaaggaggtaggaacagtgagtatggaatggttagctggagagaagacgaaagtggtgggaacatttcctcctcggaagccgcgtggttggactggctatgttgagaaagatactgctggtcagactaatgtttactccattgagcctgcagtatatgttgcagagagcgcgattagctcaggtactgcaggatcatcggctgatggggctgagaacacagcagcaatcgtagcaggcattgctcttatcgcagtcgctgcagcttcctctatactcctccaagtcgggaaagatgccccaactcgacccaaagcagtggattacagtggaccgtctcttagctactacatcaacaagttcaagccttctgaaattgttcaaccttctaccccctccgtcacagaagccccaccggtggccgagctagaaacttcactgccagaaactccatcggtggctcagcaagaaacctcactgccggaaactatggctagtgaggctcagccagaggcgtcttctgttccaacaacaagtagtacctcttaggggcttagcctaggattatatctttgtgtaaaaatgagatgaagcatataccaagattatgcattctgttaatattcggatatacctatatgtatgtatacactctgtcactcttctctttgagtgaatgattatatcaaatctcaaatccc

SEQ ID NO: 30350 - protein, 235 aa, Arabidopsis thaliana
  peptide (1)..(235): Ceres Seq. ID no. 12322292
  misc_feature (1)..(235): Homolog of NCBI NO: 21553857 NR Description: unknown [Arabidopsis thaliana]
  misc_feature (1)..(235): Homolog of NCBI NO: 18415378 NR Description: expressed protein
MSNVLLSPNGYVFASPKPLGRFINSKSGGRKLFFSVVRASSDDADCNAEECAPEKEVGTVSMEWLAGEKTKVVGTFPPRKPRGWTGYVEKDTAGQTNVYSIEPAVYVAESAISSGTAGSSADGAENTAAIVAGIALIAVAAASSILLQVGKDAPTRPKAVDYSGPSLSYYINKFKPSEIVQPSTPSVTEAPPVAELETSLPETPSVAQQETSLPETMASEAQPEASSVPTTSSTS

SEQ ID NO: 30351 - protein, 174 aa, Arabidopsis thaliana
  peptide (1)..(174): Ceres Seq. ID no. 12322293
  misc_feature (1)..(174): Homolog of NCBI NO: 21553857 NR Description: unknown [Arabidopsis thaliana]
  misc_feature (1)..(174): Homolog of NCBI NO: 18415378 NR Description: expressed protein
MEWLAGEKTKVVGTFPPRKPRGWTGYVEKDTAGQTNVYSIEPAVYVAESAISSGTAGSSADGAENTAAIVAGIALIAVAAASSILLQVGKDAPTRPKAVDYSGPSLSYYINKFKPSEIVQPSTPSVTEAPPVAELETSLPETPSVAQQETSLPETMASEAQPEASSVPTTSSTS

SEQ ID NO: 30352 - DNA, 1886 bp, Arabidopsis thaliana
  misc_feature (1)..(1886): Ceres Seq. ID no. 13492392
  misc_feature: MA Experiment ID: 108434 Result: Up-regulated in Transcription
  misc_feature: MA Experiment 108434 PARAMETER Experiment Name: At_Root_Tips_cDNA_P Parameter: Tissue Value: Root Tips
  misc_feature: MA Experiment ID: 20000113 Result: Down-regulated in Transcription
  misc_feature: MA Experiment 20000113 PARAMETER Experiment Name: At_42deg_Heat_cDNA_P Parameter: Temperature (deg C) Value: 42 vs. 22
  misc_feature: MA Experiment 20000113 PARAMETER Experiment Name: At_42deg_Heat_cDNA_P Parameter: Timepoint (hr) Value: 8
  misc_feature: MA Experiment 20000113 PARAMETER Experiment Name: At_42deg_Heat_cDNA_P Parameter: Tissue Value: Aerial
aacacaaaacagtaatctctctagactacaactttactcacttcaccagctctcacttgatgacaatgggcgactctgacctccgtaaacctaccaatttcggcaccggacatctatctcgccgacgatcatggtgttgctctttcgccgtacctccagcgagtcctgatgctcgttcgatttcatctcgtaaccacattccagctaaatctcagcagcagagacctaaactggttccttgctcaccgcaaagctctaaatctgctttaaacatcgtaaatcggatcgacccgcgtcggatcttatcaccgggtcgggtttctcccatagattcggatccgaccttcactacaatgcaagaagctgataccactcaggaagaagaagatgatgcggttgttgtagattcgacaccgaatctgcgttctgagagttatagagctccgaagattgaggttacgggttcgggtttgagtgagggttacgatgctaggttgagtttgaagggaagaaatggtggtggggttttggtgttggagcttagctcggaggttttggctgcgaattcggatgtgttctcgggtttgattgcggaggagaagaagtgttcttcttcttcttcatcgtctttaggattgaagaacacatgcaggattgaagtatgtgatgtggagaatcttggtgtttttagggaaactgttgagctcatgtttgaggagagtaatgttattatcaagaagtttatgaaaatgggtgtctacagagccattgatgtacttgaggtagcgactggaatcaaattttcaagagctgtcttatcgtgtctgaaatatcttgaagctgttccttggacagaggatgaagaggaaaaactgaggagacttcttggaatttatagctttgatgatgctgcagttagtgaaattttggcaagatttaattcaaacgagacagaaaactcgcaagacagtttatcgaagaaactggtttggtcaattacttcctgtagtgatgtaaatcctagaaacgaactcaaatctttggtgaagggtcttctttgcaaaagctcagtgtacgagaaagaacagcctgagatcaacaaggaagacatatatagagcaggcaagtgttgtgtggattcattagctaagctgtttgaagagggcagtagtagtagtagtagcaataaagaaaagccattgattgaaagtatttcgagggaggttgagaacataaactggctgctggagatcatgatagatcgggaaatagcagaagaatttgtggagatatgggggaagcaaagaaggctagtggagatgcatgagagagtgtcaccaatggtgaggtatgaagtaagcagagtaacaggagcgatatttattgcaatggggaaaaggagagtgcaatgcggaggagaagcaagggcggggctagtagaagtgtggttcaagccaatgttagtagattttgggtggctacagagatgcaagaagggactagacatgagggaagtagaagaagggatggggcaaacgctgttaacactaccagtaaaacagcagtatcaagtgttcatggaatggttcaggtggttctcaaagcatgggactgagtgccctaatctcagcaaggcgtttcagatatggtggcgtaggtcattccttagaggtgtagaatcatctacttgtaggtaaacaaattattccaagtgttcaagaggctatgtatgttaggtttaagcttttatggaaatttagactgtaatataattctctccttttgtctcctcccacatgatatgttcgtttcggatgttttttggagctaaatcagtcgtaaggtttgaaaaagcaagtacaaaacacaaactggtactttcttcc

SEQ ID NO: 30353 - protein, 564 aa, Arabidopsis thaliana
  peptide (1)..(564): Ceres Seq. ID no. 15222883
  misc_feature (158)..(556): Homolog of NCBI NO: 38230508 NR Description: predicted protein [Populus alba x Populus tremula]
  misc_feature (37)..(238): Homolog of NCBI NO: 38347118 NR Description: OSJNBa0009K15.15 [Oryza sativa (japonica
  misc_feature (259)..(560): Homolog of NCBI NO: 38347118 NR Description: OSJNBa0009K15.15 [Oryza sativa (japonica
  misc_feature (42)..(75): Homolog of NCBI NO: 34900946 NR Description: putative PRLI-interacting factor G
  misc_feature (53)..(556): Homolog of NCBI NO: 34900946 NR Description: putative PRLI-interacting factor G
  misc_feature (342)..(564): Homolog of NCBI NO: 11139264 NR Description: PRLI-interacting factor G [Arabidopsis thaliana]
  misc_feature (22)..(564): Homolog of NCBI NO: 25338924 NR Description: hypothetical protein At2g13690 [imported] -
  misc_feature (20)..(564): Homolog of NCBI NO: 39104567 NR Description: putative f13j11 PRLI-interacting factor G
  misc_feature (20)..(564): Homolog of NCBI NO: 18397316 NR Description: f13j11 PRLI-interacting factor G -related
  misc_feature (22)..(564): Homolog of NCBI NO: 21553858 NR Description: unknown [Arabidopsis thaliana]
HKTVISLDYNFTHFTSSHLMTMGDSDLRKPTNFGTGHLSRRRSWCCSFAVPPASPDARSISSRNHIPAKSQQQRPKLVPCSPQSSKSALNIVNRIDPRRILSPGRVSPIDSDPTFTTMQEADTTQEEEDDAVVVDSTPNLRSESYRAPKIEVTGSGLSEGYDARLSLKGRNGGGVLVLELSSEVLAANSDVFSGLIAEEKKCSSSSSSSLGLKNTCRIEVCDVENLGVFRETVELMFEESNVIIKKFMKMGVYRAIDVLEVATGIKFSRAVLSCLKYLEAVPWTEDEEEKLRRLLGIYSFDDAAVSEILARFNSNETENSQDSLSKKLVWSITSCSDVNPRNELKSLVKGLLCKSSVYEKEQPEINKEDIYRAGKCCVDSLAKLFEEGSSSSSSNKEKPLIESISREVENINWLLEIMIDREIAEEFVEIWGKQRRLVEMHERVSPMVRYEVSRVTGAIFIAMGKRRVQCGGEARAGLVEVWFKPMLVDFGWLQRCKKGLDMREVEEGMGQTLLTLPVKQQYQVFMEWFRWFSKHGTECPNLSKAFQIWWRRSFLRGVESSTCR

SEQ ID NO: 30354 - protein, 545 aa, Arabidopsis thaliana
  peptide (1)..(545): Ceres Seq. ID no. 15222884
  misc_feature (139)..(537): Homolog of NCBI NO: 38230508 NR Description: predicted protein [Populus alba x Populus tremula]
  misc_feature (18)..(219): Homolog of NCBI NO: 38347118 NR Description: OSJNBa0009K15.15 [Oryza sativa (japonica
  misc_feature (240)..(541): Homolog of NCBI NO: 38347118 NR Description: OSJNBa0009K15.15 [Oryza sativa (japonica
  misc_feature (23)..(56): Homolog of NCBI NO: 34900946 NR Description: putative PRLI-interacting factor G
  misc_feature (34)..(537): Homolog of NCBI NO: 34900946 NR Description: putative PRLI-interacting factor G
  misc_feature (323)..(545): Homolog of NCBI NO: 11139264 NR Description: PRLI-interacting factor G [Arabidopsis thaliana]
  misc_feature (3)..(545): Homolog of NCBI NO: 25338924 NR Description: hypothetical protein At2g13690 [imported] -
  misc_feature (1)..(545): Homolog of NCBI NO: 39104567 NR Description: putative f13j11 PRLI-interacting factor G
  misc_feature (1)..(545): Homolog of NCBI NO: 18397316 NR Description: f13j11 PRLI-interacting factor G -related
  misc_feature (3)..(545): Homolog of NCBI NO: 21553858 NR Description: unknown [Arabidopsis thaliana]
MTMGDSDLRKPTNFGTGHLSRRRSWCCSFAVPPASPDARSISSRNHIPAKSQQQRPKLVPCSPQSSKSALNIVNRIDPRRILSPGRVSPIDSDPTFTTMQEADTTQEEEDDAVVVDSTPNLRSESYRAPKIEVTGSGLSEGYDARLSLKGRNGGGVLVLELSSEVLAANSDVFSGLIAEEKKCSSSSSSSLGLKNTCRIEVCDVENLGVFRETVELMFEESNVIIKKFMKMGVYRAIDVLEVATGIKFSRAVLSCLKYLEAVPWTEDEEEKLRRLLGIYSFDDAAVSEILARFNSNETENSQDSLSKKLVWSITSCSDVNPRNELKSLVKGLLCKSSVYEKEQPEINKEDIYRAGKCCVDSLAKLFEEGSSSSSSNKEKPLIESISREVENINWLLEIMIDREIAEEFVEIWGKQRRLVEMHERVSPMVRYEVSRVTGAIFIAMGKRRVQCGGEARAGLVEVWFKPMLVDFGWLQRCKKGLDMREVEEGMGQTLLTLPVKQQYQVFMEWFRWFSKHGTECPNLSKAFQIWWRRSFLRGVESSTCR

SEQ ID NO: 30355 - protein, 543 aa, Arabidopsis thaliana
  peptide (1)..(543): Ceres Seq. ID no. 15222885
  misc_feature (137)..(535): Homolog of NCBI NO: 38230508 NR Description: predicted protein [Populus alba x Populus tremula]
  misc_feature (16)..(217): Homolog of NCBI NO: 38347118 NR Description: OSJNBa0009K15.15 [Oryza sativa (japonica
  misc_feature (238)..(539): Homolog of NCBI NO: 38347118 NR Description: OSJNBa0009K15.15 [Oryza sativa (japonica
  misc_feature (21)..(54): Homolog of NCBI NO: 34900946 NR Description: putative PRLI-interacting factor G
  misc_feature (32)..(535): Homolog of NCBI NO: 34900946 NR Description: putative PRLI-interacting factor G
  misc_feature (321)..(543): Homolog of NCBI NO: 11139264 NR Description: PRLI-interacting factor G [Arabidopsis thaliana]
  misc_feature (1)..(543): Homolog of NCBI NO: 25338924 NR Description: hypothetical protein At2g13690 [imported] -
  misc_feature (1)..(543): Homolog of NCBI NO: 39104567 NR Description: putative f13j11 PRLI-interacting factor G
  misc_feature (1)..(543): Homolog of NCBI NO: 18397316 NR Description: f13j11 PRLI-interacting factor G -related
  misc_feature (1)..(543): Homolog of NCBI NO: 21553858 NR Description: unknown [Arabidopsis thaliana]
MGDSDLRKPTNFGTGHLSRRRSWCCSFAVPPASPDARSISSRNHIPAKSQQQRPKLVPCSPQSSKSALNIVNRIDPRRILSPGRVSPIDSDPTFTTMQEADTTQEEEDDAVVVDSTPNLRSESYRAPKIEVTGSGLSEGYDARLSLKGRNGGGVLVLELSSEVLAANSDVFSGLIAEEKKCSSSSSSSLGLKNTCRIEVCDVENLGVFRETVELMFEESNVIIKKFMKMGVYRAIDVLEVATGIKFSRAVLSCLKYLEAVPWTEDEEEKLRRLLGIYSFDDAAVSEILARFNSNETENSQDSLSKKLVWSITSCSDVNPRNELKSLVKGLLCKSSVYEKEQPEINKEDIYRAGKCCVDSLAKLFEEGSSSSSSNKEKPLIESISREVENINWLLEIMIDREIAEEFVEIWGKQRRLVEMHERVSPMVRYEVSRVTGAIFIAMGKRRVQCGGEARAGLVEVWFKPMLVDFGWLQRCKKGLDMREVEEGMGQTLLTLPVKQQYQVFMEWFRWFSKHGTECPNLSKAFQIWWRRSFLRGVESSTCR

SEQ ID NO: 30356 - DNA, 1999 bp, Arabidopsis thaliana; identical to SEQ ID NO: 26468
  misc_feature (1)..(1999): Ceres Seq. ID no. 12327028
  misc_feature: MA Experiment ID: 108434 Result: Up-regulated in Transcription
  misc_feature: MA Experiment 108434 PARAMETER Experiment Name: At_Root_Tips_cDNA_P Parameter: Tissue Value: Root Tips
  misc_feature: MA Experiment ID: 108463 Result: Down-regulated in Transcription
  misc_feature: MA Experiment 108463 PARAMETER Experiment Name: At_Germinating_Seeds_cDNA_P Parameter: Age (day) Value: 3 vs. 0
  misc_feature: MA Experiment 108463 PARAMETER Experiment Name: At_Germinating_Seeds_cDNA_P Parameter: Tissue Value: Germinating Seeds
  misc_feature: MA Experiment ID: 108572 Result: Down-regulated in Transcription
  misc_feature: MA Experiment 108572 PARAMETER Experiment Name: At_Drought_cDNA_P Parameter: Timepoint (hr) Value: 1
  misc_feature: MA Experiment 108572 PARAMETER Experiment Name: At_Drought_cDNA_P Parameter: Tissue Value: Aerial
  misc_feature: MA Experiment 108572 PARAMETER Experiment Name: At_Drought_cDNA_P Parameter: Treatment Value: Drought vs. No Drought
  misc_feature: MA Experiment ID: 108573 Result: Down-regulated in Transcription
  misc_feature: MA Experiment 108573 PARAMETER Experiment Name: At_Drought_cDNA_P Parameter: Timepoint (hr) Value: 6
  misc_feature: MA Experiment 108573 PARAMETER Experiment Name: At_Drought_cDNA_P Parameter: Tissue Value: Aerial
  misc_feature: MA Experiment 108573 PARAMETER Experiment Name: At_Drought_cDNA_P Parameter: Treatment Value: Drought vs. No Drought
  misc_feature: MA Experiment ID: 20000087 Result: Up-regulated in Transcription
  misc_feature: MA Experiment 20000087 PARAMETER Experiment Name: At_100uM_ABA_Mutants_cDNA_P Parameter: Plant Line Value: WS
  misc_feature: MA Experiment 20000087 PARAMETER Experiment Name: At_100uM_ABA_Mutants_cDNA_P Parameter: Timepoint (hr) Value: 6
  misc_feature: MA Experiment 20000087 PARAMETER Experiment Name: At_100uM_ABA_Mutants_cDNA_P Parameter: Tissue Value: Aerial
  misc_feature: MA Experiment 20000087 PARAMETER Experiment Name: At_100uM_ABA_Mutants_cDNA_P Parameter: Treatment Value: 100uM ABA vs. No Treatment
  misc_feature: MA Experiment ID: 20000089 Result: Up-regulated in Transcription
  misc_feature: MA Experiment ID: 20000090 Result: Up-regulated in Transcription
  misc_feature: MA Experiment ID: 20000093 Result: Up-regulated in Transcription
  misc_feature: MA Experiment 20000093 PARAMETER Experiment Name: At_42deg_Heat_cDNA_P Parameter: Temperature (deg C) Value: 42 vs. 22
  misc_feature: MA Experiment 20000093 PARAMETER Experiment Name: At_42deg_Heat_cDNA_P Parameter: Timepoint (hr) Value: 0.5
  misc_feature: MA Experiment 20000093 PARAMETER Experiment Name: At_42deg_Heat_cDNA_P Parameter: Tissue Value: Aerial
  misc_feature: MA Experiment ID: 20000111 Result: Up-regulated in Transcription
  misc_feature: MA Experiment 20000111 PARAMETER Experiment Name: At_42deg_Heat_cDNA_P Parameter: Temperature (deg C) Value: 42 vs. 22
  misc_feature: MA Experiment 20000111 PARAMETER Experiment Name: At_42deg_Heat_cDNA_P Parameter: Timepoint (hr) Value: 6
  misc_feature: MA Experiment 20000111 PARAMETER Experiment Name: At_42deg_Heat_cDNA_P Parameter: Tissue Value: Aerial
  misc_feature: MA Experiment ID: 20000112 Result: Up-regulated in Transcription
  misc_feature: MA Experiment 20000112 PARAMETER Experiment Name: At_42deg_Heat_cDNA_P Parameter: Temperature (deg C) Value: 42 vs. 22
  misc_feature: MA Experiment 20000112 PARAMETER Experiment Name: At_42deg_Heat_cDNA_P Parameter: Timepoint (hr) Value: 2
  misc_feature: MA Experiment 20000112 PARAMETER Experiment Name: At_42deg_Heat_cDNA_P Parameter: Tissue Value: Aerial
  misc_feature: MA Experiment ID: 20000113 Result: Up-regulated in Transcription
  misc_feature: MA Experiment 20000113 PARAMETER Experiment Name: At_42deg_Heat_cDNA_P Parameter: Temperature (deg C) Value: 42 vs. 22
  misc_feature: MA Experiment 20000113 PARAMETER Experiment Name: At_42deg_Heat_cDNA_P Parameter: Timepoint (hr) Value: 8
  misc_feature: MA Experiment 20000113 PARAMETER Experiment Name: At_42deg_Heat_cDNA_P Parameter: Tissue Value: Aerial
  misc_feature: MA Experiment ID: 20000144 Result: Up-regulated in Transcription
  misc_feature: MA Experiment 20000144 PARAMETER Experiment Name: At_42deg_Heat_cDNA_P Parameter: Temperature (deg C) Value: 42 vs. 22
  misc_feature: MA Experiment 20000144 PARAMETER Experiment Name: At_42deg_Heat_cDNA_P Parameter: Timepoint (hr) Value: 1
  misc_feature: MA Experiment 20000144 PARAMETER Experiment Name: At_42deg_Heat_cDNA_P Parameter: Tissue Value: Aerial
  misc_feature: MA Experiment ID: 20000171 Result: Up-regulated in Transcription
  misc_feature: MA Experiment 20000171 PARAMETER Experiment Name: At_42deg_Heat_P Parameter: Age (day) Value: 14
  misc_feature: MA Experiment 20000171 PARAMETER Experiment Name: At_42deg_Heat_P Parameter: Organism Value: A. thaliana
  misc_feature: MA Experiment 20000171 PARAMETER Experiment Name: At_42deg_Heat_P Parameter: Plant Line Value: WS
  misc_feature: MA Experiment 20000171 PARAMETER Experiment Name: At_42deg_Heat_P Parameter: Temperature (deg C) Value: 42 vs. 22
  misc_feature: MA Experiment 20000171 PARAMETER Experiment Name: At_42deg_Heat_P Parameter: Timepoint (hr) Value: 1
  misc_feature: MA Experiment 20000171 PARAMETER Experiment Name: At_42deg_Heat_P Parameter: Tissue Value: Aerial
  misc_feature: MA Experiment ID: 20000173 Result: Up-regulated in Transcription
  misc_feature: MA Experiment 20000173 PARAMETER Experiment Name: At_42deg_Heat_P Parameter: Age (day) Value: 14
  misc_feature: MA Experiment 20000173 PARAMETER Experiment Name: At_42deg_Heat_P Parameter: Organism Value: A. thaliana
  misc_feature: MA Experiment 20000173 PARAMETER Experiment Name: At_42deg_Heat_P Parameter: Plant Line Value: WS
  misc_feature: MA Experiment 20000173 PARAMETER Experiment Name: At_42deg_Heat_P Parameter: Temperature (deg C) Value: 42 vs. 22
  misc_feature: MA Experiment 20000173 PARAMETER Experiment Name: At_42deg_Heat_P Parameter: Timepoint (hr) Value: 6
  misc_feature: MA Experiment 20000173 PARAMETER Experiment Name: At_42deg_Heat_P Parameter: Tissue Value: Aerial
  misc_feature: MA Experiment ID: 20000179 Result: Up-regulated in Transcription
  misc_feature: MA Experiment 20000179 PARAMETER Experiment Name: At_Germinating_Seeds_P Parameter: Age (hr) Value: 6 vs. 0
  misc_feature: MA Experiment 20000179 PARAMETER Experiment Name: At_Germinating_Seeds_P Parameter: Tissue Value: Germinating Seeds
  misc_feature: MA Experiment ID: 20000224 Result: Up-regulated in Transcription
  misc_feature: MA Experiment ID: 20000227 Result: Up-regulated in Transcription
  misc_feature: MA Experiment 20000227 PARAMETER Experiment Name: At_Root-Tips-vs-Tops_P Parameter: Tissue Value: Root Tips vs. Root Tops
  misc_feature: MA Experiment ID: 20000437 Result: Down-regulated in Transcription
  misc_feature: MA Experiment 20000437 PARAMETER Experiment Name: At_Drought_P Parameter: Age (day) Value: 8
  misc_feature: MA Experiment 20000437 PARAMETER Experiment Name: At_Drought_P Parameter: Organism Value: A. thaliana
  misc_feature: MA Experiment 20000437 PARAMETER Experiment Name: At_Drought_P Parameter: Plant Line Value: WS
  misc_feature: MA Experiment 20000437 PARAMETER Experiment Name: At_Drought_P Parameter: Timepoint (hr) Value: 24
  misc_feature: MA Experiment 20000437 PARAMETER Experiment Name: At_Drought_P Parameter: Tissue Value: Whole Plant
  misc_feature: MA Experiment 20000437 PARAMETER Experiment Name: At_Drought_P Parameter: Treatment Value: Drought vs. No Drought
  misc_feature: MA Experiment ID: 20000495 Result: Up-regulated in Transcription
  misc_feature: MA Experiment 20000495 PARAMETER Experiment Name: At_Guard_Cells_P Parameter: Harvest Date Value: 8/2/2002
  misc_feature: MA Experiment 20000495 PARAMETER Experiment Name: At_Guard_Cells_P Parameter: Organism Value: A. thaliana
  misc_feature: MA Experiment 20000495 PARAMETER Experiment Name: At_Guard_Cells_P Parameter: Tissue Value: Guard Cells vs. Leaves
  misc_feature: MA Experiment ID: 20001450 Result: Down-regulated in Transcription
  misc_feature: MA Experiment 20001450 PARAMETER Experiment Name: At_Far-red-induction_P Parameter: Age (day) Value: 7
  misc_feature: MA Experiment 20001450 PARAMETER Experiment Name: At_Far-red-induction_P Parameter: Light Value: Far-red vs. White
  misc_feature: MA Experiment 20001450 PARAMETER Experiment Name: At_Far-red-induction_P Parameter: Organism Value: A. thaliana
  misc_feature: MA Experiment 20001450 PARAMETER Experiment Name: At_Far-red-induction_P Parameter: Plant Line Value: Columbia
  misc_feature: MA Experiment 20001450 PARAMETER Experiment Name: At_Far-red-induction_P Parameter: Timepoint (hr) Value: 8
  misc_feature: MA Experiment 20001450 PARAMETER Experiment Name: At_Far-red-induction_P Parameter: Tissue Value: Whole Plant
  misc_feature: MA Experiment ID: 20001558 Result: Up-regulated in Transcription
  misc_feature: MA Experiment 20001558 PARAMETER Experiment Name: At_Drought_Soil_Dry_P Parameter: Age (day) Value: 27
  misc_feature: MA Experiment 20001558 PARAMETER Experiment Name: At_Drought_Soil_Dry_P Parameter: Organism Value: A. thaliana
  misc_feature: MA Experiment 20001558 PARAMETER Experiment Name: At_Drought_Soil_Dry_P Parameter: Plant Line Value: WS
  misc_feature: MA Experiment 20001558 PARAMETER Experiment Name: At_Drought_Soil_Dry_P Parameter: Post Timepoint (hr) Value: 6
  misc_feature: MA Experiment 20001558 PARAMETER Experiment Name: At_Drought_Soil_Dry_P Parameter: Post-Treatment Value: Re-Water vs. No Drought
  misc_feature: MA Experiment 20001558 PARAMETER Experiment Name: At_Drought_Soil_Dry_P Parameter: Timepoint (day) Value: 13
  misc_feature: MA Experiment 20001558 PARAMETER Experiment Name: At_Drought_Soil_Dry_P Parameter: Treatment Value: Drought vs. No Drought
  misc_feature: MA Experiment ID: 20001560 Result: Up-regulated in Transcription
  misc_feature: MA Experiment 20001560 PARAMETER Experiment Name: At_Drought_Soil_Dry_P Parameter: Age (day) Value: 28
  misc_feature: MA Experiment 20001560 PARAMETER Experiment Name: At_Drought_Soil_Dry_P Parameter: Organism Value: A. thaliana
  misc_feature: MA Experiment 20001560 PARAMETER Experiment Name: At_Drought_Soil_Dry_P Parameter: Plant Line Value: WS
  misc_feature: MA Experiment 20001560 PARAMETER Experiment Name: At_Drought_Soil_Dry_P Parameter: Post Timepoint (hr) Value: None
  misc_feature: MA Experiment 20001560 PARAMETER Experiment Name: At_Drought_Soil_Dry_P Parameter: Post-Treatment Value: None
  misc_feature: MA Experiment 20001560 PARAMETER Experiment Name: At_Drought_Soil_Dry_P Parameter: Timepoint (day) Value: 14
  misc_feature: MA Experiment 20001560 PARAMETER Experiment Name: At_Drought_Soil_Dry_P Parameter: Treatment Value: Drought vs. No Drought

SEQ ID NO: 30357 - protein, 567 aa, Arabidopsis thaliana; identical to SEQ ID NO: 26469
  peptide (1)..(567): Ceres Seq. ID no. 12327029
  misc_feature (66)..(423): Pfam Name: Calreticulin family Pfam Description: Calreticulin family
  misc_feature (66)..(423): Pfam Name: Calreticulin family Pfam Description: Calreticulin family
  misc_feature (73)..(556): Homolog of NCBI NO: 40740610 NR Description: hypothetical protein AN3592.2 [Aspergillus
  misc_feature (149)..(564): Homolog of NCBI NO: 7441503 NR Description: calnexin - maize (fragment)
  misc_feature (44)..(566): Homolog of NCBI NO: 11131766 NR Description: Calnexin homolog precursor
  misc_feature (43)..(567): Homolog of NCBI NO: 11131469 NR Description: Calnexin homolog precursor
  misc_feature (67)..(564): Homolog of NCBI NO: 21740628 NR Description: OSJNBb0012E08.10 [Oryza sativa (japonica
  misc_feature (73)..(556): Homolog of NCBI NO: 40740610 NR Description: hypothetical protein AN3592.2 [Aspergillus
  misc_feature (44)..(566): Homolog of NCBI NO: 11131766 NR Description: Calnexin homolog precursor
  misc_feature (67)..(564): Homolog of NCBI NO: 21740628 NR Description: OSJNBb0012E08.10 [Oryza sativa (japonica
  misc_feature (38)..(567): Homolog of NCBI NO: 15240353 NR Description: calnexin - like protein
  misc_feature (38)..(567): Homolog of NCBI NO: 31321896 NR Description: putative papillar cell-specific calnexin
  misc_feature (38)..(567): Homolog of NCBI NO: 15240773 NR Description: calnexin homolog; protein id: At5g07340.1
  misc_feature (38)..(567): Homolog of NCBI NO: 473878 NR Description: calnexin homolog
  misc_feature (43)..(566): Homolog of NCBI NO: 3334138 NR Description: CALNEXIN HOMOLOG PRECURSOR
  misc_feature (43)..(567): Homolog of NCBI NO: 11131469 NR Description: Calnexin homolog precursor
  misc_feature (149)..(564): Homolog of NCBI NO: 7441503 NR Description: calnexin - maize (fragment)
  misc_feature (43)..(566): Homolog of NCBI NO: 3334138 NR Description: CALNEXIN HOMOLOG PRECURSOR
  misc_feature (38)..(567): Homolog of NCBI NO: 473878 NR Description: calnexin homolog
  misc_feature (38)..(567): Homolog of NCBI NO: 15240773 NR Description: calnexin homolog; protein id: At5g07340.1
  misc_feature (38)..(567): Homolog of NCBI NO: 31321896 NR Description: putative papillar cell-specific calnexin
  misc_feature (38)..(567): Homolog of NCBI NO: 15240353 NR Description: calnexin - like protein

SEQ ID NO: 30358 - protein, 530 aa, Arabidopsis thaliana; identical to SEQ ID NO: 26470
  peptide (1)..(530): Ceres Seq. ID no. 12327030
  misc_feature (29)..(386): Pfam Name: Calreticulin family Pfam Description: Calreticulin family
  misc_feature (29)..(386): Pfam Name: Calreticulin family Pfam Description: Calreticulin family
  misc_feature (36)..(519): Homolog of NCBI NO: 40740610 NR Description: hypothetical protein AN3592.2 [Aspergillus
  misc_feature (112)..(527): Homolog of NCBI NO: 7441503 NR Description: calnexin - maize (fragment)
  misc_feature (7)..(529): Homolog of NCBI NO: 11131766 NR Description: Calnexin homolog precursor
  misc_feature (6)..(530): Homolog of NCBI NO: 11131469 NR Description: Calnexin homolog precursor
  misc_feature (30)..(527): Homolog of NCBI NO: 21740628 NR Description: OSJNBb0012E08.10 [Oryza sativa (japonica
  misc_feature (6)..(530): Homolog of NCBI NO: 11131469 NR Description: Calnexin homolog precursor
  misc_feature (6)..(529): Homolog of NCBI NO: 3334138 NR Description: CALNEXIN HOMOLOG PRECURSOR
  misc_feature (1)..(530): Homolog of NCBI NO: 15240773 NR Description: calnexin homolog; protein id: At5g07340.1
  misc_feature (36)..(519): Homolog of NCBI NO: 40740610 NR Description: hypothetical protein AN3592.2 [Aspergillus
  misc_feature (7)..(529): Homolog of NCBI NO: 11131766 NR Description: Calnexin homolog precursor
  misc_feature (112)..(527): Homolog of NCBI NO: 7441503 NR Description: calnexin - maize (fragment)
  misc_feature (1)..(530): Homolog of NCBI NO: 15240353 NR Description: calnexin - like protein
  misc_feature (1)..(530): Homolog of NCBI NO: 31321896 NR Description: putative papillar cell-specific calnexin
  misc_feature (1)..(530): Homolog of NCBI NO: 473878 NR Description: calnexin homolog
  misc_feature (30)..(527): Homolog of NCBI NO: 21740628 NR Description: OSJNBb0012E08.10 [Oryza sativa (japonica
  misc_feature (6)..(529): Homolog of NCBI NO: 3334138 NR Description: CALNEXIN HOMOLOG PRECURSOR
  misc_feature (1)..(530): Homolog of NCBI NO: 473878 NR Description: calnexin homolog
  misc_feature (1)..(530): Homolog of NCBI NO: 15240773 NR Description: calnexin homolog; protein id: At5g07340.1
  misc_feature (1)..(530): Homolog of NCBI NO: 31321896 NR Description: putative papillar cell-specific calnexin
  misc_feature (1)..(530): Homolog of NCBI NO: 15240353 NR Description: calnexin - like protein

SEQ ID NO: 30359 - protein, 394 aa, Arabidopsis thaliana; identical to SEQ ID NO: 26471
  peptide (1)..(394): Ceres Seq. ID no. 12327031
  misc_feature (1)..(250): Pfam Name: Calreticulin family Pfam Description: Calreticulin family
  misc_feature (1)..(250): Pfam Name: Calreticulin family Pfam Description: Calreticulin family
  misc_feature (1)..(383): Homolog of NCBI NO: 40740610 NR Description: hypothetical protein AN3592.2 [Aspergillus
  misc_feature (1)..(391): Homolog of NCBI NO: 7441503 NR Description: calnexin - maize (fragment)
  misc_feature (1)..(393): Homolog of NCBI NO: 11131766 NR Description: Calnexin homolog precursor
  misc_feature (1)..(394): Homolog of NCBI NO: 11131469 NR Description: Calnexin homolog precursor
  misc_feature (1)..(391): Homolog of NCBI NO: 21740628 NR Description: OSJNBb0012E08.10 [Oryza sativa (japonica
  misc_feature (1)..(383): Homolog of NCBI NO: 40740610 NR Description: hypothetical protein AN3592.2 [Aspergillus
  misc_feature (1)..(393): Homolog of NCBI NO: 11131766 NR Description: Calnexin homolog precursor
  misc_feature (1)..(391): Homolog of NCBI NO: 21740628 NR Description: OSJNBb0012E08.10 [Oryza sativa (japonica
  misc_feature (1)..(394): Homolog of NCBI NO: 15240353 NR Description: calnexin - like protein
  misc_feature (1)..(394): Homolog of NCBI NO: 31321896 NR Description: putative papillar cell-specific calnexin
  misc_feature (1)..(394): Homolog of NCBI NO: 15240773 NR Description: calnexin homolog; protein id: At5g07340.1
  misc_feature (1)..(394): Homolog of NCBI NO: 473878 NR Description: calnexin homolog
  misc_feature (1)..(393): Homolog of NCBI NO: 3334138 NR Description: CALNEXIN HOMOLOG PRECURSOR
  misc_feature (1)..(394): Homolog of NCBI NO: 11131469 NR Description: Calnexin homolog precursor
  misc_feature (1)..(391): Homolog of NCBI NO: 7441503 NR Description: calnexin - maize (fragment)
  misc_feature (1)..(393): Homolog of NCBI NO: 3334138 NR Description: CALNEXIN HOMOLOG PRECURSOR
  misc_feature (1)..(394): Homolog of NCBI NO: 473878 NR Description: calnexin homolog
  misc_feature (1)..(394): Homolog of NCBI NO: 15240773 NR Description: calnexin homolog; protein id: At5g07340.1
  misc_feature (1)..(394): Homolog of NCBI NO: 31321896 NR Description: putative papillar cell-specific calnexin
  misc_feature (1)..(394): Homolog of NCBI NO: 15240353 NR Description: calnexin - like protein

SEQ ID NO: 30360 - DNA, 613 bp, Arabidopsis thaliana
  misc_feature (1)..(613): Ceres Seq. ID no. 12579948
  misc_feature: MA Experiment ID: 20000265 Result: Up-regulated in Transcription
  misc_feature: MA Experiment 20000265 PARAMETER Experiment Name: At_Open_Flower_P Parameter: Age (day) Value: 21
  misc_feature: MA Experiment 20000265 PARAMETER Experiment Name: At_Open_Flower_P Parameter: Plant Line Value: WS
  misc_feature: MA Experiment 20000265 PARAMETER Experiment Name: At_Open_Flower_P Parameter: Tissue Value: Closed Flower vs. Whole Plant
  misc_feature: MA Experiment ID: 20000437 Result: Up-regulated in Transcription
  misc_feature: MA Experiment 20000437 PARAMETER Experiment Name: At_Drought_P Parameter: Age (day) Value: 8
  misc_feature: MA Experiment 20000437 PARAMETER Experiment Name: At_Drought_P Parameter: Organism Value: A. thaliana
  misc_feature: MA Experiment 20000437 PARAMETER Experiment Name: At_Drought_P Parameter: Plant Line Value: WS
  misc_feature: MA Experiment 20000437 PARAMETER Experiment Name: At_Drought_P Parameter: Timepoint (hr) Value: 24
  misc_feature: MA Experiment 20000437 PARAMETER Experiment Name: At_Drought_P Parameter: Tissue Value: Whole Plant
  misc_feature: MA Experiment 20000437 PARAMETER Experiment Name: At_Drought_P Parameter: Treatment Value: Drought vs. No Drought
  misc_feature: MA Experiment ID: 20000794 Result: Up-regulated in Transcription
  misc_feature: MA Experiment 20000794 PARAMETER Experiment Name: At_Petals_P Parameter: Age (day) Value: 23-25 days
  misc_feature: MA Experiment 20000794 PARAMETER Experiment Name: At_Petals_P Parameter: Plant Line Value: WS
  misc_feature: MA Experiment 20000794 PARAMETER Experiment Name: At_Petals_P Parameter: Tissue Value: Petals vs. Whole plant
  misc_feature: MA Experiment ID: 20001911 Result: Up-regulated in Transcription
  misc_feature: MA Experiment 20001911 PARAMETER Experiment Name: At_Drought_Reproduction_P Parameter: Age (day) Value: 40
  misc_feature: MA Experiment 20001911 PARAMETER Experiment Name: At_Drought_Reproduction_P Parameter: Organism Value: A. thaliana
  misc_feature: MA Experiment 20001911 PARAMETER Experiment Name: At_Drought_Reproduction_P Parameter: Plant Line Value: WS
  misc_feature: MA Experiment 20001911 PARAMETER Experiment Name: At_Drought_Reproduction_P Parameter: Timepoint (day) Value: 10
  misc_feature: MA Experiment 20001911 PARAMETER Experiment Name: At_Drought_Reproduction_P Parameter: Tissue Value: Flowers
  misc_feature: MA Experiment 20001911 PARAMETER Experiment Name: At_Drought_Reproduction_P Parameter: Treatment Value: Drought vs. No Drought
catctgggttggtgatcactgatggcgtggagcttacagaactaaacagcccaagagataaagtatttgtgtggctagttggacccttactgataatgaaggagcagataaaaaacctgaagcttactgaggatgaagagttttgtctgaggaaattggtaatggtatgcaaaaatgaaagaaccgaggactgggacaacaccgggttcccgtcaagtgatacagtaagaaaagcacaattgcaagccataatcagaaggctgcaaggaatggtagcatcaatgtctagaataccaacgtttcgacgcagattcatgaacttggttaaagtgttgtacatagaagctcttgaaatgggtgcatcaggtaatcgagctggtgggatacttaaacccaacagcgaccaaacaggaaatctggatcggactgaaacaccggacatggatgttgtctaagtagttatgatatcttgtctttttccttcttccctctgtctaagcggtttcagtagtattttaggatttgttttatattccaatatgtatgttaattaaatcctcaaaaagagcactctttgtcaagaataacatatattcataactttactttaatc

SEQ ID NO: 30361 - protein, 150 aa, Arabidopsis thaliana
  peptide (1)..(150): Ceres Seq. ID no. 12579949
  misc_feature (2)..(86): Homolog of NCBI NO: 15234594 NR Description: hypothetical protein; protein id: At4g37030.1
  misc_feature (2)..(125): Homolog of NCBI NO: 38345330 NR Description: OSJNBa0081L15.3 [Oryza sativa (japonica
  misc_feature (1)..(111): Homolog of NCBI NO: 30688768 NR Description: expressed protein [Arabidopsis thaliana]
  misc_feature (1)..(111): Homolog of NCBI NO: 27311557 NR Description: Unknown protein [Arabidopsis thaliana]
  misc_feature (1)..(111): Homolog of NCBI NO: 7939511 NR Description: emb|CAB40985.1~gene_id:K1G2.10~similar to unknown
  misc_feature (1)..(111): Homolog of NCBI NO: 30693640 NR Description: expressed protein [Arabidopsis thaliana]
  misc_feature (1)..(111): Homolog of NCBI NO: 9758091 NR Description: dbj|BAA95714.1~gene_id:MNF13.19~strong similarity
  misc_feature (2)..(121): Homolog of NCBI NO: 38344840 NR Description: OSJNBa0064H22.21 [Oryza sativa (japonica
  misc_feature (1)..(150): Homolog of NCBI NO: 15235450 NR Description: putative protein; protein id: At4g12680.1
SGLVITDGVELTELNSPRDKVFVWLVGPLLIMKEQIKNLKLTEDEEFCLRKLVMVCKNERTEDWDNTGFPSSDTVRKAQLQAIIRRLQGMVASMSRIPTFRRRFMNLVKVLYIEALEMGASGNRAGGILKPNSDQTGNLDRTETPDMDVV

SEQ ID NO: 30362 - protein, 119 aa, Arabidopsis thaliana
  peptide (1)..(119): Ceres Seq. ID no. 12579950
  misc_feature (1)..(55): Homolog of NCBI NO: 15234594 NR Description: hypothetical protein; protein id: At4g37030.1
  misc_feature (1)..(94): Homolog of NCBI NO: 38345330 NR Description: OSJNBa0081L15.3 [Oryza sativa (japonica
  misc_feature (1)..(80): Homolog of NCBI NO: 30688768 NR Description: expressed protein [Arabidopsis thaliana]
  misc_feature (1)..(80): Homolog of NCBI NO: 27311557 NR Description: Unknown protein [Arabidopsis thaliana]
  misc_feature (1)..(80): Homolog of NCBI NO: 7939511 NR Description: emb|CAB40985.1~gene_id:K1G2.10~similar to unknown
  misc_feature (1)..(80): Homolog of NCBI NO: 30693640 NR Description: expressed protein [Arabidopsis thaliana]
  misc_feature (1)..(80): Homolog of NCBI NO: 9758091 NR Description: dbj|BAA95714.1~gene_id:MNF13.19~strong similarity
  misc_feature (1)..(90): Homolog of NCBI NO: 38344840 NR Description: OSJNBa0064H22.21 [Oryza sativa (japonica
  misc_feature (1)..(119): Homolog of NCBI NO: 15235450 NR Description: putative protein; protein id: At4g12680.1
MKEQIKNLKLTEDEEFCLRKLVMVCKNERTEDWDNTGFPSSDTVRKAQLQAIIRRLQGMVASMSRIPTFRRRFMNLVKVLYIEALEMGASGNRAGGILKPNSDQTGNLDRTETPDMDVV

SEQ ID NO: 30363 - protein, 97 aa, Arabidopsis thaliana
  peptide (1)..(97): Ceres Seq. ID no. 12579951
  misc_feature (1)..(33): Homolog of NCBI NO: 15234594 NR Description: hypothetical protein; protein id: At4g37030.1
  misc_feature (1)..(72): Homolog of NCBI NO: 38345330 NR Description: OSJNBa0081L15.3 [Oryza sativa (japonica
  misc_feature (1)..(58): Homolog of NCBI NO: 30688768 NR Description: expressed protein [Arabidopsis thaliana]
  misc_feature (1)..(58): Homolog of NCBI NO: 27311557 NR Description: Unknown protein [Arabidopsis thaliana]
  misc_feature (1)..(58): Homolog of NCBI NO: 7939511 NR Description: emb|CAB40985.1~gene_id:K1G2.10~similar to unknown
  misc_feature (1)..(58): Homolog of NCBI NO: 30693640 NR Description: expressed protein [Arabidopsis thaliana]
  misc_feature (1)..(58): Homolog of NCBI NO: 9758091 NR Description: dbj|BAA95714.1~gene_id:MNF13.19~strong similarity
  misc_feature (1)..(68): Homolog of NCBI NO: 38344840 NR Description: OSJNBa0064H22.21 [Oryza sativa (japonica
  misc_feature (1)..(97): Homolog of NCBI NO: 15235450 NR Description: putative protein; protein id: At4g12680.1
MVCKNERTEDWDNTGFPSSDTVRKAQLQAIIRRLQGMVASMSRIPTFRRRFMNLVKVLYIEALEMGASGNRAGGILKPNSDQTGNLDRTETPDMDVV

SEQ ID NO: 30364 - DNA, 720 bp, Arabidopsis thaliana
  misc_feature (1)..(720): Ceres Seq. ID no. 12389149
  misc_feature: MA Experiment ID: 108434 Result: Down-regulated in Transcription
  misc_feature: MA Experiment 108434 PARAMETER Experiment Name: At_Root_Tips_cDNA_P Parameter: Tissue Value: Root Tips
  misc_feature: MA Experiment ID: 108488 Result: Down-regulated in Transcription
  misc_feature: MA Experiment ID: 108594 Result: Down-regulated in Transcription
  misc_feature: MA Experiment 108594 PARAMETER Experiment Name: At_Ler-rhl_Root_cDNA_P Parameter: Plant Line Value: null
  misc_feature: MA Experiment ID: 108605 Result: Up-regulated in Transcription
  misc_feature: MA Experiment 108605 PARAMETER Experiment Name: At_100uM_ABA_cDNA_P Parameter: Timepoint (hr) Value: 6
  misc_feature: MA Experiment 108605 PARAMETER Experiment Name: At_100uM_ABA_cDNA_P Parameter: Tissue Value: Aerial
  misc_feature: MA Experiment 108605 PARAMETER Experiment Name: At_100uM_ABA_cDNA_P Parameter: Treatment Value: 100uM ABA vs. No Treatment
  misc_feature: MA Experiment ID: 20000069 Result: Up-regulated in Transcription
  misc_feature: MA Experiment 20000069 PARAMETER Experiment Name: At_100uM_ABA_Mutants_cDNA_P Parameter: Plant Line Value: CS23
  misc_feature: MA Experiment 20000069 PARAMETER Experiment Name: At_100uM_ABA_Mutants_cDNA_P Parameter: Timepoint (hr) Value: 6
  misc_feature: MA Experiment 20000069 PARAMETER Experiment Name: At_100uM_ABA_Mutants_cDNA_P Parameter: Tissue Value: Aerial
  misc_feature: MA Experiment 20000069 PARAMETER Experiment Name: At_100uM_ABA_Mutants_cDNA_P Parameter: Treatment Value: 100uM ABA vs. No Treatment
  misc_feature: MA Experiment ID: 20000070 Result: Up-regulated in Transcription
  misc_feature: MA Experiment 20000070 PARAMETER Experiment Name: At_100uM_ABA_Mutants_cDNA_P Parameter: Plant Line Value: CS24
  misc_feature: MA Experiment 20000070 PARAMETER Experiment Name: At_100uM_ABA_Mutants_cDNA_P Parameter: Timepoint (hr) Value: 6
  misc_feature: MA Experiment 20000070 PARAMETER Experiment Name: At_100uM_ABA_Mutants_cDNA_P Parameter: Tissue Value: Aerial
  misc_feature: MA Experiment 20000070 PARAMETER Experiment Name: At_100uM_ABA_Mutants_cDNA_P Parameter: Treatment Value: 100uM ABA vs. No Treatment
  misc_feature: MA Experiment ID: 20000071 Result: Up-regulated in Transcription
  misc_feature: MA Experiment 20000071 PARAMETER Experiment Name: At_100uM_ABA_Mutants_cDNA_P Parameter: Plant Line Value: CS8104
  misc_feature: MA Experiment 20000071 PARAMETER Experiment Name: At_100uM_ABA_Mutants_cDNA_P Parameter: Timepoint (hr) Value: 6
  misc_feature: MA Experiment 20000071 PARAMETER Experiment Name: At_100uM_ABA_Mutants_cDNA_P Parameter: Tissue Value: Aerial
  misc_feature: MA Experiment 20000071 PARAMETER Experiment Name: At_100uM_ABA_Mutants_cDNA_P Parameter: Treatment Value: 100uM ABA vs. No Treatment
  misc_feature: MA Experiment ID: 20000072 Result: Up-regulated in Transcription
  misc_feature: MA Experiment 20000072 PARAMETER Experiment Name: At_100uM_ABA_Mutants_cDNA_P Parameter: Plant Line Value: CS8105
  misc_feature: MA Experiment 20000072 PARAMETER Experiment Name: At_100uM_ABA_Mutants_cDNA_P Parameter: Timepoint (hr) Value: 6
  misc_feature: MA Experiment 20000072 PARAMETER Experiment Name: At_100uM_ABA_Mutants_cDNA_P Parameter: Tissue Value: Aerial
  misc_feature: MA Experiment 20000072 PARAMETER Experiment Name: At_100uM_ABA_Mutants_cDNA_P Parameter: Treatment Value: 100uM ABA vs. No Treatment
  misc_feature: MA Experiment ID: 20000086 Result: Up-regulated in Transcription
  misc_feature: MA Experiment 20000086 PARAMETER Experiment Name: At_100uM_ABA_Mutants_cDNA_P Parameter: Plant Line Value: CS22
  misc_feature: MA Experiment 20000086 PARAMETER Experiment Name: At_100uM_ABA_Mutants_cDNA_P Parameter: Timepoint (hr) Value: 6
  misc_feature: MA Experiment 20000086 PARAMETER Experiment Name: At_100uM_ABA_Mutants_cDNA_P Parameter: Tissue Value: Aerial
  misc_feature: MA Experiment 20000086 PARAMETER Experiment Name: At_100uM_ABA_Mutants_cDNA_P Parameter: Treatment Value: 100uM ABA vs. No Treatment
  misc_feature: MA Experiment ID: 20000087 Result: Up-regulated in Transcription
  misc_feature: MA Experiment 20000087 PARAMETER Experiment Name: At_100uM_ABA_Mutants_cDNA_P Parameter: Plant Line Value: WS
  misc_feature: MA Experiment 20000087 PARAMETER Experiment Name: At_100uM_ABA_Mutants_cDNA_P Parameter: Timepoint (hr) Value: 6
  misc_feature: MA Experiment 20000087 PARAMETER Experiment Name: At_100uM_ABA_Mutants_cDNA_P Parameter: Tissue Value: Aerial
  misc_feature: MA Experiment 20000087 PARAMETER Experiment Name: At_100uM_ABA_Mutants_cDNA_P Parameter: Treatment Value: 100uM ABA vs. No Treatment
  misc_feature: MA Experiment ID: 20000088 Result: Up-regulated in Transcription
  misc_feature: MA Experiment 20000088 PARAMETER Experiment Name: At_100uM_ABA_Mutants_cDNA_P Parameter: Plant Line Value: Landsberg
  misc_feature: MA Experiment 20000088 PARAMETER Experiment Name: At_100uM_ABA_Mutants_cDNA_P Parameter: Timepoint (hr) Value: 6
  misc_feature: MA Experiment 20000088 PARAMETER Experiment Name: At_100uM_ABA_Mutants_cDNA_P Parameter: Tissue Value: Aerial
  misc_feature: MA Experiment 20000088 PARAMETER Experiment Name: At_100uM_ABA_Mutants_cDNA_P Parameter: Treatment Value: 100uM ABA vs. No Treatment
  misc_feature: MA Experiment ID: 20000089 Result: Up-regulated in Transcription
  misc_feature: MA Experiment ID: 20000090 Result: Up-regulated in Transcription
  misc_feature: MA Experiment ID: 20000117 Result: Up-regulated in Transcription
  misc_feature: MA Experiment 20000117 PARAMETER Experiment Name: At_100uM_ABA_Mutants_cDNA_P Parameter: Plant Line Value: Columbia
  misc_feature: MA Experiment 20000117 PARAMETER Experiment Name: At_100uM_ABA_Mutants_cDNA_P Parameter: Timepoint (hr) Value: 6
  misc_feature: MA Experiment 20000117 PARAMETER Experiment Name: At_100uM_ABA_Mutants_cDNA_P Parameter: Tissue Value: Aerial
  misc_feature: MA Experiment 20000117 PARAMETER Experiment Name: At_100uM_ABA_Mutants_cDNA_P Parameter: Treatment Value: 100uM ABA vs. No Treatment
  misc_feature: MA Experiment ID: 20000144 Result: Down-regulated in Transcription
  misc_feature: MA Experiment 20000144 PARAMETER Experiment Name: At_42deg_Heat_cDNA_P Parameter: Temperature (deg C) Value: 42 vs. 22
  misc_feature: MA Experiment 20000144 PARAMETER Experiment Name: At_42deg_Heat_cDNA_P Parameter: Timepoint (hr) Value: 1
  misc_feature: MA Experiment 20000144 PARAMETER Experiment Name: At_42deg_Heat_cDNA_P Parameter: Tissue Value: Aerial
  misc_feature: MA Experiment ID: 20000166 Result: Up-regulated in Transcription
  misc_feature: MA Experiment 20000166 PARAMETER Experiment Name: At_100uM_ABA_P Parameter: Age (day) Value: 14
  misc_feature: MA Experiment 20000166 PARAMETER Experiment Name: At_100uM_ABA_P Parameter: Organism Value: A. thaliana
  misc_feature: MA Experiment 20000166 PARAMETER Experiment Name: At_100uM_ABA_P Parameter: Plant Line Value: WS
  misc_feature: MA Experiment 20000166 PARAMETER Experiment Name: At_100uM_ABA_P Parameter: Timepoint (hr) Value: 1
  misc_feature: MA Experiment 20000166 PARAMETER Experiment Name: At_100uM_ABA_P Parameter: Tissue Value: Aerial
  misc_feature: MA Experiment 20000166 PARAMETER Experiment Name: At_100uM_ABA_P Parameter: Treatment Value: 100uM ABA vs. No Treatment
  misc_feature: MA Experiment ID: 20000171 Result: Down-regulated in Transcription
  misc_feature: MA Experiment 20000171 PARAMETER Experiment Name: At_42deg_Heat_P Parameter: Age (day) Value: 14
  misc_feature: MA Experiment 20000171 PARAMETER Experiment Name: At_42deg_Heat_P Parameter: Organism Value: A. thaliana
  misc_feature: MA Experiment 20000171 PARAMETER Experiment Name: At_42deg_Heat_P Parameter: Plant Line Value: WS
  misc_feature: MA Experiment 20000171 PARAMETER Experiment Name: At_42deg_Heat_P Parameter: Temperature (deg C) Value: 42 vs. 22
  misc_feature: MA Experiment 20000171 PARAMETER Experiment Name: At_42deg_Heat_P Parameter: Timepoint (hr) Value: 1
  misc_feature: MA Experiment 20000171 PARAMETER Experiment Name: At_42deg_Heat_P Parameter: Tissue Value: Aerial
  misc_feature: MA Experiment ID: 20000173 Result: Down-regulated in Transcription
  misc_feature: MA Experiment 20000173 PARAMETER Experiment Name: At_42deg_Heat_P Parameter: Age (day) Value: 14
  misc_feature: MA Experiment 20000173 PARAMETER Experiment Name: At_42deg_Heat_P Parameter: Organism Value: A. thaliana
  misc_feature: MA Experiment 20000173 PARAMETER Experiment Name: At_42deg_Heat_P Parameter: Plant Line Value: WS
  misc_feature: MA Experiment 20000173 PARAMETER Experiment Name: At_42deg_Heat_P Parameter: Temperature (deg C) Value: 42 vs. 22
  misc_feature: MA Experiment 20000173 PARAMETER Experiment Name: At_42deg_Heat_P Parameter: Timepoint (hr) Value: 6
  misc_feature: MA Experiment 20000173 PARAMETER Experiment Name: At_42deg_Heat_P Parameter: Tissue Value: Aerial
  misc_feature: MA Experiment ID: 20000182 Result: Up-regulated in Transcription
  misc_feature: MA Experiment 20000182 PARAMETER Experiment Name: At_2mM_SA_P Parameter: Age (day) Value: 14
  misc_feature: MA Experiment 20000182 PARAMETER Experiment Name: At_2mM_SA_P Parameter: Organism Value: A. thaliana
  misc_feature: MA Experiment 20000182 PARAMETER Experiment Name: At_2mM_SA_P Parameter: Plant Line Value: WS
  misc_feature: MA Experiment 20000182 PARAMETER Experiment Name: At_2mM_SA_P Parameter: Timepoint (hr) Value: 6
  misc_feature: MA Experiment 20000182 PARAMETER Experiment Name: At_2mM_SA_P Parameter: Tissue Value: Aerial
  misc_feature: MA Experiment 20000182 PARAMETER Experiment Name: At_2mM_SA_P Parameter: Treatment Value: 2mM SA vs. No Treatment
  misc_feature: MA Experiment ID: 20000184 Result: Down-regulated in Transcription
  misc_feature: MA Experiment 20000184 PARAMETER Experiment Name: At_Shoots__P Parameter: Age (day) Value: 7
  misc_feature: MA Experiment 20000184 PARAMETER Experiment Name: At_Shoots__P Parameter: Tissue Value: Shoots vs. Whole Plant
  misc_feature: MA Experiment ID: 20000227 Result: Down-regulated in Transcription
  misc_feature: MA Experiment 20000227 PARAMETER Experiment Name: At_Root-Tips-vs-Tops_P Parameter: Tissue Value: Root Tips vs. Root Tops
  misc_feature: MA Experiment ID: 20000234 Result: Down-regulated in Transcription
  misc_feature: MA Experiment 20000234 PARAMETER Experiment Name: At_Siliques_P Parameter: Age (day) Value: 21
  misc_feature: MA Experiment 20000234 PARAMETER Experiment Name: At_Siliques_P Parameter: Organism Value: A. thaliana
  misc_feature: MA Experiment 20000234 PARAMETER Experiment Name: At_Siliques_P Parameter: Plant Line Value: WS
  misc_feature: MA Experiment 20000234 PARAMETER Experiment Name: At_Siliques_P Parameter: Tissue Value: Less Than 5mm Siliques vs. Whole Plant
  misc_feature: MA Experiment ID: 20000235 Result: Down-regulated in Transcription
  misc_feature: MA Experiment 20000235 PARAMETER Experiment Name: At_Siliques_P Parameter: Age (day) Value: 21
  misc_feature: MA Experiment 20000235 PARAMETER Experiment Name: At_Siliques_P Parameter: Organism Value: A. thaliana
  misc_feature: MA Experiment 20000235 PARAMETER Experiment Name: At_Siliques_P Parameter: Plant Line Value: WS
  misc_feature: MA Experiment 20000235 PARAMETER Experiment Name: At_Siliques_P Parameter: Tissue Value: 5-10mm Siliques vs. Whole Plant
  misc_feature: MA Experiment ID: 20000265 Result: Down-regulated in Transcription
  misc_feature: MA Experiment 20000265 PARAMETER Experiment Name: At_Open_Flower_P Parameter: Age (day) Value: 21
  misc_feature: MA Experiment 20000265 PARAMETER Experiment Name: At_Open_Flower_P Parameter: Plant Line Value: WS
  misc_feature: MA Experiment 20000265 PARAMETER Experiment Name: At_Open_Flower_P Parameter: Tissue Value: Closed Flower vs. Whole Plant
  misc_feature: MA Experiment ID: 20000438 Result: Down-regulated in Transcription
  misc_feature: MA Experiment 20000438 PARAMETER Experiment Name: At_Shoots__P Parameter: Age (day) Value: 14
  misc_feature: MA Experiment 20000438 PARAMETER Experiment Name: At_Shoots__P Parameter: Tissue Value: Shoots vs. Whole Plant
  misc_feature: MA Experiment ID: 20001248 Result: Up-regulated in Transcription
  misc_feature: MA Experiment 20001248 PARAMETER Experiment Name: At_Far-red-induction_P Parameter: Age (day) Value: 7
  misc_feature: MA Experiment 20001248 PARAMETER Experiment Name: At_Far-red-induction_P Parameter: Light Value: Far-red vs. White
  misc_feature: MA Experiment 20001248 PARAMETER Experiment Name: At_Far-red-induction_P Parameter: Organism Value: A. thaliana
  misc_feature: MA Experiment 20001248 PARAMETER Experiment Name: At_Far-red-induction_P Parameter: Plant Line Value: Columbia
  misc_feature: MA Experiment 20001248 PARAMETER Experiment Name: At_Far-red-induction_P Parameter: Timepoint (hr) Value: 4
  misc_feature: MA Experiment 20001248 PARAMETER Experiment Name: At_Far-red-induction_P Parameter: Tissue Value: Whole Plant
  misc_feature: MA Experiment ID: 20001558 Result: Down-regulated in Transcription
  misc_feature: MA Experiment 20001558 PARAMETER Experiment Name: At_Drought_Soil_Dry_P Parameter: Age (day) Value: 27
  misc_feature: MA Experiment 20001558 PARAMETER Experiment Name: At_Drought_Soil_Dry_P Parameter: Organism Value: A. thaliana
  misc_feature: MA Experiment 20001558 PARAMETER Experiment Name: At_Drought_Soil_Dry_P Parameter: Plant Line Value: WS
  misc_feature: MA Experiment 20001558 PARAMETER Experiment Name: At_Drought_Soil_Dry_P Parameter: Post Timepoint (hr) Value: 6
  misc_feature: MA Experiment 20001558 PARAMETER Experiment Name: At_Drought_Soil_Dry_P Parameter: Post-Treatment Value: Re-Water vs. No Drought
  misc_feature: MA Experiment 20001558 PARAMETER Experiment Name: At_Drought_Soil_Dry_P Parameter: Timepoint (day) Value: 13
  misc_feature: MA Experiment 20001558 PARAMETER Experiment Name: At_Drought_Soil_Dry_P Parameter: Treatment Value: Drought vs. No Drought
acaggcggagaaatcaaaatcttttgattcttacttctacgatttgtgtttcctcaaacccaaatgtctcgtctcccgattttaatcgcttcgtttctcttcctctcttcacgcgccgtcgccgtcactgccgtagaatccgatactccgacggcgtattcactcctccaaagctacaacttccccgtcggaatccttccaaaaggagtcgtagcttatgatttagacacaacgacaggcaaattccatgcgtatttcaacgattcatgtagcttcaatcttgttggttcttaccaattgaattacaaatcaacaatcagtggttacatctccgagaacaagctcaagaaattgactggtgttaaagtcaaagttttgttcttgtggcttaacatcgtcgaggttattagaaacggtgacgagatggagttttccgttgggatcacatcggcgaatttcgcgatccaagagtttttggaatcgcctcagtgtggttgtggctttgagtgcaaggattcgaaattggacatgattgagagaaacccttttgtttcttcgtcttgaaattgaaaaaggtacaatctttttttgtaatttgtccccaaaaaatcttacctttcgaaaagatcgcatcttttatgtattgtccaataatatgagcgtagtgtctggaatttgtaattgtttactttagttctatttattggattcaagttctgc

SEQ ID NO: 30365 - protein, 166 aa, Arabidopsis thaliana
  peptide (1)..(166): Ceres Seq. ID no. 12389150
  misc_feature (10)..(149): Pfam Name: Protein of unknown function, DUF538 Pfam Description: Protein of unknown function, DUF538
  misc_feature (1)..(159): Homolog of NCBI NO: 18420052 NR Description: unknown protein; protein id: At5g19860.1
  misc_feature (3)..(143): Homolog of NCBI NO: 15241137 NR Description: putative protein; protein id: At5g19590.1
  misc_feature (9)..(150): Homolog of NCBI NO: 28273408 NR Description: unknown protein [Oryza sativa (japonica
  misc_feature (1)..(143): Homolog of NCBI NO: 34912320 NR Description: P0451D05.23 [Oryza sativa (japonica
  misc_feature (11)..(149): Homolog of NCBI NO: 21553750 NR Description: unknown [Arabidopsis thaliana]
  misc_feature (11)..(149): Homolog of NCBI NO: 18379012 NR Description: Expressed protein
  misc_feature (8)..(154): Homolog of NCBI NO: 15235335 NR Description: putative protein; protein id: At4g02360.1
  misc_feature (1)..(165): Homolog of NCBI NO: 18379014 NR Description: Expressed protein
  misc_feature (1)..(166): Homolog of NCBI NO: 18411923 NR Description: coded for by A. thaliana cDNA R64991
  misc_feature (1)..(166): Homolog of NCBI NO: 21554037 NR Description: unknown [Arabidopsis thaliana]
MSRLPILIASFLFLSSRAVAVTAVESDTPTAYSLLQSYNFPVGILPKGVVAYDLDTTTGKFHAYFNDSCSFNLVGSYQLNYKSTISGYISENKLKKLTGVKVKVLFLWLNIVEVIRNGDEMEFSVGITSANFAIQEFLESPQCGCGFECKDSKLDMIERNPFVSSS

SEQ ID NO: 30366 - DNA, 710 bp, Arabidopsis thaliana
  misc_feature (1)..(710): Ceres Seq. ID no. 12332093
  misc_feature: MA Experiment ID: 108434 Result: Up-regulated in Transcription
  misc_feature: MA Experiment 108434 PARAMETER Experiment Name: At_Root_Tips_cDNA_P Parameter: Tissue Value: Root Tips
  misc_feature: MA Experiment ID: 108462 Result: Down-regulated in Transcription
  misc_feature: MA Experiment 108462 PARAMETER Experiment Name: At_Germinating_Seeds_cDNA_P Parameter: Age (day) Value: 2 vs. 0
  misc_feature: MA Experiment 108462 PARAMETER Experiment Name: At_Germinating_Seeds_cDNA_P Parameter: Tissue Value: Germinating Seeds
  misc_feature: MA Experiment ID: 108463 Result: Down-regulated in Transcription
  misc_feature: MA Experiment 108463 PARAMETER Experiment Name: At_Germinating_Seeds_cDNA_P Parameter: Age (day) Value: 3 vs. 0
  misc_feature: MA Experiment 108463 PARAMETER Experiment Name: At_Germinating_Seeds_cDNA_P Parameter: Tissue Value: Germinating Seeds
  misc_feature: MA Experiment ID: 108573 Result: Down-regulated in Transcription
  misc_feature: MA Experiment 108573 PARAMETER Experiment Name: At_Drought_cDNA_P Parameter: Timepoint (hr) Value: 6
  misc_feature: MA Experiment 108573 PARAMETER Experiment Name: At_Drought_cDNA_P Parameter: Tissue Value: Aerial
  misc_feature: MA Experiment 108573 PARAMETER Experiment Name: At_Drought_cDNA_P Parameter: Treatment Value: Drought vs. No Drought
  misc_feature: MA Experiment ID: 108585 Result: Down-regulated in Transcription
  misc_feature: MA Experiment 108585 PARAMETER Experiment Name: At_5mM_NaNP_cDNA_P Parameter: Timepoint (hr) Value: 6
  misc_feature: MA Experiment 108585 PARAMETER Experiment Name: At_5mM_NaNP_cDNA_P Parameter: Tissue Value: Aerial
  misc_feature: MA Experiment 108585 PARAMETER Experiment Name: At_5mM_NaNP_cDNA_P Parameter: Treatment Value: null
  misc_feature: MA Experiment ID: 108595 Result: Down-regulated in Transcription
  misc_feature: MA Experiment 108595 PARAMETER Experiment Name: At_Ler-pi_Ovule_cDNA_P Parameter: Plant Line Value: null
  misc_feature: MA Experiment ID: 20000182 Result: Down-regulated in Transcription
  misc_feature: MA Experiment 20000182 PARAMETER Experiment Name: At_2mM_SA_P Parameter: Age (day) Value: 14
  misc_feature: MA Experiment 20000182 PARAMETER Experiment Name: At_2mM_SA_P Parameter: Organism Value: A. thaliana
  misc_feature: MA Experiment 20000182 PARAMETER Experiment Name: At_2mM_SA_P Parameter: Plant Line Value: WS
  misc_feature: MA Experiment 20000182 PARAMETER Experiment Name: At_2mM_SA_P Parameter: Timepoint (hr) Value: 6
  misc_feature: MA Experiment 20000182 PARAMETER Experiment Name: At_2mM_SA_P Parameter: Tissue Value: Aerial
  misc_feature: MA Experiment 20000182 PARAMETER Experiment Name: At_2mM_SA_P Parameter: Treatment Value: 2mM SA vs. No Treatment
  misc_feature: MA Experiment ID: 20000185 Result: Down-regulated in Transcription
  misc_feature: MA Experiment 20000185 PARAMETER Experiment Name: At_Roots__P Parameter: Age (day) Value: 7 vs. 21
  misc_feature: MA Experiment 20000185 PARAMETER Experiment Name: At_Roots__P Parameter: Organism Value: A. thaliana
  misc_feature: MA Experiment 20000185 PARAMETER Experiment Name: At_Roots__P Parameter: Tissue Value: Roots vs. Whole Plant
  misc_feature: MA Experiment ID: 20000234 Result: Up-regulated in Transcription
  misc_feature: MA Experiment 20000234 PARAMETER Experiment Name: At_Siliques_P Parameter: Age (day) Value: 21
  misc_feature: MA Experiment 20000234 PARAMETER Experiment Name: At_Siliques_P Parameter: Organism Value: A. thaliana
  misc_feature: MA Experiment 20000234 PARAMETER Experiment Name: At_Siliques_P Parameter: Plant Line Value: WS
  misc_feature: MA Experiment 20000234 PARAMETER Experiment Name: At_Siliques_P Parameter: Tissue Value: Less Than 5mm Siliques vs. Whole Plant
  misc_feature: MA Experiment ID: 20000436 Result: Down-regulated in Transcription
  misc_feature: MA Experiment 20000436 PARAMETER Experiment Name: At_Drought_P Parameter: Age (day) Value: 7
  misc_feature: MA Experiment 20000436 PARAMETER Experiment Name: At_Drought_P Parameter: Organism Value: A. thaliana
  misc_feature: MA Experiment 20000436 PARAMETER Experiment Name: At_Drought_P Parameter: Plant Line Value: WS
  misc_feature: MA Experiment 20000436 PARAMETER Experiment Name: At_Drought_P Parameter: Timepoint (hr) Value: 12
  misc_feature: MA Experiment 20000436 PARAMETER Experiment Name: At_Drought_P Parameter: Tissue Value: Whole Plant
  misc_feature: MA Experiment 20000436 PARAMETER Experiment Name: At_Drought_P Parameter: Treatment Value: Drought vs. No Drought
  misc_feature: MA Experiment ID: 20000437 Result: Down-regulated in Transcription
  misc_feature: MA Experiment 20000437 PARAMETER Experiment Name: At_Drought_P Parameter: Age (day) Value: 8
  misc_feature: MA Experiment 20000437 PARAMETER Experiment Name: At_Drought_P Parameter: Organism Value: A. thaliana
  misc_feature: MA Experiment 20000437 PARAMETER Experiment Name: At_Drought_P Parameter: Plant Line Value: WS
  misc_feature: MA Experiment 20000437 PARAMETER Experiment Name: At_Drought_P Parameter: Timepoint (hr) Value: 24
  misc_feature: MA Experiment 20000437 PARAMETER Experiment Name: At_Drought_P Parameter: Tissue Value: Whole Plant
  misc_feature: MA Experiment 20000437 PARAMETER Experiment Name: At_Drought_P Parameter: Treatment Value: Drought vs. No Drought
  misc_feature: MA Experiment ID: 20000439 Result: Down-regulated in Transcription
  misc_feature: MA Experiment 20000439 PARAMETER Experiment Name: At_Roots__P Parameter: Age (day) Value: 14 vs. 21
  misc_feature: MA Experiment 20000439 PARAMETER Experiment Name: At_Roots__P Parameter: Organism Value: A. thaliana
  misc_feature: MA Experiment 20000439 PARAMETER Experiment Name: At_Roots__P Parameter: Tissue Value: Roots vs. Whole Plant
  misc_feature: MA Experiment ID: 20000794 Result: Down-regulated in Transcription
  misc_feature: MA Experiment 20000794 PARAMETER Experiment Name: At_Petals_P Parameter: Age (day) Value: 23-25 days
  misc_feature: MA Experiment 20000794 PARAMETER Experiment Name: At_Petals_P Parameter: Plant Line Value: WS
  misc_feature: MA Experiment 20000794 PARAMETER Experiment Name: At_Petals_P Parameter: Tissue Value: Petals vs. Whole plant
  misc_feature: MA Experiment ID: 20001558 Result: Up-regulated in Transcription
  misc_feature: MA Experiment 20001558 PARAMETER Experiment Name: At_Drought_Soil_Dry_P Parameter: Age (day) Value: 27
  misc_feature: MA Experiment 20001558 PARAMETER Experiment Name: At_Drought_Soil_Dry_P Parameter: Organism Value: A. thaliana
  misc_feature: MA Experiment 20001558 PARAMETER Experiment Name: At_Drought_Soil_Dry_P Parameter: Plant Line Value: WS
  misc_feature: MA Experiment 20001558 PARAMETER Experiment Name: At_Drought_Soil_Dry_P Parameter: Post Timepoint (hr) Value: 6
  misc_feature: MA Experiment 20001558 PARAMETER Experiment Name: At_Drought_Soil_Dry_P Parameter: Post-Treatment Value: Re-Water vs. No Drought
  misc_feature: MA Experiment 20001558 PARAMETER Experiment Name: At_Drought_Soil_Dry_P Parameter: Timepoint (day) Value: 13
  misc_feature: MA Experiment 20001558 PARAMETER Experiment Name: At_Drought_Soil_Dry_P Parameter: Treatment Value: Drought vs. No Drought
  misc_feature: MA Experiment ID: 20001560 Result: Up-regulated in Transcription
  misc_feature: MA Experiment 20001560 PARAMETER Experiment Name: At_Drought_Soil_Dry_P Parameter: Age (day) Value: 28
  misc_feature: MA Experiment 20001560 PARAMETER Experiment Name: At_Drought_Soil_Dry_P Parameter: Organism Value: A. thaliana
  misc_feature: MA Experiment 20001560 PARAMETER Experiment Name: At_Drought_Soil_Dry_P Parameter: Plant Line Value: WS
  misc_feature: MA Experiment 20001560 PARAMETER Experiment Name: At_Drought_Soil_Dry_P Parameter: Post Timepoint (hr) Value: None
  misc_feature: MA Experiment 20001560 PARAMETER Experiment Name: At_Drought_Soil_Dry_P Parameter: Post-Treatment Value: None
  misc_feature: MA Experiment 20001560 PARAMETER Experiment Name: At_Drought_Soil_Dry_P Parameter: Timepoint (day) Value: 14
  misc_feature: MA Experiment 20001560 PARAMETER Experiment Name: At_Drought_Soil_Dry_P Parameter: Treatment Value: Drought vs. No Drought
  misc_feature: MA Experiment ID: 20001757 Result: Up-regulated in Transcription
  misc_feature: MA Experiment 20001757 PARAMETER Experiment Name: At_50mM_NH4NO3_L-to-H_P Parameter: Timepoint (hr) Value: 6
  misc_feature: MA Experiment 20001757 PARAMETER Experiment Name: At_50mM_NH4NO3_L-to-H_P Parameter: Tissue Value: Leaf
  misc_feature: MA Experiment 20001757 PARAMETER Experiment Name: At_50mM_NH4NO3_L-to-H_P Parameter: Treatment Value: 50mM NH4NO3 vs 100mM Mannitol
  misc_feature: MA Experiment ID: 20001905 Result: Down-regulated in Transcription
  misc_feature: MA Experiment 20001905 PARAMETER Experiment Name: At_Drought_Reproduction_P Parameter: Age (day) Value: 40
  misc_feature: MA Experiment 20001905 PARAMETER Experiment Name: At_Drought_Reproduction_P Parameter: Organism Value: A. thaliana
  misc_feature: MA Experiment 20001905 PARAMETER Experiment Name: At_Drought_Reproduction_P Parameter: Plant Line Value: WS
  misc_feature: MA Experiment 20001905 PARAMETER Experiment Name: At_Drought_Reproduction_P Parameter: Timepoint (day) Value: 10
  misc_feature: MA Experiment 20001905 PARAMETER Experiment Name: At_Drought_Reproduction_P Parameter: Tissue Value: Rosettes
  misc_feature: MA Experiment 20001905 PARAMETER Experiment Name: At_Drought_Reproduction_P Parameter: Treatment Value: Drought vs. No Drought
atcttgtcgaagcacacttctctgtttcaggagaacaatggcttcgacggctacgaacactgatttcttcaagactttgctttctcctttctcaaatgggaatgcggcgcaacgaagtagtagacagaacattgtttggttaaatcggaagcaatctggaaataataacagatctcttcgtgttaatggattattcggaggcggaaaaaaggacaataaagaggatggacaatcaaaggcaggaattctaggtaacatgcagaatttgtatgagacagtgaagaaagctcaaatggttgttcaagtagaggctgttagagtgcagaaggagcttgctgttgctgaatttgatggttattgtcaaggcgagcttgtcaaggttacattatcaggtaaccagcaaccaattcgcactgatatcactgatgcagcaatggagttaggttctgaaaaactttcactgctggtcacagaagcatacaaagacgcacattcaaagagtgtactggctatgaaagaaagaatgagtgatcttgcgcagagcttagggatgccaccaggccttgatggattaaagtaacaaaacttaatcttttttgtgatttctttcaacttataggtatgagaagtccagttctttttgttgtatatcgatcaggcagagagaaatagagctctgttctactgaatcagagagagatatttgaacc

SEQ ID NO: 30367 - protein, 192 aa, Arabidopsis thaliana
  peptide (1)..(192): Ceres Seq. ID no. 12332094
  misc_feature (93)..(185): Pfam Name: Uncharacterised BCR, YbaB family COG0718 Pfam Description: Uncharacterised BCR, YbaB family COG0718
  misc_feature (76)..(188): Homolog of NCBI NO: 22298265 NR Description: ORF_ID:tlr0723~hypothetical protein
  misc_feature (71)..(185): Homolog of NCBI NO: 23040346 NR Description: hypothetical protein [Trichodesmium erythraeum
  misc_feature (76)..(185): Homolog of NCBI NO: 23124992 NR Description: hypothetical protein [Nostoc punctiforme]
  misc_feature (76)..(185): Homolog of NCBI NO: 17232559 NR Description: hypothetical protein [Nostoc sp. PCC 7120]
  misc_feature (83)..(188): Homolog of NCBI NO: 24414799 NR Description: hypothetical protein [Synechococcus sp. PCC 7942]
  misc_feature (58)..(187): Homolog of NCBI NO: 28207763 NR Description: CR084 protein [Chlamydomonas reinhardtii]
  misc_feature (17)..(192): Homolog of NCBI NO: 25412184 NR Description: hypothetical protein At2g24020 [imported] -
  misc_feature (13)..(192): Homolog of NCBI NO: 18400436 NR Description: expressed protein
  misc_feature (13)..(192): Homolog of NCBI NO: 21553866 NR Description: unknown [Arabidopsis thaliana]
  misc_feature (13)..(192): Homolog of NCBI NO: 15234797 NR Description: putative protein
SCRSTLLCFRRTMASTATNTDFFKTLLSPFSNGNAAQRSSRQNIVWLNRKQSGNNNRSLRVNGLFGGGKKDNKEDGQSKAGILGNMQNLYETVKKAQMVVQVEAVRVQKELAVAEFDGYCQGELVKVTLSGNQQPIRTDITDAAMELGSEKLSLLVTEAYKDAHSKSVLAMKERMSDLAQSLGMPPGLDGLK

SEQ ID NO: 30368 - protein, 180 aa, Arabidopsis thaliana
  peptide (1)..(180): Ceres Seq. ID no. 12332095
  misc_feature (81)..(173): Pfam Name: Uncharacterised BCR, YbaB family COG0718 Pfam Description: Uncharacterised BCR, YbaB family COG0718
  misc_feature (64)..(176): Homolog of NCBI NO: 22298265 NR Description: ORF_ID:tlr0723~hypothetical protein
  misc_feature (59)..(173): Homolog of NCBI NO: 23040346 NR Description: hypothetical protein [Trichodesmium erythraeum
  misc_feature (64)..(173): Homolog of NCBI NO: 23124992 NR Description: hypothetical protein [Nostoc punctiforme]
  misc_feature (64)..(173): Homolog of NCBI NO: 17232559 NR Description: hypothetical protein [Nostoc sp. PCC 7120]
  misc_feature (71)..(176): Homolog of NCBI NO: 24414799 NR Description: hypothetical protein [Synechococcus sp. PCC 7942]
  misc_feature (46)..(175): Homolog of NCBI NO: 28207763 NR Description: CR084 protein [Chlamydomonas reinhardtii]
  misc_feature (5)..(180): Homolog of NCBI NO: 25412184 NR Description: hypothetical protein At2g24020 [imported] -
  misc_feature (1)..(180): Homolog of NCBI NO: 18400436 NR Description: expressed protein
  misc_feature (1)..(180): Homolog of NCBI NO: 21553866 NR Description: unknown [Arabidopsis thaliana]
  misc_feature (1)..(180): Homolog of NCBI NO: 15234797 NR Description: putative protein
MASTATNTDFFKTLLSPFSNGNAAQRSSRQNIVWLNRKQSGNNNRSLRVNGLFGGGKKDNKEDGQSKAGILGNMQNLYETVKKAQMVVQVEAVRVQKELAVAEFDGYCQGELVKVTLSGNQQPIRTDITDAAMELGSEKLSLLVTEAYKDAHSKSVLAMKERMSDLAQSLGMPPGLDGLK

SEQ ID NO: 30369 - protein, 107 aa, Arabidopsis thaliana
  peptide (1)..(107): Ceres Seq. ID no. 12332096
  misc_feature (8)..(100): Pfam Name: Uncharacterised BCR, YbaB family COG0718 Pfam Description: Uncharacterised BCR, YbaB family COG0718
  misc_feature (1)..(103): Homolog of NCBI NO: 22298265 NR Description: ORF_ID:tlr0723~hypothetical protein
  misc_feature (1)..(100): Homolog of NCBI NO: 23040346 NR Description: hypothetical protein [Trichodesmium erythraeum
  misc_feature (1)..(100): Homolog of NCBI NO: 23124992 NR Description: hypothetical protein [Nostoc punctiforme]
  misc_feature (1)..(100): Homolog of NCBI NO: 17232559 NR Description: hypothetical protein [Nostoc sp. PCC 7120]
  misc_feature (1)..(103): Homolog of NCBI NO: 24414799 NR Description: hypothetical protein [Synechococcus sp. PCC 7942]
  misc_feature (1)..(102): Homolog of NCBI NO: 28207763 NR Description: CR084 protein [Chlamydomonas reinhardtii]
  misc_feature (1)..(107): Homolog of NCBI NO: 25412184 NR Description: hypothetical protein At2g24020 [imported] -
  misc_feature (1)..(107): Homolog of NCBI NO: 18400436 NR Description: expressed protein
  misc_feature (1)..(107): Homolog of NCBI NO: 21553866 NR Description: unknown [Arabidopsis thaliana]
  misc_feature (1)..(107): Homolog of NCBI NO: 15234797 NR Description: putative protein
MQNLYETVKKAQMVVQVEAVRVQKELAVAEFDGYCQGELVKVTLSGNQQPIRTDITDAAMELGSEKLSLLVTEAYKDAHSKSVLAMKERMSDLAQSLGMPPGLDGLK

SEQ ID NO: 30370 - DNA, 958 bp, Arabidopsis thaliana
  misc_feature (1)..(958): Ceres Seq. ID no. 13489828
  misc_feature: MA Experiment ID: 108434 Result: Up-regulated in Transcription
  misc_feature: MA Experiment 108434 PARAMETER Experiment Name: At_Root_Tips_cDNA_P Parameter: Tissue Value: Root Tips
  misc_feature: MA Experiment ID: 108461 Result: Up-regulated in Transcription
  misc_feature: MA Experiment 108461 PARAMETER Experiment Name: At_Germinating_Seeds_cDNA_P Parameter: Age (day) Value: 1 vs. 0
  misc_feature: MA Experiment 108461 PARAMETER Experiment Name: At_Germinating_Seeds_cDNA_P Parameter: Tissue Value: Germinating Seeds
  misc_feature: MA Experiment ID: 20000112 Result: Down-regulated in Transcription
  misc_feature: MA Experiment 20000112 PARAMETER Experiment Name: At_42deg_Heat_cDNA_P Parameter: Temperature (deg C) Value: 42 vs. 22
  misc_feature: MA Experiment 20000112 PARAMETER Experiment Name: At_42deg_Heat_cDNA_P Parameter: Timepoint (hr) Value: 2
  misc_feature: MA Experiment 20000112 PARAMETER Experiment Name: At_42deg_Heat_cDNA_P Parameter: Tissue Value: Aerial
  misc_feature: MA Experiment ID: 20000113 Result: Down-regulated in Transcription
  misc_feature: MA Experiment 20000113 PARAMETER Experiment Name: At_42deg_Heat_cDNA_P Parameter: Temperature (deg C) Value: 42 vs. 22
  misc_feature: MA Experiment 20000113 PARAMETER Experiment Name: At_42deg_Heat_cDNA_P Parameter: Timepoint (hr) Value: 8
  misc_feature: MA Experiment 20000113 PARAMETER Experiment Name: At_42deg_Heat_cDNA_P Parameter: Tissue Value: Aerial
  misc_feature: MA Experiment ID: 20000144 Result: Down-regulated in Transcription
  misc_feature: MA Experiment 20000144 PARAMETER Experiment Name: At_42deg_Heat_cDNA_P Parameter: Temperature (deg C) Value: 42 vs. 22
  misc_feature: MA Experiment 20000144 PARAMETER Experiment Name: At_42deg_Heat_cDNA_P Parameter: Timepoint (hr) Value: 1
  misc_feature: MA Experiment 20000144 PARAMETER Experiment Name: At_42deg_Heat_cDNA_P Parameter: Tissue Value: Aerial
  misc_feature: MA Experiment ID: 20000180 Result: Up-regulated in Transcription
  misc_feature: MA Experiment 20000180 PARAMETER Experiment Name: At_Germinating_Seeds_P Parameter: Age (hr) Value: 24 vs. 0
  misc_feature: MA Experiment 20000180 PARAMETER Experiment Name: At_Germinating_Seeds_P Parameter: Tissue Value: Germinating Seeds
  misc_feature: MA Experiment ID: 20001911 Result: Down-regulated in Transcription
  misc_feature: MA Experiment 20001911 PARAMETER Experiment Name: At_Drought_Reproduction_P Parameter: Age (day) Value: 40
  misc_feature: MA Experiment 20001911 PARAMETER Experiment Name: At_Drought_Reproduction_P Parameter: Organism Value: A. thaliana
  misc_feature: MA Experiment 20001911 PARAMETER Experiment Name: At_Drought_Reproduction_P Parameter: Plant Line Value: WS
  misc_feature: MA Experiment 20001911 PARAMETER Experiment Name: At_Drought_Reproduction_P Parameter: Timepoint (day) Value: 10
  misc_feature: MA Experiment 20001911 PARAMETER Experiment Name: At_Drought_Reproduction_P Parameter: Tissue Value: Flowers
  misc_feature: MA Experiment 20001911 PARAMETER Experiment Name: At_Drought_Reproduction_P Parameter: Treatment Value: Drought vs. No Drought
agatcttaaatcgatgcaaaagaaaacgataaatctcgtttggttaaaaaattaaccagaaaacgagatctgacttctaacttctacttctacttagatctcctcaaaattcaaatcggaaaaaagtttgagaaaaatctcgatgaagaagaagatgattccgacgacgatcttactctcagctctcattttctctctatcaccgatctgtgaagctgtgtggcttactgtacctcacaccggatcaaagtgcgtctccgaagaaatccaaagcaacgtcatcgttttagctgattaccttgttatctccgaggaacattctatcttccctactgtctccgttaaggttacagcaccttatggcaccgtgttacaccacagggaaaatacaacaaacggtcagtttgcattcacaacccaagaatcaggaacttacttggcgtgttttgaggccgatgctaaaagtcatggtaacaaagattttagcatcaacatcgactggaaaactggaatcgcagctaaagattgggactccattgctagaaaagaaaagatcgagggtgtagagctggagtttaagaaacttgaaggtgcagttgaagcaatccatgaaaatctgatttacctcagaaacagagaagcagagatgaggattgtgagtgaaaaaacaaactcgagagtcgcatggtacagtataatgtcgctggggatttgcattgtggtctctggtttacagattttgtacttgaagcaatactttgaaaagaagaagcttatttagatcatggatagtttcttgttgaagattactagaaccaacagtttgctctgctttctttctcttgatcttctctttggaactgttagtgtaaaattttgttcactcatttaacttgtaatttgtctcctattattacatataacatataactagactctaattataggaattgcaact

SEQ ID NO: 30371 - protein, 212 aa, Arabidopsis thaliana
  peptide (1)..(212): Ceres Seq. ID no. 13489829
  misc_feature (10)..(212): Pfam Name: emp24/gp25L/p24 family Pfam Description: emp24/gp25L/p24 family
  misc_feature (9)..(212): Homolog of NCBI NO: 22330523 NR Description: emp24/gp25L/p24 family [Arabidopsis thaliana]
  misc_feature (15)..(212): Homolog of NCBI NO: 15223027 NR Description: emp24/gp25L/p24 family [Arabidopsis thaliana]
  misc_feature (9)..(212): Homolog of NCBI NO: 18396016 NR Description: emp24/gp25L/p24 family [Arabidopsis thaliana]
  misc_feature (9)..(212): Homolog of NCBI NO: 21618241 NR Description: unknown [Arabidopsis thaliana]
  misc_feature (7)..(212): Homolog of NCBI NO: 33146897 NR Description: putative transmembrane protein
  misc_feature (63)..(189): Homolog of NCBI NO: 40641597 NR Description: putative transmembrane protein-like protein
  misc_feature (18)..(212): Homolog of NCBI NO: 15228372 NR Description: emp24/gp25L/p24 family [Arabidopsis thaliana]
  misc_feature (9)..(212): Homolog of NCBI NO: 15219136 NR Description: emp24/gp25L/p24 family [Arabidopsis thaliana]
  misc_feature (1)..(212): Homolog of NCBI NO: 15217563 NR Description: emp24/gp25L/p24 family [Arabidopsis thaliana]
  misc_feature (1)..(212): Homolog of NCBI NO: 15223626 NR Description: emp24/gp25L/p24 family [Arabidopsis thaliana]
MKKKMIPTTILLSALIFSLSPICEAVWLTVPHTGSKCVSEEIQSNVIVLADYLVISEEHSIFPTVSVKVTAPYGTVLHHRENTTNGQFAFTTQESGTYLACFEADAKSHGNKDFSINIDWKTGIAAKDWDSIARKEKIEGVELEFKKLEGAVEAIHENLIYLRNREAEMRIVSEKTNSRVAWYSIMSLGICIVVSGLQILYLKQYFEKKKLI

SEQ ID NO: 30372 - protein, 208 aa, Arabidopsis thaliana
  peptide (1)..(208): Ceres Seq. ID no. 13489830
  misc_feature (6)..(208): Pfam Name: emp24/gp25L/p24 family Pfam Description: emp24/gp25L/p24 family
  misc_feature (5)..(208): Homolog of NCBI NO: 22330523 NR Description: emp24/gp25L/p24 family [Arabidopsis thaliana]
  misc_feature (11)..(208): Homolog of NCBI NO: 15223027 NR Description: emp24/gp25L/p24 family [Arabidopsis thaliana]
  misc_feature (5)..(208): Homolog of NCBI NO: 18396016 NR Description: emp24/gp25L/p24 family [Arabidopsis thaliana]
  misc_feature (5)..(208): Homolog of NCBI NO: 21618241 NR Description: unknown [Arabidopsis thaliana]
  misc_feature (3)..(208): Homolog of NCBI NO: 33146897 NR Description: putative transmembrane protein
  misc_feature (59)..(185): Homolog of NCBI NO: 40641597 NR Description: putative transmembrane protein-like protein
  misc_feature (14)..(208): Homolog of NCBI NO: 15228372 NR Description: emp24/gp25L/p24 family [Arabidopsis thaliana]
  misc_feature (5)..(208): Homolog of NCBI NO: 15219136 NR Description: emp24/gp25L/p24 family [Arabidopsis thaliana]
  misc_feature (1)..(208): Homolog of NCBI NO: 15217563 NR Description: emp24/gp25L/p24 family [Arabidopsis thaliana]
  misc_feature (1)..(208): Homolog of NCBI NO: 15223626 NR Description: emp24/gp25L/p24 family [Arabidopsis thaliana]
MIPTTILLSALIFSLSPICEAVWLTVPHTGSKCVSEEIQSNVIVLADYLVISEEHSIFPTVSVKVTAPYGTVLHHRENTTNGQFAFTTQESGTYLACFEADAKSHGNKDFSINIDWKTGIAAKDWDSIARKEKIEGVELEFKKLEGAVEAIHENLIYLRNREAEMRIVSEKTNSRVAWYSIMSLGICIVVSGLQILYLKQYFEKKKLI

SEQ ID NO: 30373 - DNA, 644 bp, Arabidopsis thaliana
  misc_feature (1)..(644): Ceres Seq. ID no. 12369950
  misc_feature: MA Experiment ID: 108434 Result: Up-regulated in Transcription
  misc_feature: MA Experiment 108434 PARAMETER Experiment Name: At_Root_Tips_cDNA_P Parameter: Tissue Value: Root Tips
  misc_feature: MA Experiment ID: 108461 Result: Up-regulated in Transcription
  misc_feature: MA Experiment 108461 PARAMETER Experiment Name: At_Germinating_Seeds_cDNA_P Parameter: Age (day) Value: 1 vs. 0
  misc_feature: MA Experiment 108461 PARAMETER Experiment Name: At_Germinating_Seeds_cDNA_P Parameter: Tissue Value: Germinating Seeds
  misc_feature: MA Experiment ID: 108462 Result: Up-regulated in Transcription
  misc_feature: MA Experiment 108462 PARAMETER Experiment Name: At_Germinating_Seeds_cDNA_P Parameter: Age (day) Value: 2 vs. 0
  misc_feature: MA Experiment 108462 PARAMETER Experiment Name: At_Germinating_Seeds_cDNA_P Parameter: Tissue Value: Germinating Seeds
  misc_feature: MA Experiment ID: 108569 Result: Down-regulated in Transcription
  misc_feature: MA Experiment 108569 PARAMETER Experiment Name: At_0.001%_MeJA__cDNA_P Parameter: Timepoint (hr) Value: 6
  misc_feature: MA Experiment 108569 PARAMETER Experiment Name: At_0.001%_MeJA__cDNA_P Parameter: Tissue Value: Aerial
  misc_feature: MA Experiment 108569 PARAMETER Experiment Name: At_0.001%_MeJA__cDNA_P Parameter: Treatment Value: 0.001% MeJA vs. No Treatment
  misc_feature: MA Experiment ID: 108573 Result: Down-regulated in Transcription
  misc_feature: MA Experiment 108573 PARAMETER Experiment Name: At_Drought_cDNA_P Parameter: Timepoint (hr) Value: 6
  misc_feature: MA Experiment 108573 PARAMETER Experiment Name: At_Drought_cDNA_P Parameter: Tissue Value: Aerial
  misc_feature: MA Experiment 108573 PARAMETER Experiment Name: At_Drought_cDNA_P Parameter: Treatment Value: Drought vs. No Drought
  misc_feature: MA Experiment ID: 108595 Result: Up-regulated in Transcription
  misc_feature: MA Experiment 108595 PARAMETER Experiment Name: At_Ler-pi_Ovule_cDNA_P Parameter: Plant Line Value: null
  misc_feature: MA Experiment ID: 20000111 Result: Down-regulated in Transcription
  misc_feature: MA Experiment 20000111 PARAMETER Experiment Name: At_42deg_Heat_cDNA_P Parameter: Temperature (deg C) Value: 42 vs. 22
  misc_feature: MA Experiment 20000111 PARAMETER Experiment Name: At_42deg_Heat_cDNA_P Parameter: Timepoint (hr) Value: 6
  misc_feature: MA Experiment 20000111 PARAMETER Experiment Name: At_42deg_Heat_cDNA_P Parameter: Tissue Value: Aerial
  misc_feature: MA Experiment ID: 20000112 Result: Down-regulated in Transcription
  misc_feature: MA Experiment 20000112 PARAMETER Experiment Name: At_42deg_Heat_cDNA_P Parameter: Temperature (deg C) Value: 42 vs. 22
  misc_feature: MA Experiment 20000112 PARAMETER Experiment Name: At_42deg_Heat_cDNA_P Parameter: Timepoint (hr) Value: 2
  misc_feature: MA Experiment 20000112 PARAMETER Experiment Name: At_42deg_Heat_cDNA_P Parameter: Tissue Value: Aerial
  misc_feature: MA Experiment ID: 20000113 Result: Down-regulated in Transcription
  misc_feature: MA Experiment 20000113 PARAMETER Experiment Name: At_42deg_Heat_cDNA_P Parameter: Temperature (deg C) Value: 42 vs. 22
  misc_feature: MA Experiment 20000113 PARAMETER Experiment Name: At_42deg_Heat_cDNA_P Parameter: Timepoint (hr) Value: 8
  misc_feature: MA Experiment 20000113 PARAMETER Experiment Name: At_42deg_Heat_cDNA_P Parameter: Tissue Value: Aerial
  misc_feature: MA Experiment ID: 20000117 Result: Down-regulated in Transcription
  misc_feature: MA Experiment 20000117 PARAMETER Experiment Name: At_100uM_ABA_Mutants_cDNA_P Parameter: Plant Line Value: Columbia
  misc_feature: MA Experiment 20000117 PARAMETER Experiment Name: At_100uM_ABA_Mutants_cDNA_P Parameter: Timepoint (hr) Value: 6
  misc_feature: MA Experiment 20000117 PARAMETER Experiment Name: At_100uM_ABA_Mutants_cDNA_P Parameter: Tissue Value: Aerial
  misc_feature: MA Experiment 20000117 PARAMETER Experiment Name: At_100uM_ABA_Mutants_cDNA_P Parameter: Treatment Value: 100uM ABA vs. No Treatment
  misc_feature: MA Experiment ID: 20000144 Result: Down-regulated in Transcription
  misc_feature: MA Experiment 20000144 PARAMETER Experiment Name: At_42deg_Heat_cDNA_P Parameter: Temperature (deg C) Value: 42 vs. 22
  misc_feature: MA Experiment 20000144 PARAMETER Experiment Name: At_42deg_Heat_cDNA_P Parameter: Timepoint (hr) Value: 1
  misc_feature: MA Experiment 20000144 PARAMETER Experiment Name: At_42deg_Heat_cDNA_P Parameter: Tissue Value: Aerial
  misc_feature: MA Experiment ID: 20000224 Result: Up-regulated in Transcription
  misc_feature: MA Experiment ID: 20000306 Result: Up-regulated in Transcription
  misc_feature: MA Experiment 20000306 PARAMETER Experiment Name: At_Germinating_Seeds_Sub_P Parameter: Age (hr) Value: 6 vs. 0
  misc_feature: MA Experiment 20000306 PARAMETER Experiment Name: At_Germinating_Seeds_Sub_P Parameter: Organism Value: A. thaliana
  misc_feature: MA Experiment 20000306 PARAMETER Experiment Name: At_Germinating_Seeds_Sub_P Parameter: Plant Line Value: WS
  misc_feature: MA Experiment 20000306 PARAMETER Experiment Name: At_Germinating_Seeds_Sub_P Parameter: Tissue Value: Germinating Seeds
  misc_feature: MA Experiment ID: 20000307 Result: Up-regulated in Transcription
  misc_feature: MA Experiment 20000307 PARAMETER Experiment Name: At_Germinating_Seeds_Sub_P Parameter: Age (hr) Value: 24 vs. 0
  misc_feature: MA Experiment 20000307 PARAMETER Experiment Name: At_Germinating_Seeds_Sub_P Parameter: Organism Value: A. thaliana
  misc_feature: MA Experiment 20000307 PARAMETER Experiment Name: At_Germinating_Seeds_Sub_P Parameter: Plant Line Value: WS
  misc_feature: MA Experiment 20000307 PARAMETER Experiment Name: At_Germinating_Seeds_Sub_P Parameter: Tissue Value: Germinating Seeds
  misc_feature: MA Experiment ID: 20000328 Result: Down-regulated in Transcription
  misc_feature: MA Experiment 20000328 PARAMETER Experiment Name: At_42deg_Heat_Sub_P Parameter: Age (day) Value: 14
  misc_feature: MA Experiment 20000328 PARAMETER Experiment Name: At_42deg_Heat_Sub_P Parameter: Organism Value: A. thaliana
  misc_feature: MA Experiment 20000328 PARAMETER Experiment Name: At_42deg_Heat_Sub_P Parameter: Plant Line Value: WS
  misc_feature: MA Experiment 20000328 PARAMETER Experiment Name: At_42deg_Heat_Sub_P Parameter: Temperature (deg C) Value: 42 vs. 22
  misc_feature: MA Experiment 20000328 PARAMETER Experiment Name: At_42deg_Heat_Sub_P Parameter: Timepoint (hr) Value: 6
  misc_feature: MA Experiment 20000328 PARAMETER Experiment Name: At_42deg_Heat_Sub_P Parameter: Tissue Value: Aerial
atcgatcgcattctcaccgaattaaatccaaaggagcaaatttacaatcttgcgaactcctaaaatggctcgtaccaagcaaacagctcgtaaatccaccggaggaaaggcaccaaggaagcaactcgcgaccaaagctgcgaggaaatcagctccagccaccggaggagtgaagaagccacacagattccgtccaggaacggtggcgttgagagaaatcaggaagtatcagaagagtactgagcttttgatccgtaagcttccgttccagagattggttcgtgagattgctcaagatttcaagacggatctgaggttccagagcagtgccgtcgcagctcttcaggaagcagctgaggcttatcttgttgggctctttgaagatactaatctctgtgcgattcatgctaagagggttacgattatgcctaaggatatccagcttgcgaggagaatcaggggagagagggcttaagtgaacgaagatgatgaagattaagaagactagtcgtttagttatggattagcttgtttggtttcaatggatatgtaaagctgtctcttttcgttttcgagtgttattagttttttacttagatgtgtcttccagatgttcgatgaaatgcctaaaggaaattttaacc

SEQ ID NO: 30374 - protein, 136 aa, Arabidopsis thaliana; identical to SEQ ID NO: 8709
  peptide (1)..(136): Ceres Seq. ID no. 12369951
  misc_feature (17)..(135): Pfam Name: Core histone H2A/H2B/H3/H4 Pfam Description: Core histone H2A/H2B/H3/H4
  misc_feature (1)..(136): Homolog of NCBI NO: 37546835 NR Description: similar to histone protein Hist2h3c1 [Homo
  misc_feature (1)..(136): Homolog of NCBI NO: 7305139 NR Description: histone 1, H3f; histone gene complex 1 [Mus
  misc_feature (1)..(136): Homolog of NCBI NO: 34876364 NR Description: similar to CG31613-PA [Rattus norvegicus]
  misc_feature (1)..(136): Homolog of NCBI NO: 122070 NR Description: Histone H3
  misc_feature (2)..(136): Homolog of NCBI NO: 122083 NR Description: Histone H3
  misc_feature (2)..(136): Homolog of NCBI NO: 70753 NR Description: histone H3 - garden pea (tentative sequence)
  misc_feature (1)..(136): Homolog of NCBI NO: 166384 NR Description: histone H3 (H3-1.1)
  misc_feature (1)..(136): Homolog of NCBI NO: 1362108 NR Description: histone H3 homolog - common tobacco
  misc_feature (1)..(136): Homolog of NCBI NO: 122087 NR Description: Histone H3
  misc_feature (1)..(136): Homolog of NCBI NO: 15232146 NR Description: histone H3, putative

SEQ ID NO: 30375 - DNA, 1071 bp, Arabidopsis thaliana
  misc_feature (1)..(1071): Ceres Seq. ID no. 12385474
  misc_feature: MA Experiment ID: 108464 Result: Up-regulated in Transcription
  misc_feature: MA Experiment 108464 PARAMETER Experiment Name: At_Germinating_Seeds_cDNA_P Parameter: Age (day) Value: 4 vs. 0
  misc_feature: MA Experiment 108464 PARAMETER Experiment Name: At_Germinating_Seeds_cDNA_P Parameter: Tissue Value: Germinating Seeds
  misc_feature: MA Experiment ID: 108488 Result: Down-regulated in Transcription
  misc_feature: MA Experiment ID: 108572 Result: Up-regulated in Transcription
  misc_feature: MA Experiment 108572 PARAMETER Experiment Name: At_Drought_cDNA_P Parameter: Timepoint (hr) Value: 1
  misc_feature: MA Experiment 108572 PARAMETER Experiment Name: At_Drought_cDNA_P Parameter: Tissue Value: Aerial
  misc_feature: MA Experiment 108572 PARAMETER Experiment Name: At_Drought_cDNA_P Parameter: Treatment Value: Drought vs. No Drought
  misc_feature: MA Experiment ID: 108577 Result: Up-regulated in Transcription
  misc_feature: MA Experiment 108577 PARAMETER Experiment Name: At_42deg_Heat_cDNA_P Parameter: Temperature (deg C) Value: 42 vs. 22
  misc_feature: MA Experiment 108577 PARAMETER Experiment Name: At_42deg_Heat_cDNA_P Parameter: Timepoint (hr) Value: 6
  misc_feature: MA Experiment 108577 PARAMETER Experiment Name: At_42deg_Heat_cDNA_P Parameter: Tissue Value: Aerial
  misc_feature: MA Experiment ID: 108608 Result: Up-regulated in Transcription
  misc_feature: MA Experiment 108608 PARAMETER Experiment Name: At_100uM_ABA_cDNA_P Parameter: Timepoint (hr) Value: 1
  misc_feature: MA Experiment 108608 PARAMETER Experiment Name: At_100uM_ABA_cDNA_P Parameter: Tissue Value: Aerial
  misc_feature: MA Experiment 108608 PARAMETER Experiment Name: At_100uM_ABA_cDNA_P Parameter: Treatment Value: 100uM ABA vs. No Treatment
  misc_feature: MA Experiment ID: 20000166 Result: Up-regulated in Transcription
  misc_feature: MA Experiment 20000166 PARAMETER Experiment Name: At_100uM_ABA_P Parameter: Age (day) Value: 14
  misc_feature: MA Experiment 20000166 PARAMETER Experiment Name: At_100uM_ABA_P Parameter: Organism Value: A. thaliana
  misc_feature: MA Experiment 20000166 PARAMETER Experiment Name: At_100uM_ABA_P Parameter: Plant Line Value: WS
  misc_feature: MA Experiment 20000166 PARAMETER Experiment Name: At_100uM_ABA_P Parameter: Timepoint (hr) Value: 1
  misc_feature: MA Experiment 20000166 PARAMETER Experiment Name: At_100uM_ABA_P Parameter: Tissue Value: Aerial
  misc_feature: MA Experiment 20000166 PARAMETER Experiment Name: At_100uM_ABA_P Parameter: Treatment Value: 100uM ABA vs. No Treatment
  misc_feature: MA Experiment ID: 20000173 Result: Up-regulated in Transcription
  misc_feature: MA Experiment 20000173 PARAMETER Experiment Name: At_42deg_Heat_P Parameter: Age (day) Value: 14
  misc_feature: MA Experiment 20000173 PARAMETER Experiment Name: At_42deg_Heat_P Parameter: Organism Value: A. thaliana
  misc_feature: MA Experiment 20000173 PARAMETER Experiment Name: At_42deg_Heat_P Parameter: Plant Line Value: WS
  misc_feature: MA Experiment 20000173 PARAMETER Experiment Name: At_42deg_Heat_P Parameter: Temperature (deg C) Value: 42 vs. 22
  misc_feature: MA Experiment 20000173 PARAMETER Experiment Name: At_42deg_Heat_P Parameter: Timepoint (hr) Value: 6
  misc_feature: MA Experiment 20000173 PARAMETER Experiment Name: At_42deg_Heat_P Parameter: Tissue Value: Aerial
  misc_feature: MA Experiment ID: 20000184 Result: Down-regulated in Transcription
  misc_feature: MA Experiment 20000184 PARAMETER Experiment Name: At_Shoots__P Parameter: Age (day) Value: 7
  misc_feature: MA Experiment 20000184 PARAMETER Experiment Name: At_Shoots__P Parameter: Tissue Value: Shoots vs. Whole Plant
  misc_feature: MA Experiment ID: 20000234 Result: Down-regulated in Transcription
  misc_feature: MA Experiment 20000234 PARAMETER Experiment Name: At_Siliques_P Parameter: Age (day) Value: 21
  misc_feature: MA Experiment 20000234 PARAMETER Experiment Name: At_Siliques_P Parameter: Organism Value: A. thaliana
  misc_feature: MA Experiment 20000234 PARAMETER Experiment Name: At_Siliques_P Parameter: Plant Line Value: WS
  misc_feature: MA Experiment 20000234 PARAMETER Experiment Name: At_Siliques_P Parameter: Tissue Value: Less Than 5mm Siliques vs. Whole Plant
  misc_feature: MA Experiment ID: 20000437 Result: Up-regulated in Transcription
  misc_feature: MA Experiment 20000437 PARAMETER Experiment Name: At_Drought_P Parameter: Age (day) Value: 8
  misc_feature: MA Experiment 20000437 PARAMETER Experiment Name: At_Drought_P Parameter: Organism Value: A. thaliana
  misc_feature: MA Experiment 20000437 PARAMETER Experiment Name: At_Drought_P Parameter: Plant Line Value: WS
  misc_feature: MA Experiment 20000437 PARAMETER Experiment Name: At_Drought_P Parameter: Timepoint (hr) Value: 24
  misc_feature: MA Experiment 20000437 PARAMETER Experiment Name: At_Drought_P Parameter: Tissue Value: Whole Plant
  misc_feature: MA Experiment 20000437 PARAMETER Experiment Name: At_Drought_P Parameter: Treatment Value: Drought vs. No Drought
  misc_feature: MA Experiment ID: 20001557 Result: Down-regulated in Transcription
  misc_feature: MA Experiment 20001557 PARAMETER Experiment Name: At_Drought_Soil_Dry_P Parameter: Age (day) Value: 27
  misc_feature: MA Experiment 20001557 PARAMETER Experiment Name: At_Drought_Soil_Dry_P Parameter: Organism Value: A. thaliana
  misc_feature: MA Experiment 20001557 PARAMETER Experiment Name: At_Drought_Soil_Dry_P Parameter: Plant Line Value: WS
  misc_feature: MA Experiment 20001557 PARAMETER Experiment Name: At_Drought_Soil_Dry_P Parameter: Post Timepoint (hr) Value: 3
  misc_feature: MA Experiment 20001557 PARAMETER Experiment Name: At_Drought_Soil_Dry_P Parameter: Post-Treatment Value: Re-Water vs. No Drought
  misc_feature: MA Experiment 20001557 PARAMETER Experiment Name: At_Drought_Soil_Dry_P Parameter: Timepoint (day) Value: 13
  misc_feature: MA Experiment 20001557 PARAMETER Experiment Name: At_Drought_Soil_Dry_P Parameter: Treatment Value: Drought vs. No Drought
  misc_feature: MA Experiment ID: 20001558 Result: Down-regulated in Transcription
  misc_feature: MA Experiment 20001558 PARAMETER Experiment Name: At_Drought_Soil_Dry_P Parameter: Age (day) Value: 27
  misc_feature: MA Experiment 20001558 PARAMETER Experiment Name: At_Drought_Soil_Dry_P Parameter: Organism Value: A. thaliana
  misc_feature: MA Experiment 20001558 PARAMETER Experiment Name: At_Drought_Soil_Dry_P Parameter: Plant Line Value: WS
  misc_feature: MA Experiment 20001558 PARAMETER Experiment Name: At_Drought_Soil_Dry_P Parameter: Post Timepoint (hr) Value: 6
  misc_feature: MA Experiment 20001558 PARAMETER Experiment Name: At_Drought_Soil_Dry_P Parameter: Post-Treatment Value: Re-Water vs. No Drought
  misc_feature: MA Experiment 20001558 PARAMETER Experiment Name: At_Drought_Soil_Dry_P Parameter: Timepoint (day) Value: 13
  misc_feature: MA Experiment 20001558 PARAMETER Experiment Name: At_Drought_Soil_Dry_P Parameter: Treatment Value: Drought vs. No Drought
  misc_feature: MA Experiment ID: 20001560 Result: Down-regulated in Transcription
  misc_feature: MA Experiment 20001560 PARAMETER Experiment Name: At_Drought_Soil_Dry_P Parameter: Age (day) Value: 28
  misc_feature: MA Experiment 20001560 PARAMETER Experiment Name: At_Drought_Soil_Dry_P Parameter: Organism Value: A. thaliana
  misc_feature: MA Experiment 20001560 PARAMETER Experiment Name: At_Drought_Soil_Dry_P Parameter: Plant Line Value: WS
  misc_feature: MA Experiment 20001560 PARAMETER Experiment Name: At_Drought_Soil_Dry_P Parameter: Post Timepoint (hr) Value: None
  misc_feature: MA Experiment 20001560 PARAMETER Experiment Name: At_Drought_Soil_Dry_P Parameter: Post-Treatment Value: None
  misc_feature: MA Experiment 20001560 PARAMETER Experiment Name: At_Drought_Soil_Dry_P Parameter: Timepoint (day) Value: 14
  misc_feature: MA Experiment 20001560 PARAMETER Experiment Name: At_Drought_Soil_Dry_P Parameter: Treatment Value: Drought vs. No Drought
acattgcccataaaacctaaattccaaacaaatcattactactctctctctctctctctttctctcttggtttctccagcaatcttgcctccattttcaactccataaactcaagttccaaacacaaagcttccctttatctatctctatctctctctctccccccatctcgctctatatatagttgataagaaagattgctggagataacaacgaagaacgaaagagagagagagagagagagatatgatggacggcgttgaagacggcacggcgatgtacggtggtctcgagacggtgcaatacgtacggacgcatcatcaacatctgtgcagagaaaaccagtgtacctctgctcttgtcaaacacatcaaagctcctcttcatctcgtttggtcacttgtacggagatttgatcaaccgcagaaatacaaaccgtttgtgagcagatgtacagtaatcggtgatcctgaaatcggcagtcttagagaagtcaatgttaaatctggtcttcctgcaacaacatctactgagagattagaacttcttgatgatgaagaacacatcctcggtatcaaaatcatcggtggtgatcacagacttaagaattactcgtcgattttgacggttcatccggagataatcgagggaagagcaggaacgatggtgattgaatcgtttgtagttgatgttcctcaaggtaacacaaaggatgagacttgctactttgttgaagcacttatcagatgtaatctcaagtcactagcagatgtttctgaaagattggcttctcaggacattactcagtgaactacataatcaatgaacaagggcattgaagtgaagtatcaattccagtttgtgatataatcaatattcttcaggatttttttggtttggcctagatatatatatagatatctatcctcggtaatgaccagtctaaaaagatgtacatattgtcccaatggtgaagttttgatgtaagatatctcctggtggtttgttatttgtagatatttttgtaaacaatgtaaatgtgaatggtttatgatgtataatatatagttc

SEQ ID NO: 30376 - protein, 187 aa, Arabidopsis thaliana; identical to SEQ ID NO: 26831
  peptide (1)..(187): Ceres Seq. ID no. 12385475
  misc_feature (32)..(171): Pfam Name: Pathogenesis-related protein Bet v I family Pfam Description: Pathogenesis-related protein Bet v I family
  misc_feature (25)..(183): Homolog of NCBI NO: 18404709 NR Description: expressed protein
  misc_feature (19)..(185): Homolog of NCBI NO: 7486961 NR Description: hypothetical protein T13J8.30 - Arabidopsis
  misc_feature (19)..(185): Homolog of NCBI NO: 30687786 NR Description: expressed protein [Arabidopsis thaliana]
  misc_feature (19)..(187): Homolog of NCBI NO: 15238661 NR Description: putative protein; protein id: At5g53160.1
  misc_feature (49)..(186): Homolog of NCBI NO: 7486358 NR Description: hypothetical protein F3I3.40 - Arabidopsis
  misc_feature (1)..(186): Homolog of NCBI NO: 21593105 NR Description: unknown [Arabidopsis thaliana]
  misc_feature (1)..(186): Homolog of NCBI NO: 18411513 NR Description: Expressed protein
  misc_feature (2)..(187): Homolog of NCBI NO: 25348264 NR Description: hypothetical protein F6F3.16 - Arabidopsis
  misc_feature (1)..(187): Homolog of NCBI NO: 18378830 NR Description: expressed protein
  misc_feature (2)..(187): Homolog of NCBI NO: 21593547 NR Description: unknown [Arabidopsis thaliana]

SEQ ID NO: 30377 - protein, 186 aa, Arabidopsis thaliana; identical to SEQ ID NO: 26832
  peptide (1)..(186): Ceres Seq. ID no. 12385476
  misc_feature (31)..(170): Pfam Name: Pathogenesis-related protein Bet v I family Pfam Description: Pathogenesis-related protein Bet v I family
  misc_feature (24)..(182): Homolog of NCBI NO: 18404709 NR Description: expressed protein
  misc_feature (18)..(184): Homolog of NCBI NO: 7486961 NR Description: hypothetical protein T13J8.30 - Arabidopsis
  misc_feature (18)..(184): Homolog of NCBI NO: 30687786 NR Description: expressed protein [Arabidopsis thaliana]
  misc_feature (18)..(186): Homolog of NCBI NO: 15238661 NR Description: putative protein; protein id: At5g53160.1
  misc_feature (48)..(185): Homolog of NCBI NO: 7486358 NR Description: hypothetical protein F3I3.40 - Arabidopsis
  misc_feature (1)..(185): Homolog of NCBI NO: 21593105 NR Description: unknown [Arabidopsis thaliana]
  misc_feature (1)..(185): Homolog of NCBI NO: 18411513 NR Description: Expressed protein
  misc_feature (1)..(186): Homolog of NCBI NO: 25348264 NR Description: hypothetical protein F6F3.16 - Arabidopsis
  misc_feature (1)..(186): Homolog of NCBI NO: 18378830 NR Description: expressed protein
  misc_feature (1)..(186): Homolog of NCBI NO: 21593547 NR Description: unknown [Arabidopsis thaliana]

SEQ ID NO: 30378 - protein, 177 aa, Arabidopsis thaliana; identical to SEQ ID NO: 26833
  peptide (1)..(177): Ceres Seq. ID no. 12385477
  misc_feature (22)..(161): Pfam Name: Pathogenesis-related protein Bet v I family Pfam Description: Pathogenesis-related protein Bet v I family
  misc_feature (15)..(173): Homolog of NCBI NO: 18404709 NR Description: expressed protein
  misc_feature (9)..(175): Homolog of NCBI NO: 7486961 NR Description: hypothetical protein T13J8.30 - Arabidopsis
  misc_feature (9)..(175): Homolog of NCBI NO: 30687786 NR Description: expressed protein [Arabidopsis thaliana]
  misc_feature (9)..(177): Homolog of NCBI NO: 15238661 NR Description: putative protein; protein id: At5g53160.1
  misc_feature (39)..(176): Homolog of NCBI NO: 7486358 NR Description: hypothetical protein F3I3.40 - Arabidopsis
  misc_feature (1)..(176): Homolog of NCBI NO: 21593105 NR Description: unknown [Arabidopsis thaliana]
  misc_feature (1)..(176): Homolog of NCBI NO: 18411513 NR Description: Expressed protein
  misc_feature (1)..(177): Homolog of NCBI NO: 25348264 NR Description: hypothetical protein F6F3.16 - Arabidopsis
  misc_feature (1)..(177): Homolog of NCBI NO: 18378830 NR Description: expressed protein
  misc_feature (1)..(177): Homolog of NCBI NO: 21593547 NR Description: unknown [Arabidopsis thaliana]

SEQ ID NO: 30379 - DNA, 1266 bp, Arabidopsis thaliana
  misc_feature (1)..(1266): Ceres Seq. ID no. 12357583
  misc_feature: MA Experiment ID: 108461 Result: Down-regulated in Transcription
  misc_feature: MA Experiment 108461 PARAMETER Experiment Name: At_Germinating_Seeds_cDNA_P Parameter: Age (day) Value: 1 vs. 0
  misc_feature: MA Experiment 108461 PARAMETER Experiment Name: At_Germinating_Seeds_cDNA_P Parameter: Tissue Value: Germinating Seeds
  misc_feature: MA Experiment ID: 108462 Result: Down-regulated in Transcription
  misc_feature: MA Experiment 108462 PARAMETER Experiment Name: At_Germinating_Seeds_cDNA_P Parameter: Age (day) Value: 2 vs. 0
  misc_feature: MA Experiment 108462 PARAMETER Experiment Name: At_Germinating_Seeds_cDNA_P Parameter: Tissue Value: Germinating Seeds
  misc_feature: MA Experiment ID: 108463 Result: Down-regulated in Transcription
  misc_feature: MA Experiment 108463 PARAMETER Experiment Name: At_Germinating_Seeds_cDNA_P Parameter: Age (day) Value: 3 vs. 0
  misc_feature: MA Experiment 108463 PARAMETER Experiment Name: At_Germinating_Seeds_cDNA_P Parameter: Tissue Value: Germinating Seeds
  misc_feature: MA Experiment ID: 108464 Result: Down-regulated in Transcription
  misc_feature: MA Experiment 108464 PARAMETER Experiment Name: At_Germinating_Seeds_cDNA_P Parameter: Age (day) Value: 4 vs. 0
  misc_feature: MA Experiment 108464 PARAMETER Experiment Name: At_Germinating_Seeds_cDNA_P Parameter: Tissue Value: Germinating Seeds
  misc_feature: MA Experiment ID: 20000224 Result: Down-regulated in Transcription
  misc_feature: MA Experiment ID: 20001557 Result: Up-regulated in Transcription
  misc_feature: MA Experiment 20001557 PARAMETER Experiment Name: At_Drought_Soil_Dry_P Parameter: Age (day) Value: 27
  misc_feature: MA Experiment 20001557 PARAMETER Experiment Name: At_Drought_Soil_Dry_P Parameter: Organism Value: A. thaliana
  misc_feature: MA Experiment 20001557 PARAMETER Experiment Name: At_Drought_Soil_Dry_P Parameter: Plant Line Value: WS
  misc_feature: MA Experiment 20001557 PARAMETER Experiment Name: At_Drought_Soil_Dry_P Parameter: Post Timepoint (hr) Value: 3
  misc_feature: MA Experiment 20001557 PARAMETER Experiment Name: At_Drought_Soil_Dry_P Parameter: Post-Treatment Value: Re-Water vs. No Drought
  misc_feature: MA Experiment 20001557 PARAMETER Experiment Name: At_Drought_Soil_Dry_P Parameter: Timepoint (day) Value: 13
  misc_feature: MA Experiment 20001557 PARAMETER Experiment Name: At_Drought_Soil_Dry_P Parameter: Treatment Value: Drought vs. No Drought
  misc_feature: Phenotype: ROSETTE LEAVES Shape-Oval
  misc_feature: Phenotype: WHOLE PLANT Size-Small
  misc_feature: Phenotype: INFLORESCENCE Flowering Time-Late Flowering
  misc_feature: Phenotype: ROSETTE LEAVES Shape-Oval
  misc_feature: Phenotype: WHOLE PLANT Size-Small
  misc_feature: Phenotype: INFLORESCENCE Flowering Time-Late Flowering
  misc_feature: Phenotype: ROSETTE LEAVES Shape-Oval
  misc_feature: Phenotype: WHOLE PLANT Color-Dark Green
  misc_feature: Phenotype: ROSETTE LEAVES Shape-Oval
  misc_feature: Phenotype: WHOLE PLANT Color-Dark Green
aaaatctcatctttttccctcgacgacaaccaccttagggttaggtttattttctcgcttattctctctaactctttttccctattccgatttcgatttgtcttctccgattcgcttttcctttcgctctctagactctagagtcaatttgatttctactctcgtatcggatctatacttaatcatggatactcgtaagagaggacggcctgaagctggctcattcaactccaatggcggcggatacaagaagtctaagcaagagatggaatcatattcaactggtttaggaagcaaatcgaagccatgcacaaaatttttcagtacttctggctgtcctttcggagagaattgccatttcttgcattatgttcccggaggatacaatgctgtatcgcagatgacaaatatgggaccacccattcctcaagtttccagaaacatgcaaggttctggtaatggaggccgattctcagggaggggagagtctgggcctggccatgtctctaactttggtgactcagccactgccagattcagtgttgatgcctctttagccggtgcaatcattgggaaaggcggagtcagttcaaagcagatatgtcgtcagacgggagtaaaattatcaattcaagatcacgagagagacccaaacttgaagaacattgtgcttgaaggaacacttgagcagataagcgaagcgagtgcaatggtaaaagatttgattgggaggcttaattcagcagctaagaaaccacctggtggtggtcttggtggtggtggtggcatgggttctgaagggaaaccacatccagggagcaacttcaagactaagatatgtgagagattctcaaaaggaaactgtacatttggtgatagatgtcactttgctcatggggaagcagagctacgcaagtcaggaatcgtctagttgttgcttgcagatagagaatttgctggtaaaactagtttcttatttagtggtggtgatatctgatatcatcttcacctactttgtttttgtttgttatgagagaatacaattttagtttcattatcattgtaagtctatttggtgtttttttttaatagctttagtttttggttaattctgagtatgaattgagatgggaggaagcttgaagagaatgattgacaaaactcagaaacagtggttaggattgtatgacgccttttattcatattcttgttatctccgttatgtcatgtgtgtgaatcacttatataattttcgtaagattttcc

SEQ ID NO: 30380 - protein, 309 aa, Arabidopsis thaliana
  peptide (1)..(309): Ceres Seq. ID no. 12357584
  misc_feature (178)..(228): Pfam Name: KH domain Pfam Description: KH domain
  misc_feature (257)..(307): Homolog of NCBI NO: 18398397 NR Description: putative MYB family transcription factor
  misc_feature (257)..(307): Homolog of NCBI NO: 15912259 NR Description: At1g32359/F27G20.10 [Arabidopsis thaliana]
  misc_feature (94)..(170): Homolog of NCBI NO: 18398397 NR Description: putative MYB family transcription factor
  misc_feature (94)..(170): Homolog of NCBI NO: 15912259 NR Description: At1g32359/F27G20.10 [Arabidopsis thaliana]
  misc_feature (65)..(140): Homolog of NCBI NO: 5441893 NR Description: ESTs C99174(E10437),D22295(C10709) correspond to region of the predicted gene.~Similar to Arabidopsis thaliana BAC
  misc_feature (99)..(306): Homolog of NCBI NO: 5441893 NR Description: ESTs C99174(E10437),D22295(C10709) correspond to region of the predicted gene.~Similar to Arabidopsis thaliana BAC
  misc_feature (62)..(308): Homolog of NCBI NO: 21555233 NR Description: unknown [Arabidopsis thaliana]
  misc_feature (62)..(308): Homolog of NCBI NO: 15240145 NR Description: KH domain/zinc finger protein
  misc_feature (84)..(309): Homolog of NCBI NO: 9294110 NR Description: contains similarity to unknown
  misc_feature (62)..(309): Homolog of NCBI NO: 18399496 NR Description: KH domain/zinc finger protein; protein id:
KSHLFPSTTTTLGLGLFSRLFSLTLFPYSDFDLSSPIRFSFRSLDSRVNLISTLVSDLYLIMDTRKRGRPEAGSFNSNGGGYKKSKQEMESYSTGLGSKSKPCTKFFSTSGCPFGENCHFLHYVPGGYNAVSQMTNMGPPIPQVSRNMQGSGNGGRFSGRGESGPGHVSNFGDSATARFSVDASLAGAIIGKGGVSSKQICRQTGVKLSIQDHERDPNLKNIVLEGTLEQISEASAMVKDLIGRLNSAAKKPPGGGLGGGGGMGSEGKPHPGSNFKTKICERFSKGNCTFGDRCHFAHGEAELRKSGIV

SEQ ID NO: 30381 - protein, 248 aa, Arabidopsis thaliana
  peptide (1)..(248): Ceres Seq. ID no. 12357585
  misc_feature (117)..(167): Pfam Name: KH domain Pfam Description: KH domain
  misc_feature (196)..(246): Homolog of NCBI NO: 18398397 NR Description: putative MYB family transcription factor
  misc_feature (196)..(246): Homolog of NCBI NO: 15912259 NR Description: At1g32359/F27G20.10 [Arabidopsis thaliana]
  misc_feature (33)..(109): Homolog of NCBI NO: 18398397 NR Description: putative MYB family transcription factor
  misc_feature (33)..(109): Homolog of NCBI NO: 15912259 NR Description: At1g32359/F27G20.10 [Arabidopsis thaliana]
  misc_feature (4)..(79): Homolog of NCBI NO: 5441893 NR Description: ESTs C99174(E10437),D22295(C10709) correspond to region of the predicted gene.~Similar to Arabidopsis thaliana BAC
  misc_feature (38)..(245): Homolog of NCBI NO: 5441893 NR Description: ESTs C99174(E10437),D22295(C10709) correspond to region of the predicted gene.~Similar to Arabidopsis thaliana BAC
  misc_feature (1)..(247): Homolog of NCBI NO: 21555233 NR Description: unknown [Arabidopsis thaliana]
  misc_feature (1)..(247): Homolog of NCBI NO: 15240145 NR Description: KH domain/zinc finger protein
  misc_feature (23)..(248): Homolog of NCBI NO: 9294110 NR Description: contains similarity to unknown
  misc_feature (1)..(248): Homolog of NCBI NO: 18399496 NR Description: KH domain/zinc finger protein; protein id:
MDTRKRGRPEAGSFNSNGGGYKKSKQEMESYSTGLGSKSKPCTKFFSTSGCPFGENCHFLHYVPGGYNAVSQMTNMGPPIPQVSRNMQGSGNGGRFSGRGESGPGHVSNFGDSATARFSVDASLAGAIIGKGGVSSKQICRQTGVKLSIQDHERDPNLKNIVLEGTLEQISEASAMVKDLIGRLNSAAKKPPGGGLGGGGGMGSEGKPHPGSNFKTKICERFSKGNCTFGDRCHFAHGEAELRKSGIV

SEQ ID NO: 30382 - protein, 221 aa, Arabidopsis thaliana
  peptide (1)..(221): Ceres Seq. ID no. 12357586
  misc_feature (90)..(140): Pfam Name: KH domain Pfam Description: KH domain
  misc_feature (169)..(219): Homolog of NCBI NO: 18398397 NR Description: putative MYB family transcription factor
  misc_feature (169)..(219): Homolog of NCBI NO: 15912259 NR Description: At1g32359/F27G20.10 [Arabidopsis thaliana]
  misc_feature (6)..(82): Homolog of NCBI NO: 18398397 NR Description: putative MYB family transcription factor
  misc_feature (6)..(82): Homolog of NCBI NO: 15912259 NR Description: At1g32359/F27G20.10 [Arabidopsis thaliana]
  misc_feature (1)..(52): Homolog of NCBI NO: 5441893 NR Description: ESTs C99174(E10437),D22295(C10709) correspond to region of the predicted gene.~Similar to Arabidopsis thaliana BAC
  misc_feature (11)..(218): Homolog of NCBI NO: 5441893 NR Description: ESTs C99174(E10437),D22295(C10709) correspond to region of the predicted gene.~Similar to Arabidopsis thaliana BAC
  misc_feature (1)..(220): Homolog of NCBI NO: 21555233 NR Description: unknown [Arabidopsis thaliana]
  misc_feature (1)..(220): Homolog of NCBI NO: 15240145 NR Description: KH domain/zinc finger protein
  misc_feature (1)..(221): Homolog of NCBI NO: 9294110 NR Description: contains similarity to unknown
  misc_feature (1)..(221): Homolog of NCBI NO: 18399496 NR Description: KH domain/zinc finger protein; protein id:
MESYSTGLGSKSKPCTKFFSTSGCPFGENCHFLHYVPGGYNAVSQMTNMGPPIPQVSRNMQGSGNGGRFSGRGESGPGHVSNFGDSATARFSVDASLAGAIIGKGGVSSKQICRQTGVKLSIQDHERDPNLKNIVLEGTLEQISEASAMVKDLIGRLNSAAKKPPGGGLGGGGGMGSEGKPHPGSNFKTKICERFSKGNCTFGDRCHFAHGEAELRKSGIV

SEQ ID NO: 30383 - DNA, 764 bp, Arabidopsis thaliana
  misc_feature (1)..(764): Ceres Seq. ID no. 12385516
  misc_feature: MA Experiment ID: 108434 Result: Up-regulated in Transcription
  misc_feature: MA Experiment 108434 PARAMETER Experiment Name: At_Root_Tips_cDNA_P Parameter: Tissue Value: Root Tips
ctaatcgaaaaatcatcactttcacaatcttcttcatcgatttctctcttccaaatctcccaaaagatgtcgaaccctagagttttcttcgacatgagtctcagcggtactcccatcggacggatcgagatggagcttttcgctgatacaaccccaaacacggcggagaatttccgtgctctctgtaccggcgagaaaggaatgggaaagctaggtaagccacttcacttcaaaggatcgatcttccaccgtgtgattcccggattcatgtgtcaaggaggtgatttcaccgccaagaacggaaccggtggtgaatcgatctacggtgctaagttcaaggacgagaactttatcaagaagcatacaggagctgggattctctcaatggctaactctggtcctaacactaacggatctcagttcttcatctgtaccgataagacgtcgtggttagatggtaagcacgttgtgtttggacaagttgttaaaggcttggacgtcgtgaaggcgattgagaaagttggatctgattctggaaagacttccaaagtcgttaccatcactgattgtggtcagctttcttagatctaagtgagaaagtgagagactttgatctttatgagtaataatggtgtcttttgctttcggttgttcttcctcttaccttaatggattattctgtttagggtttgagttttcgtttcagagtttgtaacaaaacccttttgtgttttctggggtttgaaataattatgagcttactc

SEQ ID NO: 30384 - protein, 194 aa, Arabidopsis thaliana
  peptide (1)..(194): Ceres Seq. ID no. 12385517
  misc_feature (23)..(194): Homolog of NCBI NO: 29124975 NR Description: cyclophilin [Populus tremuloides]
  misc_feature (23)..(194): Homolog of NCBI NO: 1076510 NR Description: peptidylprolyl isomerase (EC 5.2.1.8) Cyp -
  misc_feature (23)..(193): Homolog of NCBI NO: 11270318 NR Description: peptidylprolyl isomerase (EC 5.2.1.8) CYP18
  misc_feature (23)..(194): Homolog of NCBI NO: 18146786 NR Description: CYP1 [Vigna radiata]
  misc_feature (24)..(194): Homolog of NCBI NO: 21886603 NR Description: peptidylprolyl isomerase (cyclophilin) [Betula
  misc_feature (23)..(193): Homolog of NCBI NO: 11270322 NR Description: peptidylprolyl isomerase (EC 5.2.1.8)
  misc_feature (24)..(194): Homolog of NCBI NO: 18076088 NR Description: cyclophilin [Ricinus communis]
  misc_feature (23)..(193): Homolog of NCBI NO: 11270316 NR Description: peptidylprolyl isomerase (EC 5.2.1.8)
  misc_feature (23)..(194): Homolog of NCBI NO: 3334157 NR Description: Peptidyl-prolyl cis-trans isomerase (PPIase)
  misc_feature (23)..(194): Homolog of NCBI NO: 15236211 NR Description: peptidylprolyl isomerase (cyclophilin)
LIEKSSLSQSSSSISLFQISQKMSNPRVFFDMSLSGTPIGRIEMELFADTTPNTAENFRALCTGEKGMGKLGKPLHFKGSIFHRVIPGFMCQGGDFTAKNGTGGESIYGAKFKDENFIKKHTGAGILSMANSGPNTNGSQFFICTDKTSWLDGKHVVFGQVVKGLDVVKAIEKVGSDSGKTSKVVTITDCGQLS

SEQ ID NO: 30385 - protein, 172 aa, Arabidopsis thaliana; identical to SEQ ID NO: 25632
  peptide (1)..(172): Ceres Seq. ID no. 12385518
  misc_feature (1)..(172): Homolog of NCBI NO: 29124975 NR Description: cyclophilin [Populus tremuloides]
  misc_feature (1)..(172): Homolog of NCBI NO: 1076510 NR Description: peptidylprolyl isomerase (EC 5.2.1.8) Cyp -
  misc_feature (1)..(171): Homolog of NCBI NO: 11270318 NR Description: peptidylprolyl isomerase (EC 5.2.1.8) CYP18
  misc_feature (1)..(172): Homolog of NCBI NO: 18146786 NR Description: CYP1 [Vigna radiata]
  misc_feature (2)..(172): Homolog of NCBI NO: 21886603 NR Description: peptidylprolyl isomerase (cyclophilin) [Betula
  misc_feature (1)..(171): Homolog of NCBI NO: 11270322 NR Description: peptidylprolyl isomerase (EC 5.2.1.8)
  misc_feature (2)..(172): Homolog of NCBI NO: 18076088 NR Description: cyclophilin [Ricinus communis]
  misc_feature (1)..(171): Homolog of NCBI NO: 11270316 NR Description: peptidylprolyl isomerase (EC 5.2.1.8)
  misc_feature (1)..(172): Homolog of NCBI NO: 3334157 NR Description: Peptidyl-prolyl cis-trans isomerase (PPIase)
  misc_feature (1)..(172): Homolog of NCBI NO: 15236211 NR Description: peptidylprolyl isomerase (cyclophilin)

SEQ ID NO: 30386 - protein, 163 aa, Arabidopsis thaliana; identical to SEQ ID NO: 25633
  peptide (1)..(163): Ceres Seq. ID no. 12385519
  misc_feature (1)..(163): Homolog of NCBI NO: 29124975 NR Description: cyclophilin [Populus tremuloides]
  misc_feature (1)..(163): Homolog of NCBI NO: 1076510 NR Description: peptidylprolyl isomerase (EC 5.2.1.8) Cyp -
  misc_feature (1)..(162): Homolog of NCBI NO: 11270318 NR Description: peptidylprolyl isomerase (EC 5.2.1.8) CYP18
  misc_feature (1)..(163): Homolog of NCBI NO: 18146786 NR Description: CYP1 [Vigna radiata]
  misc_feature (1)..(163): Homolog of NCBI NO: 21886603 NR Description: peptidylprolyl isomerase (cyclophilin) [Betula
  misc_feature (1)..(162): Homolog of NCBI NO: 11270322 NR Description: peptidylprolyl isomerase (EC 5.2.1.8)
  misc_feature (1)..(163): Homolog of NCBI NO: 18076088 NR Description: cyclophilin [Ricinus communis]
  misc_feature (1)..(162): Homolog of NCBI NO: 11270316 NR Description: peptidylprolyl isomerase (EC 5.2.1.8)
  misc_feature (1)..(163): Homolog of NCBI NO: 3334157 NR Description: Peptidyl-prolyl cis-trans isomerase (PPIase)
  misc_feature (1)..(163): Homolog of NCBI NO: 15236211 NR Description: peptidylprolyl isomerase (cyclophilin)

SEQ ID NO: 30387 - DNA, 1281 bp, Arabidopsis thaliana
  misc_feature (1)..(1281): Ceres Seq. ID no. 12321331
  misc_feature: MA Experiment ID: 108462 Result: Up-regulated in Transcription
  misc_feature: MA Experiment 108462 PARAMETER Experiment Name: At_Germinating_Seeds_cDNA_P Parameter: Age (day) Value: 2 vs. 0
  misc_feature: MA Experiment 108462 PARAMETER Experiment Name: At_Germinating_Seeds_cDNA_P Parameter: Tissue Value: Germinating Seeds
  misc_feature: MA Experiment ID: 108463 Result: Up-regulated in Transcription
  misc_feature: MA Experiment 108463 PARAMETER Experiment Name: At_Germinating_Seeds_cDNA_P Parameter: Age (day) Value: 3 vs. 0
  misc_feature: MA Experiment 108463 PARAMETER Experiment Name: At_Germinating_Seeds_cDNA_P Parameter: Tissue Value: Germinating Seeds
  misc_feature: MA Experiment ID: 108469 Result: Up-regulated in Transcription
  misc_feature: MA Experiment ID: 108569 Result: Up-regulated in Transcription
  misc_feature: MA Experiment 108569 PARAMETER Experiment Name: At_0.001%_MeJA__cDNA_P Parameter: Timepoint (hr) Value: 6
  misc_feature: MA Experiment 108569 PARAMETER Experiment Name: At_0.001%_MeJA__cDNA_P Parameter: Tissue Value: Aerial
  misc_feature: MA Experiment 108569 PARAMETER Experiment Name: At_0.001%_MeJA__cDNA_P Parameter: Treatment Value: 0.001% MeJA vs. No Treatment
  misc_feature: MA Experiment ID: 108573 Result: Up-regulated in Transcription
  misc_feature: MA Experiment 108573 PARAMETER Experiment Name: At_Drought_cDNA_P Parameter: Timepoint (hr) Value: 6
  misc_feature: MA Experiment 108573 PARAMETER Experiment Name: At_Drought_cDNA_P Parameter: Tissue Value: Aerial
  misc_feature: MA Experiment 108573 PARAMETER Experiment Name: At_Drought_cDNA_P Parameter: Treatment Value: Drought vs. No Drought
  misc_feature: MA Experiment ID: 108585 Result: Up-regulated in Transcription
  misc_feature: MA Experiment 108585 PARAMETER Experiment Name: At_5mM_NaNP_cDNA_P Parameter: Timepoint (hr) Value: 6
  misc_feature: MA Experiment 108585 PARAMETER Experiment Name: At_5mM_NaNP_cDNA_P Parameter: Tissue Value: Aerial
  misc_feature: MA Experiment 108585 PARAMETER Experiment Name: At_5mM_NaNP_cDNA_P Parameter: Treatment Value: null
  misc_feature: MA Experiment ID: 108668 Result: Up-regulated in Transcription
  misc_feature: MA Experiment 108668 PARAMETER Experiment Name: At_2mM_SA_cDNA_P Parameter: Plant Line Value: WS
  misc_feature: MA Experiment 108668 PARAMETER Experiment Name: At_2mM_SA_cDNA_P Parameter: Timepoint (hr) Value: 6
  misc_feature: MA Experiment 108668 PARAMETER Experiment Name: At_2mM_SA_cDNA_P Parameter: Treatment Value: 2mM SA vs. No Treatment
  misc_feature: MA Experiment ID: 20000113 Result: Down-regulated in Transcription
  misc_feature: MA Experiment 20000113 PARAMETER Experiment Name: At_42deg_Heat_cDNA_P Parameter: Temperature (deg C) Value: 42 vs. 22
  misc_feature: MA Experiment 20000113 PARAMETER Experiment Name: At_42deg_Heat_cDNA_P Parameter: Timepoint (hr) Value: 8
  misc_feature: MA Experiment 20000113 PARAMETER Experiment Name: At_42deg_Heat_cDNA_P Parameter: Tissue Value: Aerial
  misc_feature: MA Experiment ID: 20000182 Result: Up-regulated in Transcription
  misc_feature: MA Experiment 20000182 PARAMETER Experiment Name: At_2mM_SA_P Parameter: Age (day) Value: 14
  misc_feature: MA Experiment 20000182 PARAMETER Experiment Name: At_2mM_SA_P Parameter: Organism Value: A. thaliana
  misc_feature: MA Experiment 20000182 PARAMETER Experiment Name: At_2mM_SA_P Parameter: Plant Line Value: WS
  misc_feature: MA Experiment 20000182 PARAMETER Experiment Name: At_2mM_SA_P Parameter: Timepoint (hr) Value: 6
  misc_feature: MA Experiment 20000182 PARAMETER Experiment Name: At_2mM_SA_P Parameter: Tissue Value: Aerial
  misc_feature: MA Experiment 20000182 PARAMETER Experiment Name: At_2mM_SA_P Parameter: Treatment Value: 2mM SA vs. No Treatment
  misc_feature: MA Experiment ID: 20000185 Result: Up-regulated in Transcription
  misc_feature: MA Experiment 20000185 PARAMETER Experiment Name: At_Roots__P Parameter: Age (day) Value: 7 vs. 21
  misc_feature: MA Experiment 20000185 PARAMETER Experiment Name: At_Roots__P Parameter: Organism Value: A. thaliana
  misc_feature: MA Experiment 20000185 PARAMETER Experiment Name: At_Roots__P Parameter: Tissue Value: Roots vs. Whole Plant
  misc_feature: MA Experiment ID: 20000439 Result: Up-regulated in Transcription
  misc_feature: MA Experiment 20000439 PARAMETER Experiment Name: At_Roots__P Parameter: Age (day) Value: 14 vs. 21
  misc_feature: MA Experiment 20000439 PARAMETER Experiment Name: At_Roots__P Parameter: Organism Value: A. thaliana
  misc_feature: MA Experiment 20000439 PARAMETER Experiment Name: At_Roots__P Parameter: Tissue Value: Roots vs. Whole Plant
  misc_feature: MA Experiment ID: 20000527 Result: Down-regulated in Transcription
  misc_feature: MA Experiment 20000527 PARAMETER Experiment Name: At_10percent_PEG_P Parameter: Age (day) Value: 20
  misc_feature: MA Experiment 20000527 PARAMETER Experiment Name: At_10percent_PEG_P Parameter: Organism Value: A. thaliana
  misc_feature: MA Experiment 20000527 PARAMETER Experiment Name: At_10percent_PEG_P Parameter: Plant Line Value: WS
  misc_feature: MA Experiment 20000527 PARAMETER Experiment Name: At_10percent_PEG_P Parameter: Timepoint (day) Value: 20
  misc_feature: MA Experiment 20000527 PARAMETER Experiment Name: At_10percent_PEG_P Parameter: Tissue Value: Whole Plant
  misc_feature: MA Experiment 20000527 PARAMETER Experiment Name: At_10percent_PEG_P Parameter: Treatment Value: 10percent PEG vs. No Treatment
tttttatgtattcttctccttgtccttccttactctctatatttttctcaattctccgatttgatccaacgatttcacagatctctgatctaaatggcatccaacggtgataaaggactgatcgttagcttcggcgagatgctaatcgatttcgtccctaccgaatcaggcgtctctctcgccgaagctcctggattcctcaaagctccaggcggtgctcccgctaacgtcgcaatcgctgtttctcgtctcggtggacgatctgctttcgtcggaaaacttggagacgacgagttcggtcatatgttggctgggattttgaggaagaacggtgttgatgatcaggggattaacttcgatactggagctagaactgctttagctttcgttacgttacgtgctgatggagatcgtgagtttatgttttaccgcaatcctagcgccgatatgcttcttcgtcctgatgaactcaatctcgacctcatcagatccgcgaaagtgtttcactatggatcaataagtttgatagtggagccgtgtaggtcagctcatttgaaggccatggaagtggcgaaagaagcaggagctcttctttcctatgacccaaacctcagggagcctctgtggccatcaaaagaagaagccaaaacacagatcatgagcatttgggacaaagctgagatcatcaaggtgagcgatgttgagcttgagtttctaactggaagcaacaagattgatgatgagaccgcgttgaccttgtggcatcccaacttgaagctgttgttagtcactcttggtgaaaagggctgtcggtattacaccaagactttcaaaggagccgttgaccctttccatgtgaacgctgtggacacaaccggagctggagattcctttgtcggtgctcttctaaaccagattgtcgatgatcgatccgttctcgaggacgaagagagattgaggaaagtgctgagattcgcaaatgcttgtggagcaatcacaacgaccaaaaaaggagccattccagctcttccctcagatgctgaagttcggagctttctcgaaaagaaatagaaacaaaacaactcaagcttctattacgtaatctgtttccgcgattatcttctctttttgtattcttgttttcggatggttgaatcgagaagagaaacaaattcggcattccgctctgtttttgtttctcttcttcaaatgtaatgatttagaaaagacgtatgttgcaatttaaggcttcacttgctaataaaatgataaggttttttc

SEQ ID NO: 30388 - protein, 325 aa, Arabidopsis thaliana
  peptide (1)..(325): Ceres Seq. ID no. 12321332
  misc_feature (7)..(315): Pfam Name: pfkB family carbohydrate kinase Pfam Description: pfkB family carbohydrate kinase
  misc_feature (1)..(323): Homolog of NCBI NO: 585973 NR Description: FRUCTOKINASE
  misc_feature (3)..(324): Homolog of NCBI NO: 7434223 NR Description: fructokinase (EC 2.7.1.4) - beet
  misc_feature (1)..(323): Homolog of NCBI NO: 32765547 NR Description: fructokinase 2 [Lycopersicon hirsutum]
  misc_feature (1)..(323): Homolog of NCBI NO: 1915974 NR Description: fructokinase [Lycopersicon esculentum]
  misc_feature (2)..(323): Homolog of NCBI NO: 21592495 NR Description: fructokinase-like protein [Arabidopsis thaliana]
  misc_feature (2)..(323): Homolog of NCBI NO: 15231692 NR Description: fructokinase-like protein
  misc_feature (2)..(325): Homolog of NCBI NO: 15221364 NR Description: fructokinase, putative; protein id: At1g06020.1
  misc_feature (2)..(323): Homolog of NCBI NO: 15221365 NR Description: fructokinase, putative
  misc_feature (1)..(325): Homolog of NCBI NO: 14423528 NR Description: putative fructokinase [Arabidopsis thaliana]
  misc_feature (1)..(325): Homolog of NCBI NO: 15224669 NR Description: putative fructokinase
MASNGDKGLIVSFGEMLIDFVPTESGVSLAEAPGFLKAPGGAPANVAIAVSRLGGRSAFVGKLGDDEFGHMLAGILRKNGVDDQGINFDTGARTALAFVTLRADGDREFMFYRNPSADMLLRPDELNLDLIRSAKVFHYGSISLIVEPCRSAHLKAMEVAKEAGALLSYDPNLREPLWPSKEEAKTQIMSIWDKAEIIKVSDVELEFLTGSNKIDDETALTLWHPNLKLLLVTLGEKGCRYYTKTFKGAVDPFHVNAVDTTGAGDSFVGALLNQIVDDRSVLEDEERLRKVLRFANACGAITTTKKGAIPALPSDAEVRSFLEKK

SEQ ID NO: 30389 - protein, 310 aa, Arabidopsis thaliana
  peptide (1)..(310): Ceres Seq. ID no. 12321333
  misc_feature (1)..(300): Pfam Name: pfkB family carbohydrate kinase Pfam Description: pfkB family carbohydrate kinase
  misc_feature (1)..(308): Homolog of NCBI NO: 585973 NR Description: FRUCTOKINASE
  misc_feature (1)..(309): Homolog of NCBI NO: 7434223 NR Description: fructokinase (EC 2.7.1.4) - beet
  misc_feature (1)..(308): Homolog of NCBI NO: 32765547 NR Description: fructokinase 2 [Lycopersicon hirsutum]
  misc_feature (1)..(308): Homolog of NCBI NO: 1915974 NR Description: fructokinase [Lycopersicon esculentum]
  misc_feature (1)..(308): Homolog of NCBI NO: 21592495 NR Description: fructokinase-like protein [Arabidopsis thaliana]
  misc_feature (1)..(308): Homolog of NCBI NO: 15231692 NR Description: fructokinase-like protein
  misc_feature (1)..(310): Homolog of NCBI NO: 15221364 NR Description: fructokinase, putative; protein id: At1g06020.1
  misc_feature (1)..(308): Homolog of NCBI NO: 15221365 NR Description: fructokinase, putative
  misc_feature (1)..(310): Homolog of NCBI NO: 14423528 NR Description: putative fructokinase [Arabidopsis thaliana]
  misc_feature (1)..(310): Homolog of NCBI NO: 15224669 NR Description: putative fructokinase
MLIDFVPTESGVSLAEAPGFLKAPGGAPANVAIAVSRLGGRSAFVGKLGDDEFGHMLAGILRKNGVDDQGINFDTGARTALAFVTLRADGDREFMFYRNPSADMLLRPDELNLDLIRSAKVFHYGSISLIVEPCRSAHLKAMEVAKEAGALLSYDPNLREPLWPSKEEAKTQIMSIWDKAEIIKVSDVELEFLTGSNKIDDETALTLWHPNLKLLLVTLGEKGCRYYTKTFKGAVDPFHVNAVDTTGAGDSFVGALLNQIVDDRSVLEDEERLRKVLRFANACGAITTTKKGAIPALPSDAEVRSFLEKK

SEQ ID NO: 30390 - protein, 255 aa, Arabidopsis thaliana
  peptide (1)..(255): Ceres Seq. ID no. 12321334
  misc_feature (1)..(245): Pfam Name: pfkB family carbohydrate kinase Pfam Description: pfkB family carbohydrate kinase
  misc_feature (1)..(253): Homolog of NCBI NO: 585973 NR Description: FRUCTOKINASE
  misc_feature (1)..(254): Homolog of NCBI NO: 7434223 NR Description: fructokinase (EC 2.7.1.4) - beet
  misc_feature (1)..(253): Homolog of NCBI NO: 32765547 NR Description: fructokinase 2 [Lycopersicon hirsutum]
  misc_feature (1)..(253): Homolog of NCBI NO: 1915974 NR Description: fructokinase [Lycopersicon esculentum]
  misc_feature (1)..(253): Homolog of NCBI NO: 21592495 NR Description: fructokinase-like protein [Arabidopsis thaliana]
  misc_feature (1)..(253): Homolog of NCBI NO: 15231692 NR Description: fructokinase-like protein
  misc_feature (1)..(255): Homolog of NCBI NO: 15221364 NR Description: fructokinase, putative; protein id: At1g06020.1
  misc_feature (1)..(253): Homolog of NCBI NO: 15221365 NR Description: fructokinase, putative
  misc_feature (1)..(255): Homolog of NCBI NO: 14423528 NR Description: putative fructokinase [Arabidopsis thaliana]
  misc_feature (1)..(255): Homolog of NCBI NO: 15224669 NR Description: putative fructokinase
MLAGILRKNGVDDQGINFDTGARTALAFVTLRADGDREFMFYRNPSADMLLRPDELNLDLIRSAKVFHYGSISLIVEPCRSAHLKAMEVAKEAGALLSYDPNLREPLWPSKEEAKTQIMSIWDKAEIIKVSDVELEFLTGSNKIDDETALTLWHPNLKLLLVTLGEKGCRYYTKTFKGAVDPFHVNAVDTTGAGDSFVGALLNQIVDDRSVLEDEERLRKVLRFANACGAITTTKKGAIPALPSDAEVRSFLEKK

SEQ ID NO: 30391 - DNA, 1231 bp, Arabidopsis thaliana
  misc_feature (1)..(1231): Ceres Seq. ID no. 13500315
  misc_feature: MA Experiment ID: 108473 Result: Down-regulated in Transcription
  misc_feature: MA Experiment 108473 PARAMETER Experiment Name: At_Drought_Flowers_cDNA_P Parameter: Timepoint (hr) Value: 7 d
  misc_feature: MA Experiment 108473 PARAMETER Experiment Name: At_Drought_Flowers_cDNA_P Parameter: Tissue Value: Flower
  misc_feature: MA Experiment 108473 PARAMETER Experiment Name: At_Drought_Flowers_cDNA_P Parameter: Treatment Value: Drought vs. No Drought
  misc_feature: MA Experiment ID: 108474 Result: Down-regulated in Transcription
  misc_feature: MA Experiment 108474 PARAMETER Experiment Name: At_Drought_Flowers_cDNA_P Parameter: Timepoint (hr) Value: null
  misc_feature: MA Experiment 108474 PARAMETER Experiment Name: At_Drought_Flowers_cDNA_P Parameter: Treatment Value: Drought vs. No Drought
  misc_feature: MA Experiment ID: 108501 Result: Up-regulated in Transcription
  misc_feature: MA Experiment 108501 PARAMETER Experiment Name: At_ap2_floral_buds_cDNA_P Parameter: Plant Line Value: ap2 (Ler.)
  misc_feature: MA Experiment 108501 PARAMETER Experiment Name: At_ap2_floral_buds_cDNA_P Parameter: Tissue Value: Closed Flower
aaccaaaagaatcacgacattgaatcttctttcatttctctcctcaagacatagtagcataagaaaatgaagatatcatcactaggatgggtcttagtccttatcttcatctctattaccattgtttcgagtgcaccagcacctaaacctcctaaacctaagcctgcaccagcacctacacctcctaaacctaagcccacaccagcacctacacctcctaaacctaagcccaaaccagcacctacacctcctaaacctaagcccacaccagcacctacacctcctaaacctaagcctgcaccagcaccagcaccagcaccaacaccagcaccgaaacctaaacctgcacctaaaccagcaccaggtggagaagttgaggacgaaaccgagtttagctacgagacgaaaggaaacaaggggccagcgaaatggggaacactacatgcagagtggaaaatgtgtggaataggcaaaatgcaatctcctattgatcttcgggacaaaaatgtggtagttagtaataaatttggattgcttcgtagccagtatctgccttctaataccaccattaagaacagaggtcatgatatcatgttgaaattcaaaggaggcaataaaggtattggtgtcactatccgtggtactagatatcaacttcaacaacttcattggcactctccttccgaacatacaatcaatggcaaaaggtttgcgctagaggaacacttggttcatgagagtaaagataaacgctacgctgttgtcgctttcttatacaatctcggagcatctgacccttttctcttttcgttggaaaaacaattgaagaagataactgatacacatgcgtccgaggaacatgtcggaatcattgatcccaaaaaactcagttttgaatcaaaacattattatagatattccggatcacttactgctcctccatgttctgaaaatgttatttggtccgtttccaaagagattcgcactgtgtcaagtaaacaagtgaagcttctccgtgtggctgtacacgatgcttcagattcaaatgccaggccgcttcaagcagtcaataagcgcaaggtatatttatacaaaccaaaggttaagttaatgaagaaatactgtaatataagttcttactagtaatctttaattctttatatatgtacattatgaattgtacactaaaatgatgtttttagggataaactgatgacttggttttgttatt

SEQ ID NO: 30392 - protein, 358 aa, Arabidopsis thaliana
  peptide (1)..(358): Ceres Seq. ID no. 13500316
  misc_feature (122)..(274): Pfam Name: Eukaryotic-type carbonic anhydrase Pfam Description: Eukaryotic-type carbonic anhydrase
  misc_feature (103)..(307): Homolog of NCBI NO: 30683808 NR Description: carbonic anhydrase -related [Arabidopsis thaliana]
  misc_feature (98)..(339): Homolog of NCBI NO: 29468280 NR Description: nectarin III [Nicotiana langsdorffii x Nicotiana
  misc_feature (101)..(346): Homolog of NCBI NO: 25407021 NR Description: protein T6D22.16 [imported] - Arabidopsis
  misc_feature (250)..(344): Homolog of NCBI NO: 25407019 NR Description: protein T6D22.14 [imported] - Arabidopsis
  misc_feature (103)..(227): Homolog of NCBI NO: 25407019 NR Description: protein T6D22.14 [imported] - Arabidopsis
  misc_feature (103)..(345): Homolog of NCBI NO: 25291473 NR Description: probable carbonic anhydrase [imported] -
  misc_feature (101)..(346): Homolog of NCBI NO: 15223122 NR Description: storage protein -related [Arabidopsis thaliana]
  misc_feature (103)..(344): Homolog of NCBI NO: 15223097 NR Description: carbonic anhydrase -related [Arabidopsis thaliana]
  misc_feature (303)..(358): Homolog of NCBI NO: 15241186 NR Description: proline-rich protein family [Arabidopsis
  misc_feature (1)..(274): Homolog of NCBI NO: 15241186 NR Description: proline-rich protein family [Arabidopsis
MKISSLGWVLVLIFISITIVSSAPAPKPPKPKPAPAPTPPKPKPTPAPTPPKPKPKPAPTPPKPKPTPAPTPPKPKPAPAPAPAPTPAPKPKPAPKPAPGGEVEDETEFSYETKGNKGPAKWGTLHAEWKMCGIGKMQSPIDLRDKNVVVSNKFGLLRSQYLPSNTTIKNRGHDIMLKFKGGNKGIGVTIRGTRYQLQQLHWHSPSEHTINGKRFALEEHLVHESKDKRYAVVAFLYNLGASDPFLFSLEKQLKKITDTHASEEHVGIIDPKKLSFESKHYYRYSGSLTAPPCSENVIWSVSKEIRTVSSKQVKLLRVAVHDASDSNARPLQAVNKRKVYLYKPKVKLMKKYCNISSY

SEQ ID NO: 30393 - protein, 228 aa, Arabidopsis thaliana
  peptide (1)..(228): Ceres Seq. ID no. 13500317
  misc_feature (1)..(144): Pfam Name: Eukaryotic-type carbonic anhydrase Pfam Description: Eukaryotic-type carbonic anhydrase
  misc_feature (1)..(177): Homolog of NCBI NO: 30683808 NR Description: carbonic anhydrase -related [Arabidopsis thaliana]
  misc_feature (1)..(209): Homolog of NCBI NO: 29468280 NR Description: nectarin III [Nicotiana langsdorffii x Nicotiana
  misc_feature (1)..(216): Homolog of NCBI NO: 25407021 NR Description: protein T6D22.16 [imported] - Arabidopsis
  misc_feature (120)..(214): Homolog of NCBI NO: 25407019 NR Description: protein T6D22.14 [imported] - Arabidopsis
  misc_feature (1)..(97): Homolog of NCBI NO: 25407019 NR Description: protein T6D22.14 [imported] - Arabidopsis
  misc_feature (1)..(215): Homolog of NCBI NO: 25291473 NR Description: probable carbonic anhydrase [imported] -
  misc_feature (1)..(216): Homolog of NCBI NO: 15223122 NR Description: storage protein -related [Arabidopsis thaliana]
  misc_feature (1)..(214): Homolog of NCBI NO: 15223097 NR Description: carbonic anhydrase -related [Arabidopsis thaliana]
  misc_feature (173)..(228): Homolog of NCBI NO: 15241186 NR Description: proline-rich protein family [Arabidopsis
  misc_feature (1)..(144): Homolog of NCBI NO: 15241186 NR Description: proline-rich protein family [Arabidopsis
MCGIGKMQSPIDLRDKNVVVSNKFGLLRSQYLPSNTTIKNRGHDIMLKFKGGNKGIGVTIRGTRYQLQQLHWHSPSEHTINGKRFALEEHLVHESKDKRYAVVAFLYNLGASDPFLFSLEKQLKKITDTHASEEHVGIIDPKKLSFESKHYYRYSGSLTAPPCSENVIWSVSKEIRTVSSKQVKLLRVAVHDASDSNARPLQAVNKRKVYLYKPKVKLMKKYCNISSY

SEQ ID NO: 30394 - protein, 222 aa, Arabidopsis thaliana
  peptide (1)..(222): Ceres Seq. ID no. 13500318
  misc_feature (1)..(138): Pfam Name: Eukaryotic-type carbonic anhydrase Pfam Description: Eukaryotic-type carbonic anhydrase
  misc_feature (1)..(171): Homolog of NCBI NO: 30683808 NR Description: carbonic anhydrase -related [Arabidopsis thaliana]
  misc_feature (1)..(203): Homolog of NCBI NO: 29468280 NR Description: nectarin III [Nicotiana langsdorffii x Nicotiana
  misc_feature (1)..(210): Homolog of NCBI NO: 25407021 NR Description: protein T6D22.16 [imported] - Arabidopsis
  misc_feature (114)..(208): Homolog of NCBI NO: 25407019 NR Description: protein T6D22.14 [imported] - Arabidopsis
  misc_feature (1)..(91): Homolog of NCBI NO: 25407019 NR Description: protein T6D22.14 [imported] - Arabidopsis
  misc_feature (1)..(209): Homolog of NCBI NO: 25291473 NR Description: probable carbonic anhydrase [imported] -
  misc_feature (1)..(210): Homolog of NCBI NO: 15223122 NR Description: storage protein -related [Arabidopsis thaliana]
  misc_feature (1)..(208): Homolog of NCBI NO: 15223097 NR Description: carbonic anhydrase -related [Arabidopsis thaliana]
  misc_feature (167)..(222): Homolog of NCBI NO: 15241186 NR Description: proline-rich protein family [Arabidopsis
  misc_feature (1)..(138): Homolog of NCBI NO: 15241186 NR Description: proline-rich protein family [Arabidopsis
MQSPIDLRDKNVVVSNKFGLLRSQYLPSNTTIKNRGHDIMLKFKGGNKGIGVTIRGTRYQLQQLHWHSPSEHTINGKRFALEEHLVHESKDKRYAVVAFLYNLGASDPFLFSLEKQLKKITDTHASEEHVGIIDPKKLSFESKHYYRYSGSLTAPPCSENVIWSVSKEIRTVSSKQVKLLRVAVHDASDSNARPLQAVNKRKVYLYKPKVKLMKKYCNISSY

SEQ ID NO: 30395 - DNA, 997 bp, Arabidopsis thaliana
  misc_feature (1)..(997): Ceres Seq. ID no. 12336034
  misc_feature: MA Experiment ID: 108488 Result: Down-regulated in Transcription
  misc_feature: MA Experiment ID: 108561 Result: Up-regulated in Transcription
  misc_feature: MA Experiment 108561 PARAMETER Experiment Name: At_100uM_ABA_cDNA_P Parameter: Timepoint (hr) Value: 6
  misc_feature: MA Experiment 108561 PARAMETER Experiment Name: At_100uM_ABA_cDNA_P Parameter: Tissue Value: Aerial
  misc_feature: MA Experiment 108561 PARAMETER Experiment Name: At_100uM_ABA_cDNA_P Parameter: Treatment Value: 100uM ABA vs. No Treatment
  misc_feature: MA Experiment ID: 108572 Result: Up-regulated in Transcription
  misc_feature: MA Experiment 108572 PARAMETER Experiment Name: At_Drought_cDNA_P Parameter: Timepoint (hr) Value: 1
  misc_feature: MA Experiment 108572 PARAMETER Experiment Name: At_Drought_cDNA_P Parameter: Tissue Value: Aerial
  misc_feature: MA Experiment 108572 PARAMETER Experiment Name: At_Drought_cDNA_P Parameter: Treatment Value: Drought vs. No Drought
  misc_feature: MA Experiment ID: 108573 Result: Up-regulated in Transcription
  misc_feature: MA Experiment 108573 PARAMETER Experiment Name: At_Drought_cDNA_P Parameter: Timepoint (hr) Value: 6
  misc_feature: MA Experiment 108573 PARAMETER Experiment Name: At_Drought_cDNA_P Parameter: Tissue Value: Aerial
  misc_feature: MA Experiment 108573 PARAMETER Experiment Name: At_Drought_cDNA_P Parameter: Treatment Value: Drought vs. No Drought
  misc_feature: MA Experiment ID: 108585 Result: Up-regulated in Transcription
  misc_feature: MA Experiment 108585 PARAMETER Experiment Name: At_5mM_NaNP_cDNA_P Parameter: Timepoint (hr) Value: 6
  misc_feature: MA Experiment 108585 PARAMETER Experiment Name: At_5mM_NaNP_cDNA_P Parameter: Tissue Value: Aerial
  misc_feature: MA Experiment 108585 PARAMETER Experiment Name: At_5mM_NaNP_cDNA_P Parameter: Treatment Value: null
  misc_feature: MA Experiment ID: 108668 Result: Up-regulated in Transcription
  misc_feature: MA Experiment 108668 PARAMETER Experiment Name: At_2mM_SA_cDNA_P Parameter: Plant Line Value: WS
  misc_feature: MA Experiment 108668 PARAMETER Experiment Name: At_2mM_SA_cDNA_P Parameter: Timepoint (hr) Value: 6
  misc_feature: MA Experiment 108668 PARAMETER Experiment Name: At_2mM_SA_cDNA_P Parameter: Treatment Value: 2mM SA vs. No Treatment
  misc_feature: MA Experiment ID: 20000071 Result: Up-regulated in Transcription
  misc_feature: MA Experiment 20000071 PARAMETER Experiment Name: At_100uM_ABA_Mutants_cDNA_P Parameter: Plant Line Value: CS8104
  misc_feature: MA Experiment 20000071 PARAMETER Experiment Name: At_100uM_ABA_Mutants_cDNA_P Parameter: Timepoint (hr) Value: 6
  misc_feature: MA Experiment 20000071 PARAMETER Experiment Name: At_100uM_ABA_Mutants_cDNA_P Parameter: Tissue Value: Aerial
  misc_feature: MA Experiment 20000071 PARAMETER Experiment Name: At_100uM_ABA_Mutants_cDNA_P Parameter: Treatment Value: 100uM ABA vs. No Treatment
  misc_feature: MA Experiment ID: 20000111 Result: Up-regulated in Transcription
  misc_feature: MA Experiment 20000111 PARAMETER Experiment Name: At_42deg_Heat_cDNA_P Parameter: Temperature (deg C) Value: 42 vs. 22
  misc_feature: MA Experiment 20000111 PARAMETER Experiment Name: At_42deg_Heat_cDNA_P Parameter: Timepoint (hr) Value: 6
  misc_feature: MA Experiment 20000111 PARAMETER Experiment Name: At_42deg_Heat_cDNA_P Parameter: Tissue Value: Aerial
  misc_feature: MA Experiment ID: 20000113 Result: Up-regulated in Transcription
  misc_feature: MA Experiment 20000113 PARAMETER Experiment Name: At_42deg_Heat_cDNA_P Parameter: Temperature (deg C) Value: 42 vs. 22
  misc_feature: MA Experiment 20000113 PARAMETER Experiment Name: At_42deg_Heat_cDNA_P Parameter: Timepoint (hr) Value: 8
  misc_feature: MA Experiment 20000113 PARAMETER Experiment Name: At_42deg_Heat_cDNA_P Parameter: Tissue Value: Aerial
  misc_feature: MA Experiment ID: 20000144 Result: Up-regulated in Transcription
  misc_feature: MA Experiment 20000144 PARAMETER Experiment Name: At_42deg_Heat_cDNA_P Parameter: Temperature (deg C) Value: 42 vs. 22
  misc_feature: MA Experiment 20000144 PARAMETER Experiment Name: At_42deg_Heat_cDNA_P Parameter: Timepoint (hr) Value: 1
  misc_feature: MA Experiment 20000144 PARAMETER Experiment Name: At_42deg_Heat_cDNA_P Parameter: Tissue Value: Aerial
  misc_feature: MA Experiment ID: 20000171 Result: Up-regulated in Transcription
  misc_feature: MA Experiment 20000171 PARAMETER Experiment Name: At_42deg_Heat_P Parameter: Age (day) Value: 14
  misc_feature: MA Experiment 20000171 PARAMETER Experiment Name: At_42deg_Heat_P Parameter: Organism Value: A. thaliana
  misc_feature: MA Experiment 20000171 PARAMETER Experiment Name: At_42deg_Heat_P Parameter: Plant Line Value: WS
  misc_feature: MA Experiment 20000171 PARAMETER Experiment Name: At_42deg_Heat_P Parameter: Temperature (deg C) Value: 42 vs. 22
  misc_feature: MA Experiment 20000171 PARAMETER Experiment Name: At_42deg_Heat_P Parameter: Timepoint (hr) Value: 1
  misc_feature: MA Experiment 20000171 PARAMETER Experiment Name: At_42deg_Heat_P Parameter: Tissue Value: Aerial
  misc_feature: MA Experiment ID: 20000173 Result: Up-regulated in Transcription
  misc_feature: MA Experiment 20000173 PARAMETER Experiment Name: At_42deg_Heat_P Parameter: Age (day) Value: 14
  misc_feature: MA Experiment 20000173 PARAMETER Experiment Name: At_42deg_Heat_P Parameter: Organism Value: A. thaliana
  misc_feature: MA Experiment 20000173 PARAMETER Experiment Name: At_42deg_Heat_P Parameter: Plant Line Value: WS
  misc_feature: MA Experiment 20000173 PARAMETER Experiment Name: At_42deg_Heat_P Parameter: Temperature (deg C) Value: 42 vs. 22
  misc_feature: MA Experiment 20000173 PARAMETER Experiment Name: At_42deg_Heat_P Parameter: Timepoint (hr) Value: 6
  misc_feature: MA Experiment 20000173 PARAMETER Experiment Name: At_42deg_Heat_P Parameter: Tissue Value: Aerial
  misc_feature: MA Experiment ID: 20000179 Result: Down-regulated in Transcription
  misc_feature: MA Experiment 20000179 PARAMETER Experiment Name: At_Germinating_Seeds_P Parameter: Age (hr) Value: 6 vs. 0
  misc_feature: MA Experiment 20000179 PARAMETER Experiment Name: At_Germinating_Seeds_P Parameter: Tissue Value: Germinating Seeds
  misc_feature: MA Experiment ID: 20000182 Result: Up-regulated in Transcription
  misc_feature: MA Experiment 20000182 PARAMETER Experiment Name: At_2mM_SA_P Parameter: Age (day) Value: 14
  misc_feature: MA Experiment 20000182 PARAMETER Experiment Name: At_2mM_SA_P Parameter: Organism Value: A. thaliana
  misc_feature: MA Experiment 20000182 PARAMETER Experiment Name: At_2mM_SA_P Parameter: Plant Line Value: WS
  misc_feature: MA Experiment 20000182 PARAMETER Experiment Name: At_2mM_SA_P Parameter: Timepoint (hr) Value: 6
  misc_feature: MA Experiment 20000182 PARAMETER Experiment Name: At_2mM_SA_P Parameter: Tissue Value: Aerial
  misc_feature: MA Experiment 20000182 PARAMETER Experiment Name: At_2mM_SA_P Parameter: Treatment Value: 2mM SA vs. No Treatment
  misc_feature: MA Experiment ID: 20000437 Result: Up-regulated in Transcription
  misc_feature: MA Experiment 20000437 PARAMETER Experiment Name: At_Drought_P Parameter: Age (day) Value: 8
  misc_feature: MA Experiment 20000437 PARAMETER Experiment Name: At_Drought_P Parameter: Organism Value: A. thaliana
  misc_feature: MA Experiment 20000437 PARAMETER Experiment Name: At_Drought_P Parameter: Plant Line Value: WS
  misc_feature: MA Experiment 20000437 PARAMETER Experiment Name: At_Drought_P Parameter: Timepoint (hr) Value: 24
  misc_feature: MA Experiment 20000437 PARAMETER Experiment Name: At_Drought_P Parameter: Tissue Value: Whole Plant
  misc_feature: MA Experiment 20000437 PARAMETER Experiment Name: At_Drought_P Parameter: Treatment Value: Drought vs. No Drought
  misc_feature: MA Experiment ID: 20000794 Result: Up-regulated in Transcription
  misc_feature: MA Experiment 20000794 PARAMETER Experiment Name: At_Petals_P Parameter: Age (day) Value: 23-25 days
  misc_feature: MA Experiment 20000794 PARAMETER Experiment Name: At_Petals_P Parameter: Plant Line Value: WS
  misc_feature: MA Experiment 20000794 PARAMETER Experiment Name: At_Petals_P Parameter: Tissue Value: Petals vs. Whole plant
  misc_feature: MA Experiment ID: 20001905 Result: Up-regulated in Transcription
  misc_feature: MA Experiment 20001905 PARAMETER Experiment Name: At_Drought_Reproduction_P Parameter: Age (day) Value: 40
  misc_feature: MA Experiment 20001905 PARAMETER Experiment Name: At_Drought_Reproduction_P Parameter: Organism Value: A. thaliana
  misc_feature: MA Experiment 20001905 PARAMETER Experiment Name: At_Drought_Reproduction_P Parameter: Plant Line Value: WS
  misc_feature: MA Experiment 20001905 PARAMETER Experiment Name: At_Drought_Reproduction_P Parameter: Timepoint (day) Value: 10
  misc_feature: MA Experiment 20001905 PARAMETER Experiment Name: At_Drought_Reproduction_P Parameter: Tissue Value: Rosettes
  misc_feature: MA Experiment 20001905 PARAMETER Experiment Name: At_Drought_Reproduction_P Parameter: Treatment Value: Drought vs. No Drought
  misc_feature: MA Experiment ID: 20001911 Result: Up-regulated in Transcription
  misc_feature: MA Experiment 20001911 PARAMETER Experiment Name: At_Drought_Reproduction_P Parameter: Age (day) Value: 40
  misc_feature: MA Experiment 20001911 PARAMETER Experiment Name: At_Drought_Reproduction_P Parameter: Organism Value: A. thaliana
  misc_feature: MA Experiment 20001911 PARAMETER Experiment Name: At_Drought_Reproduction_P Parameter: Plant Line Value: WS
  misc_feature: MA Experiment 20001911 PARAMETER Experiment Name: At_Drought_Reproduction_P Parameter: Timepoint (day) Value: 10
  misc_feature: MA Experiment 20001911 PARAMETER Experiment Name: At_Drought_Reproduction_P Parameter: Tissue Value: Flowers
  misc_feature: MA Experiment 20001911 PARAMETER Experiment Name: At_Drought_Reproduction_P Parameter: Treatment Value: Drought vs. No Drought
atcgagaaacctcgaaatcaaaaagcacgtcggtgacttgtactcttcaatctcttcttcctctctttcacatctccttctctcgaacccatcgacctgcgctaattcatcatcgaccttgctcaaattcatcaaccatgtcttacgattatctcttcaagtacataatcatcggagacacaggtgtgggaaaatcgtgtctgcttctgcaatttactgataagaggttccaaccagtccacgatctcaccattggtgttgagttcggtgctcggatggtcaccgtcgatggacgccccatcaaactccaaatttgggacaccgctggacaagaatcttttagatccatcaccagatcatactacagaggagcagccggagctttactggtttatgacatcaccaggagagagacgtttaaccatctggcaagctggttggaggatgctcggcaacatgcaaatcctaacatgagtattatgctgattgggaacaaatgtgatcttgctcacaagagagctgttagcaaagaggaaggtcaacagtttgccaaagaacatggcctgctattcttagaagcatctgcaagaactgctcaaaacgttgaggaggccttcatagagactgctgccaagatcctccagaacattcaggatggtgtctttgatgtatccaacgagtcatcaggtatcaagattggttacgggcgtactcaaggtgcagctggaggaagagatggtacgatctctcagggaggtggctgttgtggttaaaaaatcctcgagagaggtgtcacatatctgctgtaatctggtgattcagaaactactattgcttctatttacctctgcaaatggatacaccagaatgtatagtttctctttctttctttctttttttctctttttcccagattgtcttttatcaaaaaaccaaacgggtgcatttaagagtgaacaggctgatctttataaaccaaacaggcgttggcttattt

SEQ ID NO: 30396 - protein, 256 aa, Arabidopsis thaliana
  peptide (1)..(256): Ceres Seq. ID no. 12336035
  misc_feature (53)..(214): Pfam Name: Ras family Pfam Description: Ras family
  misc_feature (46)..(253): Homolog of NCBI NO: 7438379 NR Description: GTP-binding protein RAB2A - Arabidopsis thaliana
  misc_feature (46)..(255): Homolog of NCBI NO: 1370176 NR Description: RAB2A [Lotus japonicus]
  misc_feature (46)..(255): Homolog of NCBI NO: 16755592 NR Description: small GTPase Rab2 [Nicotiana tabacum]
  misc_feature (46)..(256): Homolog of NCBI NO: 15235981 NR Description: GTP-binding protein (At-RAB2); protein id:
  misc_feature (46)..(256): Homolog of NCBI NO: 6624302 NR Description: small GTP-binding protein [Carica papaya]
  misc_feature (46)..(256): Homolog of NCBI NO: 15233367 NR Description: Rab2-like GTP-binding protein, putative
RETSKSKSTSVTCTLQSLLPLFHISFSRTHRPALIHHRPCSNSSTMSYDYLFKYIIIGDTGVGKSCLLLQFTDKRFQPVHDLTIGVEFGARMVTVDGRPIKLQIWDTAGQESFRSITRSYYRGAAGALLVYDITRRETFNHLASWLEDARQHANPNMSIMLIGNKCDLAHKRAVSKEEGQQFAKEHGLLFLEASARTAQNVEEAFIETAAKILQNIQDGVFDVSNESSGIKIGYGRTQGAAGGRDGTISQGGGCCG

SEQ ID NO: 30397 - protein, 211 aa, Arabidopsis thaliana
  peptide (1)..(211): Ceres Seq. ID no. 12336036
  misc_feature (8)..(169): Pfam Name: Ras family Pfam Description: Ras family
  misc_feature (1)..(208): Homolog of NCBI NO: 7438379 NR Description: GTP-binding protein RAB2A - Arabidopsis thaliana
  misc_feature (1)..(210): Homolog of NCBI NO: 1370176 NR Description: RAB2A [Lotus japonicus]
  misc_feature (1)..(210): Homolog of NCBI NO: 16755592 NR Description: small GTPase Rab2 [Nicotiana tabacum]
  misc_feature (1)..(211): Homolog of NCBI NO: 15235981 NR Description: GTP-binding protein (At-RAB2); protein id:
  misc_feature (1)..(211): Homolog of NCBI NO: 6624302 NR Description: small GTP-binding protein [Carica papaya]
  misc_feature (1)..(211): Homolog of NCBI NO: 15233367 NR Description: Rab2-like GTP-binding protein, putative
MSYDYLFKYIIIGDTGVGKSCLLLQFTDKRFQPVHDLTIGVEFGARMVTVDGRPIKLQIWDTAGQESFRSITRSYYRGAAGALLVYDITRRETFNHLASWLEDARQHANPNMSIMLIGNKCDLAHKRAVSKEEGQQFAKEHGLLFLEASARTAQNVEEAFIETAAKILQNIQDGVFDVSNESSGIKIGYGRTQGAAGGRDGTISQGGGCCG

SEQ ID NO: 30398 - protein, 165 aa, Arabidopsis thaliana
  peptide (1)..(165): Ceres Seq. ID no. 12336037
  misc_feature (1)..(123): Pfam Name: Ras family Pfam Description: Ras family
  misc_feature (1)..(162): Homolog of NCBI NO: 7438379 NR Description: GTP-binding protein RAB2A - Arabidopsis thaliana
  misc_feature (1)..(164): Homolog of NCBI NO: 1370176 NR Description: RAB2A [Lotus japonicus]
  misc_feature (1)..(164): Homolog of NCBI NO: 16755592 NR Description: small GTPase Rab2 [Nicotiana tabacum]
  misc_feature (1)..(165): Homolog of NCBI NO: 15235981 NR Description: GTP-binding protein (At-RAB2); protein id:
  misc_feature (1)..(165): Homolog of NCBI NO: 6624302 NR Description: small GTP-binding protein [Carica papaya]
  misc_feature (1)..(165): Homolog of NCBI NO: 15233367 NR Description: Rab2-like GTP-binding protein, putative
MVTVDGRPIKLQIWDTAGQESFRSITRSYYRGAAGALLVYDITRRETFNHLASWLEDARQHANPNMSIMLIGNKCDLAHKRAVSKEEGQQFAKEHGLLFLEASARTAQNVEEAFIETAAKILQNIQDGVFDVSNESSGIKIGYGRTQGAAGGRDGTISQGGGCCG

SEQ ID NO: 30399 - DNA, 1718 bp, Arabidopsis thaliana
  misc_feature (1)..(1718): Ceres Seq. ID no. 12324349
  misc_feature: MA Experiment ID: 108462 Result: Up-regulated in Transcription
  misc_feature: MA Experiment 108462 PARAMETER Experiment Name: At_Germinating_Seeds_cDNA_P Parameter: Age (day) Value: 2 vs. 0
  misc_feature: MA Experiment 108462 PARAMETER Experiment Name: At_Germinating_Seeds_cDNA_P Parameter: Tissue Value: Germinating Seeds
  misc_feature: MA Experiment ID: 108464 Result: Up-regulated in Transcription
  misc_feature: MA Experiment 108464 PARAMETER Experiment Name: At_Germinating_Seeds_cDNA_P Parameter: Age (day) Value: 4 vs. 0
  misc_feature: MA Experiment 108464 PARAMETER Experiment Name: At_Germinating_Seeds_cDNA_P Parameter: Tissue Value: Germinating Seeds
  misc_feature: MA Experiment ID: 108569 Result: Up-regulated in Transcription
  misc_feature: MA Experiment 108569 PARAMETER Experiment Name: At_0.001%_MeJA__cDNA_P Parameter: Timepoint (hr) Value: 6
  misc_feature: MA Experiment 108569 PARAMETER Experiment Name: At_0.001%_MeJA__cDNA_P Parameter: Tissue Value: Aerial
  misc_feature: MA Experiment 108569 PARAMETER Experiment Name: At_0.001%_MeJA__cDNA_P Parameter: Treatment Value: 0.001% MeJA vs. No Treatment
  misc_feature: MA Experiment ID: 108573 Result: Up-regulated in Transcription
  misc_feature: MA Experiment 108573 PARAMETER Experiment Name: At_Drought_cDNA_P Parameter: Timepoint (hr) Value: 6
  misc_feature: MA Experiment 108573 PARAMETER Experiment Name: At_Drought_cDNA_P Parameter: Tissue Value: Aerial
  misc_feature: MA Experiment 108573 PARAMETER Experiment Name: At_Drought_cDNA_P Parameter: Treatment Value: Drought vs. No Drought
  misc_feature: MA Experiment ID: 20000089 Result: Down-regulated in Transcription
attcttattattattattcatcagaccaacaacaaaaaggagataaagagaagaggattcatcatcatcaatcaatccttcattttatggatctactcatatcttgattcttccttctatctctcccttttcttccatctctttttctctgggtttccccggattgagttttttaatctctgattgacagatttgaagagcgtgacaaaggaagaatcttttattaaaacaaattcttctgttttaatcttgggatggcctcggtgggcatagagcctagtgccgcggttagagaatctactggaaacgttactgatgctgatagattacccgaggagatgaaggacatgaaaattcaagatgataaagaaatggaagctacgattgttaatggcaatgtgactgagactggccatataatagtaactactataggaggaagaaatggccagccaaaacagacaatcagttacatggcggagcgagttgttggacatggctcctttggtgttgtgtttcaggccaaatgtttagaaacaggagaaactgttgctataaagaaagttctacaagatcggaggtacaagaatcgtgagcttcaaacaatgaggctacttgaccatccaaatgttgtgtctttgaaacattgtttcttctctacaaccgaaaaagatgagctttatctcaacttggttctggaatacgttccggaaactgtgcaccgcgtcatcaaacactacaacaaacttaaccaacgaatgcctctcgtttacgtcaaactttacacttatcagatttttaggtccttatcctacattcaccgatgtatcggcgtatgtcatcgagacatcaaacctcaaaacttgttggtaaatccacacactcatcaagtgaaactatgcgattttggaagtgcgaaagtattggttaaaggagagccaaacatttcatacatttgctcgaggtattacagagcacctgagctcatttttggagccaccgagtatactacagccattgatgtctggtctgcaggatgtgttctcgccgagcttcttctcgggcagccattgttcccgggtgagagcggtgttgatcaacttgtagagattataaaggttttgggaacaccaacaagggaagaaatcaaatgcatgaacccgaattacacagagttcaaatttcctcagattaaagctcatccatggcataagattttccacaagagaatgcctccagaagctgttgatttggtctcaaggcttcttcaatactctcccaatctccgttgtgctgctcttgattcattggtccacccattctttgacgagctaagagatccgaatgcgcgattacccaacggacgtttccttccaccgctctttaactttaagcctcatgaacttaaaggtgtgcctgtggagatggtggcgaagttagttccagaacatgcgaggaagcaatgtccgtggctcagtttgtgatttgttctcacctgcaaacacgaaaactagagcaaagcagtcgagatattcatctcttctcttctctctccttctctgtattaatattattataatgatcatatctcaatctgatgatttagtaaccctttgtttgttgtatgagtagagaaagagtgaatcatttgtgggggttatgatattgtataagccaacaaagattattttttaaagagagtttggtgttttctgtct

SEQ ID NO: 30400 - protein, 409 aa, Arabidopsis thaliana
  peptide (1)..(409): Ceres Seq. ID no. 12324350
  misc_feature (73)..(357): Pfam Name: Protein kinase domain Pfam Description: Protein kinase domain
  misc_feature (1)..(404): Homolog of NCBI NO: 481018 NR Description: protein kinase MSK-3 (EC 2.7.1.-) [similarity] -
  misc_feature (1)..(409): Homolog of NCBI NO: 11133532 NR Description: Shaggy-related protein kinase NtK-1
  misc_feature (1)..(409): Homolog of NCBI NO: 1709127 NR Description: Glycogen synthase kinase-3 homolog MsK-1
  misc_feature (1)..(78): Homolog of NCBI NO: 7434274 NR Description: hypothetical protein A_IG002P16.21 - Arabidopsis
  misc_feature (69)..(409): Homolog of NCBI NO: 7434274 NR Description: hypothetical protein A_IG002P16.21 - Arabidopsis
  misc_feature (1)..(409): Homolog of NCBI NO: 2398519 NR Description: shaggy-like kinase alpha [Arabidopsis thaliana]
  misc_feature (1)..(409): Homolog of NCBI NO: 541901 NR Description: protein kinase ASK-alpha (EC 2.7.1.-)
  misc_feature (1)..(409): Homolog of NCBI NO: 18421039 NR Description: shaggy-like kinase alpha
  misc_feature (1)..(409): Homolog of NCBI NO: 21553877 NR Description: shaggy related protein kinase ASK-GAMMA
  misc_feature (1)..(409): Homolog of NCBI NO: 15230058 NR Description: shaggy related protein kinase, ASK-GAMMA
MASVGIEPSAAVRESTGNVTDADRLPEEMKDMKIQDDKEMEATIVNGNVTETGHIIVTTIGGRNGQPKQTISYMAERVVGHGSFGVVFQAKCLETGETVAIKKVLQDRRYKNRELQTMRLLDHPNVVSLKHCFFSTTEKDELYLNLVLEYVPETVHRVIKHYNKLNQRMPLVYVKLYTYQIFRSLSYIHRCIGVCHRDIKPQNLLVNPHTHQVKLCDFGSAKVLVKGEPNISYICSRYYRAPELIFGATEYTTAIDVWSAGCVLAELLLGQPLFPGESGVDQLVEIIKVLGTPTREEIKCMNPNYTEFKFPQIKAHPWHKIFHKRMPPEAVDLVSRLLQYSPNLRCAALDSLVHPFFDELRDPNARLPNGRFLPPLFNFKPHELKGVPVEMVAKLVPEHARKQCPWLSL

SEQ ID NO: 30401 - protein, 381 aa, Arabidopsis thaliana
  peptide (1)..(381): Ceres Seq. ID no. 12324351
  misc_feature (45)..(329): Pfam Name: Protein kinase domain Pfam Description: Protein kinase domain
  misc_feature (1)..(376): Homolog of NCBI NO: 481018 NR Description: protein kinase MSK-3 (EC 2.7.1.-) [similarity] -
  misc_feature (1)..(381): Homolog of NCBI NO: 11133532 NR Description: Shaggy-related protein kinase NtK-1
  misc_feature (1)..(381): Homolog of NCBI NO: 1709127 NR Description: Glycogen synthase kinase-3 homolog MsK-1
  misc_feature (1)..(50): Homolog of NCBI NO: 7434274 NR Description: hypothetical protein A_IG002P16.21 - Arabidopsis
  misc_feature (41)..(381): Homolog of NCBI NO: 7434274 NR Description: hypothetical protein A_IG002P16.21 - Arabidopsis
  misc_feature (1)..(381): Homolog of NCBI NO: 2398519 NR Description: shaggy-like kinase alpha [Arabidopsis thaliana]
  misc_feature (1)..(381): Homolog of NCBI NO: 541901 NR Description: protein kinase ASK-alpha (EC 2.7.1.-)
  misc_feature (1)..(381): Homolog of NCBI NO: 18421039 NR Description: shaggy-like kinase alpha
  misc_feature (1)..(381): Homolog of NCBI NO: 21553877 NR Description: shaggy related protein kinase ASK-GAMMA
  misc_feature (1)..(381): Homolog of NCBI NO: 15230058 NR Description: shaggy related protein kinase, ASK-GAMMA
MKDMKIQDDKEMEATIVNGNVTETGHIIVTTIGGRNGQPKQTISYMAERVVGHGSFGVVFQAKCLETGETVAIKKVLQDRRYKNRELQTMRLLDHPNVVSLKHCFFSTTEKDELYLNLVLEYVPETVHRVIKHYNKLNQRMPLVYVKLYTYQIFRSLSYIHRCIGVCHRDIKPQNLLVNPHTHQVKLCDFGSAKVLVKGEPNISYICSRYYRAPELIFGATEYTTAIDVWSAGCVLAELLLGQPLFPGESGVDQLVEIIKVLGTPTREEIKCMNPNYTEFKFPQIKAHPWHKIFHKRMPPEAVDLVSRLLQYSPNLRCAALDSLVHPFFDELRDPNARLPNGRFLPPLFNFKPHELKGVPVEMVAKLVPEHARKQCPWLSL

SEQ ID NO: 30402 - protein, 378 aa, Arabidopsis thaliana
  peptide (1)..(378): Ceres Seq. ID no. 12324352
  misc_feature (42)..(326): Pfam Name: Protein kinase domain Pfam Description: Protein kinase domain
  misc_feature (1)..(373): Homolog of NCBI NO: 481018 NR Description: protein kinase MSK-3 (EC 2.7.1.-) [similarity] -
  misc_feature (1)..(378): Homolog of NCBI NO: 11133532 NR Description: Shaggy-related protein kinase NtK-1
  misc_feature (1)..(378): Homolog of NCBI NO: 1709127 NR Description: Glycogen synthase kinase-3 homolog MsK-1
  misc_feature (1)..(47): Homolog of NCBI NO: 7434274 NR Description: hypothetical protein A_IG002P16.21 - Arabidopsis
  misc_feature (38)..(378): Homolog of NCBI NO: 7434274 NR Description: hypothetical protein A_IG002P16.21 - Arabidopsis
  misc_feature (1)..(378): Homolog of NCBI NO: 2398519 NR Description: shaggy-like kinase alpha [Arabidopsis thaliana]
  misc_feature (1)..(378): Homolog of NCBI NO: 541901 NR Description: protein kinase ASK-alpha (EC 2.7.1.-)
  misc_feature (1)..(378): Homolog of NCBI NO: 18421039 NR Description: shaggy-like kinase alpha
  misc_feature (1)..(378): Homolog of NCBI NO: 21553877 NR Description: shaggy related protein kinase ASK-GAMMA
  misc_feature (1)..(378): Homolog of NCBI NO: 15230058 NR Description: shaggy related protein kinase, ASK-GAMMA
MKIQDDKEMEATIVNGNVTETGHIIVTTIGGRNGQPKQTISYMAERVVGHGSFGVVFQAKCLETGETVAIKKVLQDRRYKNRELQTMRLLDHPNVVSLKHCFFSTTEKDELYLNLVLEYVPETVHRVIKHYNKLNQRMPLVYVKLYTYQIFRSLSYIHRCIGVCHRDIKPQNLLVNPHTHQVKLCDFGSAKVLVKGEPNISYICSRYYRAPELIFGATEYTTAIDVWSAGCVLAELLLGQPLFPGESGVDQLVEIIKVLGTPTREEIKCMNPNYTEFKFPQIKAHPWHKIFHKRMPPEAVDLVSRLLQYSPNLRCAALDSLVHPFFDELRDPNARLPNGRFLPPLFNFKPHELKGVPVEMVAKLVPEHARKQCPWLSL

SEQ ID NO: 30403 - DNA, 1511 bp, Arabidopsis thaliana
  misc_feature (1)..(1511): Ceres Seq. ID no. 12371675
  misc_feature: MA Experiment ID: 108434 Result: Down-regulated in Transcription
  misc_feature: MA Experiment 108434 PARAMETER Experiment Name: At_Root_Tips_cDNA_P Parameter: Tissue Value: Root Tips
  misc_feature: MA Experiment ID: 108488 Result: Down-regulated in Transcription
  misc_feature: MA Experiment ID: 20000265 Result: Up-regulated in Transcription
  misc_feature: MA Experiment 20000265 PARAMETER Experiment Name: At_Open_Flower_P Parameter: Age (day) Value: 21
  misc_feature: MA Experiment 20000265 PARAMETER Experiment Name: At_Open_Flower_P Parameter: Plant Line Value: WS
  misc_feature: MA Experiment 20000265 PARAMETER Experiment Name: At_Open_Flower_P Parameter: Tissue Value: Closed Flower vs. Whole Plant
  misc_feature: MA Experiment ID: 20000495 Result: Up-regulated in Transcription
  misc_feature: MA Experiment 20000495 PARAMETER Experiment Name: At_Guard_Cells_P Parameter: Harvest Date Value: 8/2/2002
  misc_feature: MA Experiment 20000495 PARAMETER Experiment Name: At_Guard_Cells_P Parameter: Organism Value: A. thaliana
  misc_feature: MA Experiment 20000495 PARAMETER Experiment Name: At_Guard_Cells_P Parameter: Tissue Value: Guard Cells vs. Leaves
  misc_feature: MA Experiment ID: 20000794 Result: Up-regulated in Transcription
  misc_feature: MA Experiment 20000794 PARAMETER Experiment Name: At_Petals_P Parameter: Age (day) Value: 23-25 days
  misc_feature: MA Experiment 20000794 PARAMETER Experiment Name: At_Petals_P Parameter: Plant Line Value: WS
  misc_feature: MA Experiment 20000794 PARAMETER Experiment Name: At_Petals_P Parameter: Tissue Value: Petals vs. Whole plant
  misc_feature: MA Experiment ID: 20001248 Result: Down-regulated in Transcription
  misc_feature: MA Experiment 20001248 PARAMETER Experiment Name: At_Far-red-induction_P Parameter: Age (day) Value: 7
  misc_feature: MA Experiment 20001248 PARAMETER Experiment Name: At_Far-red-induction_P Parameter: Light Value: Far-red vs. White
  misc_feature: MA Experiment 20001248 PARAMETER Experiment Name: At_Far-red-induction_P Parameter: Organism Value: A. thaliana
  misc_feature: MA Experiment 20001248 PARAMETER Experiment Name: At_Far-red-induction_P Parameter: Plant Line Value: Columbia
  misc_feature: MA Experiment 20001248 PARAMETER Experiment Name: At_Far-red-induction_P Parameter: Timepoint (hr) Value: 4
  misc_feature: MA Experiment 20001248 PARAMETER Experiment Name: At_Far-red-induction_P Parameter: Tissue Value: Whole Plant
  misc_feature: MA Experiment ID: 20001905 Result: Up-regulated in Transcription
  misc_feature: MA Experiment 20001905 PARAMETER Experiment Name: At_Drought_Reproduction_P Parameter: Age (day) Value: 40
  misc_feature: MA Experiment 20001905 PARAMETER Experiment Name: At_Drought_Reproduction_P Parameter: Organism Value: A. thaliana
  misc_feature: MA Experiment 20001905 PARAMETER Experiment Name: At_Drought_Reproduction_P Parameter: Plant Line Value: WS
  misc_feature: MA Experiment 20001905 PARAMETER Experiment Name: At_Drought_Reproduction_P Parameter: Timepoint (day) Value: 10
  misc_feature: MA Experiment 20001905 PARAMETER Experiment Name: At_Drought_Reproduction_P Parameter: Tissue Value: Rosettes
  misc_feature: MA Experiment 20001905 PARAMETER Experiment Name: At_Drought_Reproduction_P Parameter: Treatment Value: Drought vs. No Drought
aactttattttatttgtttcttagaatctttttcacgcaaatgcaaaccaccaacaaatctatattctagcatgatgatgaagtagctacttgcttcttcttcttcttcttcttaaattttggggtttttactttttggtgaagacagccatgtttcaaagattattactcttccttctcattgctcttctgctccaatcttctttccttttagagatttcctctgctctcaaggaaggaaaaacatgtataacaaacagcaactgtgacgctggattacactgcgaaacatgtatagccaacactgattttagacctagatgctccagaacccaacccatcaaccccatcaccaaggcaaaggggttgccttttaacaagtattcatggttaaccacacacaactcttttgctcgtttgggggaagtatcacggaccggttctgctattttggctcctactaaccagcaagattcaatcacaagccaactcaataatggtgtaagagggtttatgctcgacatgtatgacttccaaaacgatatctggctttgccattctttcgatggaacatgtttcaatttcaccgcttttcaaccggctattaacattttaagggagtttcaagtgtttctagagaagaacaaagaggaagttgtaacgattatcatcgaagattatgtgaaatcgcctaaaggtctcacaaaagtgtttgatgcggctggcttacgaaagttcatgtttccagtatctagaatgcccaaaaatggaggggactggccaaggcttgatgacatggtgcgaaaaaaccaacggttgctagtttttacatccgattcacataaagaagcaaccgaagggatcgcctatcaatggaagtatatggttgagaatcaatatggaaatggagggttgaaggtaggagtgtgtccaaatagagctcaatcagcgccaatgagcgataaatcaaaatctcttgttcttgtgaaccatttccctgatgctgcggatgtgatagtagcatgtaagcaaaactcagcttctcttcttgaatccataaagacatgttaccaagccgcgggacagcgatggcctaacttcatagcagtcgatttctacaagagaagcgatggtggaggagctccgcaagcggttgatgttgcgaatggcaatttgatatgcggttgcgataactttgcagcgtgcaaggctgacggcaaatgtggatagtaagaaagactgagccaccagaagcaactcccataaccaaaggctttctgcgtttgttgtcacctttgtgtcatcttttccataaagttttagctagtgtagtaacggttagtttttgttttagattatttagagattagtactgtactggttagtttcattactctaaatttcctaatcatatatgaactagtcaccgaataatctatatatactgaaaacactggtgactaaaaatgttaaacacaaagttatttaatagctaaaaatctaaattaggg

SEQ ID NO: 30404 - protein, 359 aa, Arabidopsis thaliana
  peptide (1)..(359): Ceres Seq. ID no. 12371676
  misc_feature (7)..(358): Homolog of NCBI NO: 38345515 NR Description: OSJNBa0039K24.18 [Oryza sativa (japonica
  misc_feature (4)..(359): Homolog of NCBI NO: 21593427 NR Description: unknown [Arabidopsis thaliana]
  misc_feature (4)..(359): Homolog of NCBI NO: 18425155 NR Description: putative protein
  misc_feature (1)..(359): Homolog of NCBI NO: 38637049 NR Description: MAP3K-like protein kinase [Oryza sativa (japonica
  misc_feature (4)..(342): Homolog of NCBI NO: 34897530 NR Description: OSJNBa0042L16.2 [Oryza sativa (japonica
  misc_feature (23)..(359): Homolog of NCBI NO: 25407778 NR Description: MAP3K-like protein kinase [imported] -
  misc_feature (4)..(358): Homolog of NCBI NO: 38345461 NR Description: OSJNBa0042L16.16 [Oryza sativa (japonica
  misc_feature (20)..(359): Homolog of NCBI NO: 27754722 NR Description: unknown protein [Arabidopsis thaliana]
  misc_feature (1)..(359): Homolog of NCBI NO: 15230348 NR Description: unknown protein; protein id: At3g19310.1
  misc_feature (1)..(359): Homolog of NCBI NO: 18402763 NR Description: expressed protein
MFQRLLLFLLIALLLQSSFLLEISSALKEGKTCITNSNCDAGLHCETCIANTDFRPRCSRTQPINPITKAKGLPFNKYSWLTTHNSFARLGEVSRTGSAILAPTNQQDSITSQLNNGVRGFMLDMYDFQNDIWLCHSFDGTCFNFTAFQPAINILREFQVFLEKNKEEVVTIIIEDYVKSPKGLTKVFDAAGLRKFMFPVSRMPKNGGDWPRLDDMVRKNQRLLVFTSDSHKEATEGIAYQWKYMVENQYGNGGLKVGVCPNRAQSAPMSDKSKSLVLVNHFPDAADVIVACKQNSASLLESIKTCYQAAGQRWPNFIAVDFYKRSDGGGAPQAVDVANGNLICGCDNFAACKADGKCG

SEQ ID NO: 30405 - protein, 238 aa, Arabidopsis thaliana
  peptide (1)..(238): Ceres Seq. ID no. 12371677
  misc_feature (1)..(237): Homolog of NCBI NO: 38345515 NR Description: OSJNBa0039K24.18 [Oryza sativa (japonica
  misc_feature (1)..(238): Homolog of NCBI NO: 21593427 NR Description: unknown [Arabidopsis thaliana]
  misc_feature (1)..(238): Homolog of NCBI NO: 18425155 NR Description: putative protein
  misc_feature (1)..(238): Homolog of NCBI NO: 38637049 NR Description: MAP3K-like protein kinase [Oryza sativa (japonica
  misc_feature (1)..(221): Homolog of NCBI NO: 34897530 NR Description: OSJNBa0042L16.2 [Oryza sativa (japonica
  misc_feature (1)..(238): Homolog of NCBI NO: 25407778 NR Description: MAP3K-like protein kinase [imported] -
  misc_feature (1)..(237): Homolog of NCBI NO: 38345461 NR Description: OSJNBa0042L16.16 [Oryza sativa (japonica
  misc_feature (1)..(238): Homolog of NCBI NO: 27754722 NR Description: unknown protein [Arabidopsis thaliana]
  misc_feature (1)..(238): Homolog of NCBI NO: 15230348 NR Description: unknown protein; protein id: At3g19310.1
  misc_feature (1)..(238): Homolog of NCBI NO: 18402763 NR Description: expressed protein
MLDMYDFQNDIWLCHSFDGTCFNFTAFQPAINILREFQVFLEKNKEEVVTIIIEDYVKSPKGLTKVFDAAGLRKFMFPVSRMPKNGGDWPRLDDMVRKNQRLLVFTSDSHKEATEGIAYQWKYMVENQYGNGGLKVGVCPNRAQSAPMSDKSKSLVLVNHFPDAADVIVACKQNSASLLESIKTCYQAAGQRWPNFIAVDFYKRSDGGGAPQAVDVANGNLICGCDNFAACKADGKCG

SEQ ID NO: 30406 - protein, 235 aa, Arabidopsis thaliana
  peptide (1)..(235): Ceres Seq. ID no. 12371678
  misc_feature (1)..(234): Homolog of NCBI NO: 38345515 NR Description: OSJNBa0039K24.18 [Oryza sativa (japonica
  misc_feature (1)..(235): Homolog of NCBI NO: 21593427 NR Description: unknown [Arabidopsis thaliana]
  misc_feature (1)..(235): Homolog of NCBI NO: 18425155 NR Description: putative protein
  misc_feature (1)..(235): Homolog of NCBI NO: 38637049 NR Description: MAP3K-like protein kinase [Oryza sativa (japonica
  misc_feature (1)..(218): Homolog of NCBI NO: 34897530 NR Description: OSJNBa0042L16.2 [Oryza sativa (japonica
  misc_feature (1)..(235): Homolog of NCBI NO: 25407778 NR Description: MAP3K-like protein kinase [imported] -
  misc_feature (1)..(234): Homolog of NCBI NO: 38345461 NR Description: OSJNBa0042L16.16 [Oryza sativa (japonica
  misc_feature (1)..(235): Homolog of NCBI NO: 27754722 NR Description: unknown protein [Arabidopsis thaliana]
  misc_feature (1)..(235): Homolog of NCBI NO: 15230348 NR Description: unknown protein; protein id: At3g19310.1
  misc_feature (1)..(235): Homolog of NCBI NO: 18402763 NR Description: expressed protein
MYDFQNDIWLCHSFDGTCFNFTAFQPAINILREFQVFLEKNKEEVVTIIIEDYVKSPKGLTKVFDAAGLRKFMFPVSRMPKNGGDWPRLDDMVRKNQRLLVFTSDSHKEATEGIAYQWKYMVENQYGNGGLKVGVCPNRAQSAPMSDKSKSLVLVNHFPDAADVIVACKQNSASLLESIKTCYQAAGQRWPNFIAVDFYKRSDGGGAPQAVDVANGNLICGCDNFAACKADGKCG

SEQ ID NO: 30407 - DNA, 1070 bp, Arabidopsis thaliana
  misc_feature (1)..(1070): Ceres Seq. ID no. 12327436
  misc_feature: MA Experiment ID: 108434 Result: Up-regulated in Transcription
  misc_feature: MA Experiment 108434 PARAMETER Experiment Name: At_Root_Tips_cDNA_P Parameter: Tissue Value: Root Tips
  misc_feature: MA Experiment ID: 108461 Result: Up-regulated in Transcription
  misc_feature: MA Experiment 108461 PARAMETER Experiment Name: At_Germinating_Seeds_cDNA_P Parameter: Age (day) Value: 1 vs. 0
  misc_feature: MA Experiment 108461 PARAMETER Experiment Name: At_Germinating_Seeds_cDNA_P Parameter: Tissue Value: Germinating Seeds
  misc_feature: MA Experiment ID: 108462 Result: Up-regulated in Transcription
  misc_feature: MA Experiment 108462 PARAMETER Experiment Name: At_Germinating_Seeds_cDNA_P Parameter: Age (day) Value: 2 vs. 0
  misc_feature: MA Experiment 108462 PARAMETER Experiment Name: At_Germinating_Seeds_cDNA_P Parameter: Tissue Value: Germinating Seeds
  misc_feature: MA Experiment ID: 108473 Result: Down-regulated in Transcription
  misc_feature: MA Experiment 108473 PARAMETER Experiment Name: At_Drought_Flowers_cDNA_P Parameter: Timepoint (hr) Value: 7 d
  misc_feature: MA Experiment 108473 PARAMETER Experiment Name: At_Drought_Flowers_cDNA_P Parameter: Tissue Value: Flower
  misc_feature: MA Experiment 108473 PARAMETER Experiment Name: At_Drought_Flowers_cDNA_P Parameter: Treatment Value: Drought vs. No Drought
  misc_feature: MA Experiment ID: 108572 Result: Down-regulated in Transcription
  misc_feature: MA Experiment 108572 PARAMETER Experiment Name: At_Drought_cDNA_P Parameter: Timepoint (hr) Value: 1
  misc_feature: MA Experiment 108572 PARAMETER Experiment Name: At_Drought_cDNA_P Parameter: Tissue Value: Aerial
  misc_feature: MA Experiment 108572 PARAMETER Experiment Name: At_Drought_cDNA_P Parameter: Treatment Value: Drought vs. No Drought
  misc_feature: MA Experiment ID: 108573 Result: Down-regulated in Transcription
  misc_feature: MA Experiment 108573 PARAMETER Experiment Name: At_Drought_cDNA_P Parameter: Timepoint (hr) Value: 6
  misc_feature: MA Experiment 108573 PARAMETER Experiment Name: At_Drought_cDNA_P Parameter: Tissue Value: Aerial
  misc_feature: MA Experiment 108573 PARAMETER Experiment Name: At_Drought_cDNA_P Parameter: Treatment Value: Drought vs. No Drought
  misc_feature: MA Experiment ID: 108585 Result: Down-regulated in Transcription
  misc_feature: MA Experiment 108585 PARAMETER Experiment Name: At_5mM_NaNP_cDNA_P Parameter: Timepoint (hr) Value: 6
  misc_feature: MA Experiment 108585 PARAMETER Experiment Name: At_5mM_NaNP_cDNA_P Parameter: Tissue Value: Aerial
  misc_feature: MA Experiment 108585 PARAMETER Experiment Name: At_5mM_NaNP_cDNA_P Parameter: Treatment Value: null
  misc_feature: MA Experiment ID: 20000111 Result: Down-regulated in Transcription
  misc_feature: MA Experiment 20000111 PARAMETER Experiment Name: At_42deg_Heat_cDNA_P Parameter: Temperature (deg C) Value: 42 vs. 22
  misc_feature: MA Experiment 20000111 PARAMETER Experiment Name: At_42deg_Heat_cDNA_P Parameter: Timepoint (hr) Value: 6
  misc_feature: MA Experiment 20000111 PARAMETER Experiment Name: At_42deg_Heat_cDNA_P Parameter: Tissue Value: Aerial
  misc_feature: MA Experiment ID: 20000113 Result: Down-regulated in Transcription
  misc_feature: MA Experiment 20000113 PARAMETER Experiment Name: At_42deg_Heat_cDNA_P Parameter: Temperature (deg C) Value: 42 vs. 22
  misc_feature: MA Experiment 20000113 PARAMETER Experiment Name: At_42deg_Heat_cDNA_P Parameter: Timepoint (hr) Value: 8
  misc_feature: MA Experiment 20000113 PARAMETER Experiment Name: At_42deg_Heat_cDNA_P Parameter: Tissue Value: Aerial
  misc_feature: MA Experiment ID: 20000173 Result: Down-regulated in Transcription
  misc_feature: MA Experiment 20000173 PARAMETER Experiment Name: At_42deg_Heat_P Parameter: Age (day) Value: 14
  misc_feature: MA Experiment 20000173 PARAMETER Experiment Name: At_42deg_Heat_P Parameter: Organism Value: A. thaliana
  misc_feature: MA Experiment 20000173 PARAMETER Experiment Name: At_42deg_Heat_P Parameter: Plant Line Value: WS
  misc_feature: MA Experiment 20000173 PARAMETER Experiment Name: At_42deg_Heat_P Parameter: Temperature (deg C) Value: 42 vs. 22
  misc_feature: MA Experiment 20000173 PARAMETER Experiment Name: At_42deg_Heat_P Parameter: Timepoint (hr) Value: 6
  misc_feature: MA Experiment 20000173 PARAMETER Experiment Name: At_42deg_Heat_P Parameter: Tissue Value: Aerial
  misc_feature: MA Experiment ID: 20000179 Result: Up-regulated in Transcription
  misc_feature: MA Experiment 20000179 PARAMETER Experiment Name: At_Germinating_Seeds_P Parameter: Age (hr) Value: 6 vs. 0
  misc_feature: MA Experiment 20000179 PARAMETER Experiment Name: At_Germinating_Seeds_P Parameter: Tissue Value: Germinating Seeds
  misc_feature: MA Experiment ID: 20000180 Result: Up-regulated in Transcription
  misc_feature: MA Experiment 20000180 PARAMETER Experiment Name: At_Germinating_Seeds_P Parameter: Age (hr) Value: 24 vs. 0
  misc_feature: MA Experiment 20000180 PARAMETER Experiment Name: At_Germinating_Seeds_P Parameter: Tissue Value: Germinating Seeds
  misc_feature: MA Experiment ID: 20000182 Result: Down-regulated in Transcription
  misc_feature: MA Experiment 20000182 PARAMETER Experiment Name: At_2mM_SA_P Parameter: Age (day) Value: 14
  misc_feature: MA Experiment 20000182 PARAMETER Experiment Name: At_2mM_SA_P Parameter: Organism Value: A. thaliana
  misc_feature: MA Experiment 20000182 PARAMETER Experiment Name: At_2mM_SA_P Parameter: Plant Line Value: WS
  misc_feature: MA Experiment 20000182 PARAMETER Experiment Name: At_2mM_SA_P Parameter: Timepoint (hr) Value: 6
  misc_feature: MA Experiment 20000182 PARAMETER Experiment Name: At_2mM_SA_P Parameter: Tissue Value: Aerial
  misc_feature: MA Experiment 20000182 PARAMETER Experiment Name: At_2mM_SA_P Parameter: Treatment Value: 2mM SA vs. No Treatment
  misc_feature: MA Experiment ID: 20000185 Result: Down-regulated in Transcription
  misc_feature: MA Experiment 20000185 PARAMETER Experiment Name: At_Roots__P Parameter: Age (day) Value: 7 vs. 21
  misc_feature: MA Experiment 20000185 PARAMETER Experiment Name: At_Roots__P Parameter: Organism Value: A. thaliana
  misc_feature: MA Experiment 20000185 PARAMETER Experiment Name: At_Roots__P Parameter: Tissue Value: Roots vs. Whole Plant
  misc_feature: MA Experiment ID: 20000214 Result: Down-regulated in Transcription
  misc_feature: MA Experiment 20000214 PARAMETER Experiment Name: At_4deg_Cold_P Parameter: Timepoint (hr) Value: 6
  misc_feature: MA Experiment ID: 20000224 Result: Down-regulated in Transcription
  misc_feature: MA Experiment ID: 20000234 Result: Up-regulated in Transcription
  misc_feature: MA Experiment 20000234 PARAMETER Experiment Name: At_Siliques_P Parameter: Age (day) Value: 21
  misc_feature: MA Experiment 20000234 PARAMETER Experiment Name: At_Siliques_P Parameter: Organism Value: A. thaliana
  misc_feature: MA Experiment 20000234 PARAMETER Experiment Name: At_Siliques_P Parameter: Plant Line Value: WS
  misc_feature: MA Experiment 20000234 PARAMETER Experiment Name: At_Siliques_P Parameter: Tissue Value: Less Than 5mm Siliques vs. Whole Plant
  misc_feature: MA Experiment ID: 20000265 Result: Up-regulated in Transcription
  misc_feature: MA Experiment 20000265 PARAMETER Experiment Name: At_Open_Flower_P Parameter: Age (day) Value: 21
  misc_feature: MA Experiment 20000265 PARAMETER Experiment Name: At_Open_Flower_P Parameter: Plant Line Value: WS
  misc_feature: MA Experiment 20000265 PARAMETER Experiment Name: At_Open_Flower_P Parameter: Tissue Value: Closed Flower vs. Whole Plant
  misc_feature: MA Experiment ID: 20000268 Result: Down-regulated in Transcription
  misc_feature: MA Experiment 20000268 PARAMETER Experiment Name: At_100mM_NaCl__P Parameter: Age (day) Value: 14
  misc_feature: MA Experiment 20000268 PARAMETER Experiment Name: At_100mM_NaCl__P Parameter: Organism Value: A. thaliana
  misc_feature: MA Experiment 20000268 PARAMETER Experiment Name: At_100mM_NaCl__P Parameter: Plant Line Value: WS
  misc_feature: MA Experiment 20000268 PARAMETER Experiment Name: At_100mM_NaCl__P Parameter: Timepoint (hr) Value: 6
  misc_feature: MA Experiment 20000268 PARAMETER Experiment Name: At_100mM_NaCl__P Parameter: Tissue Value: Whole Plant
  misc_feature: MA Experiment 20000268 PARAMETER Experiment Name: At_100mM_NaCl__P Parameter: Treatment Value: 100mM NaCl vs. No Treatment
  misc_feature: MA Experiment ID: 20000436 Result: Down-regulated in Transcription
  misc_feature: MA Experiment 20000436 PARAMETER Experiment Name: At_Drought_P Parameter: Age (day) Value: 7
  misc_feature: MA Experiment 20000436 PARAMETER Experiment Name: At_Drought_P Parameter: Organism Value: A. thaliana
  misc_feature: MA Experiment 20000436 PARAMETER Experiment Name: At_Drought_P Parameter: Plant Line Value: WS
  misc_feature: MA Experiment 20000436 PARAMETER Experiment Name: At_Drought_P Parameter: Timepoint (hr) Value: 12
  misc_feature: MA Experiment 20000436 PARAMETER Experiment Name: At_Drought_P Parameter: Tissue Value: Whole Plant
  misc_feature: MA Experiment 20000436 PARAMETER Experiment Name: At_Drought_P Parameter: Treatment Value: Drought vs. No Drought
  misc_feature: MA Experiment ID: 20000437 Result: Down-regulated in Transcription
  misc_feature: MA Experiment 20000437 PARAMETER Experiment Name: At_Drought_P Parameter: Age (day) Value: 8
  misc_feature: MA Experiment 20000437 PARAMETER Experiment Name: At_Drought_P Parameter: Organism Value: A. thaliana
  misc_feature: MA Experiment 20000437 PARAMETER Experiment Name: At_Drought_P Parameter: Plant Line Value: WS
  misc_feature: MA Experiment 20000437 PARAMETER Experiment Name: At_Drought_P Parameter: Timepoint (hr) Value: 24
  misc_feature: MA Experiment 20000437 PARAMETER Experiment Name: At_Drought_P Parameter: Tissue Value: Whole Plant
  misc_feature: MA Experiment 20000437 PARAMETER Experiment Name: At_Drought_P Parameter: Treatment Value: Drought vs. No Drought
  misc_feature: MA Experiment ID: 20000438 Result: Down-regulated in Transcription
  misc_feature: MA Experiment 20000438 PARAMETER Experiment Name: At_Shoots__P Parameter: Age (day) Value: 14
  misc_feature: MA Experiment 20000438 PARAMETER Experiment Name: At_Shoots__P Parameter: Tissue Value: Shoots vs. Whole Plant
  misc_feature: MA Experiment ID: 20000439 Result: Down-regulated in Transcription
  misc_feature: MA Experiment 20000439 PARAMETER Experiment Name: At_Roots__P Parameter: Age (day) Value: 14 vs. 21
  misc_feature: MA Experiment 20000439 PARAMETER Experiment Name: At_Roots__P Parameter: Organism Value: A. thaliana
  misc_feature: MA Experiment 20000439 PARAMETER Experiment Name: At_Roots__P Parameter: Tissue Value: Roots vs. Whole Plant
  misc_feature: MA Experiment ID: 20000495 Result: Up-regulated in Transcription
  misc_feature: MA Experiment 20000495 PARAMETER Experiment Name: At_Guard_Cells_P Parameter: Harvest Date Value: 8/2/2002
  misc_feature: MA Experiment 20000495 PARAMETER Experiment Name: At_Guard_Cells_P Parameter: Organism Value: A. thaliana
  misc_feature: MA Experiment 20000495 PARAMETER Experiment Name: At_Guard_Cells_P Parameter: Tissue Value: Guard Cells vs. Leaves
  misc_feature: MA Experiment ID: 20000496 Result: Up-regulated in Transcription
  misc_feature: MA Experiment 20000496 PARAMETER Experiment Name: At_Guard_Cells_P Parameter: Harvest Date Value: 7/19/2002
  misc_feature: MA Experiment 20000496 PARAMETER Experiment Name: At_Guard_Cells_P Parameter: Organism Value: Canola
  misc_feature: MA Experiment 20000496 PARAMETER Experiment Name: At_Guard_Cells_P Parameter: Tissue Value: Guard Cells vs. Leaves
  misc_feature: MA Experiment ID: 20000606 Result: Up-regulated in Transcription
  misc_feature: MA Experiment 20000606 PARAMETER Experiment Name: At_CS8548_Mutant_P Parameter: Age (day) Value: 14
  misc_feature: MA Experiment 20000606 PARAMETER Experiment Name: At_CS8548_Mutant_P Parameter: Plant Line Value: CS8548 vs. wt
  misc_feature: MA Experiment 20000606 PARAMETER Experiment Name: At_CS8548_Mutant_P Parameter: Tissue Value: Whole Plant
  misc_feature: MA Experiment ID: 20000794 Result: Down-regulated in Transcription
  misc_feature: MA Experiment 20000794 PARAMETER Experiment Name: At_Petals_P Parameter: Age (day) Value: 23-25 days
  misc_feature: MA Experiment 20000794 PARAMETER Experiment Name: At_Petals_P Parameter: Plant Line Value: WS
  misc_feature: MA Experiment 20000794 PARAMETER Experiment Name: At_Petals_P Parameter: Tissue Value: Petals vs. Whole plant
  misc_feature: MA Experiment ID: 20001451 Result: Down-regulated in Transcription
  misc_feature: MA Experiment 20001451 PARAMETER Experiment Name: At_Far-red-induction_P Parameter: Age (day) Value: 7
  misc_feature: MA Experiment 20001451 PARAMETER Experiment Name: At_Far-red-induction_P Parameter: Light Value: Far-red vs. White
  misc_feature: MA Experiment 20001451 PARAMETER Experiment Name: At_Far-red-induction_P Parameter: Organism Value: A. thaliana
  misc_feature: MA Experiment 20001451 PARAMETER Experiment Name: At_Far-red-induction_P Parameter: Plant Line Value: Columbia
  misc_feature: MA Experiment 20001451 PARAMETER Experiment Name: At_Far-red-induction_P Parameter: Timepoint (hr) Value: 24
  misc_feature: MA Experiment 20001451 PARAMETER Experiment Name: At_Far-red-induction_P Parameter: Tissue Value: Whole Plant
  misc_feature: MA Experiment ID: 20001554 Result: Down-regulated in Transcription
  misc_feature: MA Experiment 20001554 PARAMETER Experiment Name: At_Drought_Soil_Dry_P Parameter: Age (day) Value: 21
  misc_feature: MA Experiment 20001554 PARAMETER Experiment Name: At_Drought_Soil_Dry_P Parameter: Organism Value: A. thaliana
  misc_feature: MA Experiment 20001554 PARAMETER Experiment Name: At_Drought_Soil_Dry_P Parameter: Plant Line Value: WS
  misc_feature: MA Experiment 20001554 PARAMETER Experiment Name: At_Drought_Soil_Dry_P Parameter: Post Timepoint (hr) Value: None
  misc_feature: MA Experiment 20001554 PARAMETER Experiment Name: At_Drought_Soil_Dry_P Parameter: Post-Treatment Value: None
  misc_feature: MA Experiment 20001554 PARAMETER Experiment Name: At_Drought_Soil_Dry_P Parameter: Timepoint (day) Value: 7
  misc_feature: MA Experiment 20001554 PARAMETER Experiment Name: At_Drought_Soil_Dry_P Parameter: Treatment Value: Drought vs. No Drought
  misc_feature: MA Experiment ID: 20001555 Result: Down-regulated in Transcription
  misc_feature: MA Experiment 20001555 PARAMETER Experiment Name: At_Drought_Soil_Dry_P Parameter: Age (day) Value: 24
  misc_feature: MA Experiment 20001555 PARAMETER Experiment Name: At_Drought_Soil_Dry_P Parameter: Organism Value: A. thaliana
  misc_feature: MA Experiment 20001555 PARAMETER Experiment Name: At_Drought_Soil_Dry_P Parameter: Plant Line Value: WS
  misc_feature: MA Experiment 20001555 PARAMETER Experiment Name: At_Drought_Soil_Dry_P Parameter: Post Timepoint (hr) Value: None
  misc_feature: MA Experiment 20001555 PARAMETER Experiment Name: At_Drought_Soil_Dry_P Parameter: Post-Treatment Value: None
  misc_feature: MA Experiment 20001555 PARAMETER Experiment Name: At_Drought_Soil_Dry_P Parameter: Timepoint (day) Value: 10
  misc_feature: MA Experiment 20001555 PARAMETER Experiment Name: At_Drought_Soil_Dry_P Parameter: Treatment Value: Drought vs. No Drought
  misc_feature: MA Experiment ID: 20001556 Result: Down-regulated in Transcription
  misc_feature: MA Experiment 20001556 PARAMETER Experiment Name: At_Drought_Soil_Dry_P Parameter: Age (day) Value: 26
  misc_feature: MA Experiment 20001556 PARAMETER Experiment Name: At_Drought_Soil_Dry_P Parameter: Organism Value: A. thaliana
  misc_feature: MA Experiment 20001556 PARAMETER Experiment Name: At_Drought_Soil_Dry_P Parameter: Plant Line Value: WS
  misc_feature: MA Experiment 20001556 PARAMETER Experiment Name: At_Drought_Soil_Dry_P Parameter: Post Timepoint (hr) Value: None
  misc_feature: MA Experiment 20001556 PARAMETER Experiment Name: At_Drought_Soil_Dry_P Parameter: Post-Treatment Value: None
  misc_feature: MA Experiment 20001556 PARAMETER Experiment Name: At_Drought_Soil_Dry_P Parameter: Timepoint (day) Value: 12
  misc_feature: MA Experiment 20001556 PARAMETER Experiment Name: At_Drought_Soil_Dry_P Parameter: Treatment Value: Drought vs. No Drought
  misc_feature: MA Experiment ID: 20001557 Result: Up-regulated in Transcription
  misc_feature: MA Experiment 20001557 PARAMETER Experiment Name: At_Drought_Soil_Dry_P Parameter: Age (day) Value: 27
  misc_feature: MA Experiment 20001557 PARAMETER Experiment Name: At_Drought_Soil_Dry_P Parameter: Organism Value: A. thaliana
  misc_feature: MA Experiment 20001557 PARAMETER Experiment Name: At_Drought_Soil_Dry_P Parameter: Plant Line Value: WS
  misc_feature: MA Experiment 20001557 PARAMETER Experiment Name: At_Drought_Soil_Dry_P Parameter: Post Timepoint (hr) Value: 3
  misc_feature: MA Experiment 20001557 PARAMETER Experiment Name: At_Drought_Soil_Dry_P Parameter: Post-Treatment Value: Re-Water vs. No Drought
  misc_feature: MA Experiment 20001557 PARAMETER Experiment Name: At_Drought_Soil_Dry_P Parameter: Timepoint (day) Value: 13
  misc_feature: MA Experiment 20001557 PARAMETER Experiment Name: At_Drought_Soil_Dry_P Parameter: Treatment Value: Drought vs. No Drought
  misc_feature: MA Experiment ID: 20001558 Result: Up-regulated in Transcription
  misc_feature: MA Experiment 20001558 PARAMETER Experiment Name: At_Drought_Soil_Dry_P Parameter: Age (day) Value: 27
  misc_feature: MA Experiment 20001558 PARAMETER Experiment Name: At_Drought_Soil_Dry_P Parameter: Organism Value: A. thaliana
  misc_feature: MA Experiment 20001558 PARAMETER Experiment Name: At_Drought_Soil_Dry_P Parameter: Plant Line Value: WS
  misc_feature: MA Experiment 20001558 PARAMETER Experiment Name: At_Drought_Soil_Dry_P Parameter: Post Timepoint (hr) Value: 6
  misc_feature: MA Experiment 20001558 PARAMETER Experiment Name: At_Drought_Soil_Dry_P Parameter: Post-Treatment Value: Re-Water vs. No Drought
  misc_feature: MA Experiment 20001558 PARAMETER Experiment Name: At_Drought_Soil_Dry_P Parameter: Timepoint (day) Value: 13
  misc_feature: MA Experiment 20001558 PARAMETER Experiment Name: At_Drought_Soil_Dry_P Parameter: Treatment Value: Drought vs. No Drought
  misc_feature: MA Experiment ID: 20001560 Result: Up-regulated in Transcription
  misc_feature: MA Experiment 20001560 PARAMETER Experiment Name: At_Drought_Soil_Dry_P Parameter: Age (day) Value: 28
  misc_feature: MA Experiment 20001560 PARAMETER Experiment Name: At_Drought_Soil_Dry_P Parameter: Organism Value: A. thaliana
  misc_feature: MA Experiment 20001560 PARAMETER Experiment Name: At_Drought_Soil_Dry_P Parameter: Plant Line Value: WS
  misc_feature: MA Experiment 20001560 PARAMETER Experiment Name: At_Drought_Soil_Dry_P Parameter: Post Timepoint (hr) Value: None
  misc_feature: MA Experiment 20001560 PARAMETER Experiment Name: At_Drought_Soil_Dry_P Parameter: Post-Treatment Value: None
  misc_feature: MA Experiment 20001560 PARAMETER Experiment Name: At_Drought_Soil_Dry_P Parameter: Timepoint (day) Value: 14
  misc_feature: MA Experiment 20001560 PARAMETER Experiment Name: At_Drought_Soil_Dry_P Parameter: Treatment Value: Drought vs. No Drought
  misc_feature: MA Experiment ID: 20001904 Result: Down-regulated in Transcription
  misc_feature: MA Experiment 20001904 PARAMETER Experiment Name: At_Drought_Reproduction_P Parameter: Age (day) Value: 37
  misc_feature: MA Experiment 20001904 PARAMETER Experiment Name: At_Drought_Reproduction_P Parameter: Organism Value: A. thaliana
  misc_feature: MA Experiment 20001904 PARAMETER Experiment Name: At_Drought_Reproduction_P Parameter: Plant Line Value: WS
  misc_feature: MA Experiment 20001904 PARAMETER Experiment Name: At_Drought_Reproduction_P Parameter: Timepoint (day) Value: 7
  misc_feature: MA Experiment 20001904 PARAMETER Experiment Name: At_Drought_Reproduction_P Parameter: Tissue Value: Rosettes
  misc_feature: MA Experiment 20001904 PARAMETER Experiment Name: At_Drought_Reproduction_P Parameter: Treatment Value: Drought vs. No Drought
  misc_feature: MA Experiment ID: 20001905 Result: Down-regulated in Transcription
  misc_feature: MA Experiment 20001905 PARAMETER Experiment Name: At_Drought_Reproduction_P Parameter: Age (day) Value: 40
  misc_feature: MA Experiment 20001905 PARAMETER Experiment Name: At_Drought_Reproduction_P Parameter: Organism Value: A. thaliana
  misc_feature: MA Experiment 20001905 PARAMETER Experiment Name: At_Drought_Reproduction_P Parameter: Plant Line Value: WS
  misc_feature: MA Experiment 20001905 PARAMETER Experiment Name: At_Drought_Reproduction_P Parameter: Timepoint (day) Value: 10
  misc_feature: MA Experiment 20001905 PARAMETER Experiment Name: At_Drought_Reproduction_P Parameter: Tissue Value: Rosettes
  misc_feature: MA Experiment 20001905 PARAMETER Experiment Name: At_Drought_Reproduction_P Parameter: Treatment Value: Drought vs. No Drought
  misc_feature: MA Experiment ID: 20001906 Result: Down-regulated in Transcription
  misc_feature: MA Experiment 20001906 PARAMETER Experiment Name: At_Drought_Reproduction_P Parameter: Age (day) Value: 35
  misc_feature: MA Experiment 20001906 PARAMETER Experiment Name: At_Drought_Reproduction_P Parameter: Organism Value: A. thaliana
  misc_feature: MA Experiment 20001906 PARAMETER Experiment Name: At_Drought_Reproduction_P Parameter: Plant Line Value: WS
  misc_feature: MA Experiment 20001906 PARAMETER Experiment Name: At_Drought_Reproduction_P Parameter: Timepoint (day) Value: 5
  misc_feature: MA Experiment 20001906 PARAMETER Experiment Name: At_Drought_Reproduction_P Parameter: Tissue Value: Siliques
  misc_feature: MA Experiment 20001906 PARAMETER Experiment Name: At_Drought_Reproduction_P Parameter: Treatment Value: Drought vs. No Drought
  misc_feature: MA Experiment ID: 20001907 Result: Down-regulated in Transcription
  misc_feature: MA Experiment 20001907 PARAMETER Experiment Name: At_Drought_Reproduction_P Parameter: Age (day) Value: 37
  misc_feature: MA Experiment 20001907 PARAMETER Experiment Name: At_Drought_Reproduction_P Parameter: Organism Value: A. thaliana
  misc_feature: MA Experiment 20001907 PARAMETER Experiment Name: At_Drought_Reproduction_P Parameter: Plant Line Value: WS
  misc_feature: MA Experiment 20001907 PARAMETER Experiment Name: At_Drought_Reproduction_P Parameter: Timepoint (day) Value: 7
  misc_feature: MA Experiment 20001907 PARAMETER Experiment Name: At_Drought_Reproduction_P Parameter: Tissue Value: Siliques
  misc_feature: MA Experiment 20001907 PARAMETER Experiment Name: At_Drought_Reproduction_P Parameter: Treatment Value: Drought vs. No Drought
  misc_feature: MA Experiment ID: 20001908 Result: Down-regulated in Transcription
  misc_feature: MA Experiment 20001908 PARAMETER Experiment Name: At_Drought_Reproduction_P Parameter: Age (day) Value: 40
  misc_feature: MA Experiment 20001908 PARAMETER Experiment Name: At_Drought_Reproduction_P Parameter: Organism Value: A. thaliana
  misc_feature: MA Experiment 20001908 PARAMETER Experiment Name: At_Drought_Reproduction_P Parameter: Plant Line Value: WS
  misc_feature: MA Experiment 20001908 PARAMETER Experiment Name: At_Drought_Reproduction_P Parameter: Timepoint (day) Value: 10
  misc_feature: MA Experiment 20001908 PARAMETER Experiment Name: At_Drought_Reproduction_P Parameter: Tissue Value: Siliques
  misc_feature: MA Experiment 20001908 PARAMETER Experiment Name: At_Drought_Reproduction_P Parameter: Treatment Value: Drought vs. No Drought
  misc_feature: MA Experiment ID: 20001911 Result: Down-regulated in Transcription
  misc_feature: MA Experiment 20001911 PARAMETER Experiment Name: At_Drought_Reproduction_P Parameter: Age (day) Value: 40
  misc_feature: MA Experiment 20001911 PARAMETER Experiment Name: At_Drought_Reproduction_P Parameter: Organism Value: A. thaliana
  misc_feature: MA Experiment 20001911 PARAMETER Experiment Name: At_Drought_Reproduction_P Parameter: Plant Line Value: WS
  misc_feature: MA Experiment 20001911 PARAMETER Experiment Name: At_Drought_Reproduction_P Parameter: Timepoint (day) Value: 10
  misc_feature: MA Experiment 20001911 PARAMETER Experiment Name: At_Drought_Reproduction_P Parameter: Tissue Value: Flowers
  misc_feature: MA Experiment 20001911 PARAMETER Experiment Name: At_Drought_Reproduction_P Parameter: Treatment Value: Drought vs. No Drought
ttcattgagtcaagtgctcgagactgtagagtgaagtttgatttatttagagagataagttaaaaaaaaaatggtcggtatggatttgttcaaatgtgtaatgatgataatggtgttggttgtctcttgtggtgaagctgtttctggagctaagttcgatgagctttatcggtcaagctgggctatggatcattgtgtcaacgaaggcgaagtcacaaaactcaagcttgacaattactctggagctgggtttgaatcaagaagcaaatacttgtttggtaaagtctctatccagattaagcttgttgagggtgattcagcaggaacagtcactgctttctacatgtcttcagatggtccgaaccacaacgaattcgattttgagttcttagggaacactaccggcgagccttacatagtccagaccaatatctacgtgaacggagttggaaacagagaacaaagactcaacctttggttcgatcccaccactgagtttcacacttactcaatcctctggagtaaacgcagtgttgtattcatggtagacgaaacaccgattcgagttcagaagaatcttgaagagaaaggtatcccatttgctaaagatcaagcaatgggtgtttacagctccatttggaatgcagatgattgggctacacaaggaggtcttgttaaaactgattggagtcacgctcctttcgttgcttcttacaaagaattccaaatcgatgcatgtgagattccaacaactactgatctaagcaagtgtaatggagaccagaagttttggtgggatgaaccaactgtctctgagcttagccttcatcagaatcatcagcttatttgggttcgagctaatcatatgatttatgattattgttttgatgctactaggtttcctgttactcctcttgagtgccaacatcatcgtcatttgtagtttagagattagtcaagaataaaaatggatcaagagaacacatgtggttactctttgatgattctgttttaatgtataaataatcaatcttctattgattttggtgaagtttttaagttcggatttt

SEQ ID NO: 30408 - protein, 290 aa, Arabidopsis thaliana
  peptide (1)..(290): Ceres Seq. ID no. 12327437
  misc_feature (29)..(208): Pfam Name: Glycosyl hydrolases family 16 Pfam Description: Glycosyl hydrolases family 16
  misc_feature (28)..(290): Homolog of NCBI NO: 541939 NR Description: xyloglucan endo-1,4-beta-D-glucanase (EC 3.2.1.-)
  misc_feature (29)..(288): Homolog of NCBI NO: 950299 NR Description: xyloglucan endotransglycosylase precursor
  misc_feature (9)..(290): Homolog of NCBI NO: 15240733 NR Description: xyloglucan endotransglycosylase (EXGT-A4)
  misc_feature (14)..(284): Homolog of NCBI NO: 5070246 NR Description: xyloglucan endo-transglycosylase-like protein
  misc_feature (4)..(290): Homolog of NCBI NO: 21553878 NR Description: putative xyloglucan endotransglycosylase
  misc_feature (1)..(290): Homolog of NCBI NO: 15236265 NR Description: xyloglucan endotransglycosylase, putative
MVGMDLFKCVMMIMVLVVSCGEAVSGAKFDELYRSSWAMDHCVNEGEVTKLKLDNYSGAGFESRSKYLFGKVSIQIKLVEGDSAGTVTAFYMSSDGPNHNEFDFEFLGNTTGEPYIVQTNIYVNGVGNREQRLNLWFDPTTEFHTYSILWSKRSVVFMVDETPIRVQKNLEEKGIPFAKDQAMGVYSSIWNADDWATQGGLVKTDWSHAPFVASYKEFQIDACEIPTTTDLSKCNGDQKFWWDEPTVSELSLHQNHQLIWVRANHMIYDYCFDATRFPVTPLECQHHRHL

SEQ ID NO: 30409 - protein, 287 aa, Arabidopsis thaliana
  peptide (1)..(287): Ceres Seq. ID no. 12327438
  misc_feature (26)..(205): Pfam Name: Glycosyl hydrolases family 16 Pfam Description: Glycosyl hydrolases family 16
  misc_feature (25)..(287): Homolog of NCBI NO: 541939 NR Description: xyloglucan endo-1,4-beta-D-glucanase (EC 3.2.1.-)
  misc_feature (26)..(285): Homolog of NCBI NO: 950299 NR Description: xyloglucan endotransglycosylase precursor
  misc_feature (6)..(287): Homolog of NCBI NO: 15240733 NR Description: xyloglucan endotransglycosylase (EXGT-A4)
  misc_feature (11)..(281): Homolog of NCBI NO: 5070246 NR Description: xyloglucan endo-transglycosylase-like protein
  misc_feature (1)..(287): Homolog of NCBI NO: 21553878 NR Description: putative xyloglucan endotransglycosylase
  misc_feature (1)..(287): Homolog of NCBI NO: 15236265 NR Description: xyloglucan endotransglycosylase, putative
MDLFKCVMMIMVLVVSCGEAVSGAKFDELYRSSWAMDHCVNEGEVTKLKLDNYSGAGFESRSKYLFGKVSIQIKLVEGDSAGTVTAFYMSSDGPNHNEFDFEFLGNTTGEPYIVQTNIYVNGVGNREQRLNLWFDPTTEFHTYSILWSKRSVVFMVDETPIRVQKNLEEKGIPFAKDQAMGVYSSIWNADDWATQGGLVKTDWSHAPFVASYKEFQIDACEIPTTTDLSKCNGDQKFWWDEPTVSELSLHQNHQLIWVRANHMIYDYCFDATRFPVTPLECQHHRHL

SEQ ID NO: 30410 - protein, 280 aa, Arabidopsis thaliana
  peptide (1)..(280): Ceres Seq. ID no. 12327439
  misc_feature (19)..(198): Pfam Name: Glycosyl hydrolases family 16 Pfam Description: Glycosyl hydrolases family 16
  misc_feature (18)..(280): Homolog of NCBI NO: 541939 NR Description: xyloglucan endo-1,4-beta-D-glucanase (EC 3.2.1.-)
  misc_feature (19)..(278): Homolog of NCBI NO: 950299 NR Description: xyloglucan endotransglycosylase precursor
  misc_feature (1)..(280): Homolog of NCBI NO: 15240733 NR Description: xyloglucan endotransglycosylase (EXGT-A4)
  misc_feature (4)..(274): Homolog of NCBI NO: 5070246 NR Description: xyloglucan endo-transglycosylase-like protein
  misc_feature (1)..(280): Homolog of NCBI NO: 21553878 NR Description: putative xyloglucan endotransglycosylase
  misc_feature (1)..(280): Homolog of NCBI NO: 15236265 NR Description: xyloglucan endotransglycosylase, putative
MMIMVLVVSCGEAVSGAKFDELYRSSWAMDHCVNEGEVTKLKLDNYSGAGFESRSKYLFGKVSIQIKLVEGDSAGTVTAFYMSSDGPNHNEFDFEFLGNTTGEPYIVQTNIYVNGVGNREQRLNLWFDPTTEFHTYSILWSKRSVVFMVDETPIRVQKNLEEKGIPFAKDQAMGVYSSIWNADDWATQGGLVKTDWSHAPFVASYKEFQIDACEIPTTTDLSKCNGDQKFWWDEPTVSELSLHQNHQLIWVRANHMIYDYCFDATRFPVTPLECQHHRHL

SEQ ID NO: 30411 - DNA, 1350 bp, Arabidopsis thaliana
  misc_feature (1)..(1350): Ceres Seq. ID no. 13580471
  misc_feature: MA Experiment ID: 108434 Result: Up-regulated in Transcription
  misc_feature: MA Experiment 108434 PARAMETER Experiment Name: At_Root_Tips_cDNA_P Parameter: Tissue Value: Root Tips
  misc_feature: MA Experiment ID: 108461 Result: Up-regulated in Transcription
  misc_feature: MA Experiment 108461 PARAMETER Experiment Name: At_Germinating_Seeds_cDNA_P Parameter: Age (day) Value: 1 vs. 0
  misc_feature: MA Experiment 108461 PARAMETER Experiment Name: At_Germinating_Seeds_cDNA_P Parameter: Tissue Value: Germinating Seeds
  misc_feature: MA Experiment ID: 108462 Result: Up-regulated in Transcription
  misc_feature: MA Experiment 108462 PARAMETER Experiment Name: At_Germinating_Seeds_cDNA_P Parameter: Age (day) Value: 2 vs. 0
  misc_feature: MA Experiment 108462 PARAMETER Experiment Name: At_Germinating_Seeds_cDNA_P Parameter: Tissue Value: Germinating Seeds
  misc_feature: MA Experiment ID: 108463 Result: Up-regulated in Transcription
  misc_feature: MA Experiment 108463 PARAMETER Experiment Name: At_Germinating_Seeds_cDNA_P Parameter: Age (day) Value: 3 vs. 0
  misc_feature: MA Experiment 108463 PARAMETER Experiment Name: At_Germinating_Seeds_cDNA_P Parameter: Tissue Value: Germinating Seeds
  misc_feature: MA Experiment ID: 108595 Result: Up-regulated in Transcription
  misc_feature: MA Experiment 108595 PARAMETER Experiment Name: At_Ler-pi_Ovule_cDNA_P Parameter: Plant Line Value: null
  misc_feature: MA Experiment ID: 20000179 Result: Up-regulated in Transcription
  misc_feature: MA Experiment 20000179 PARAMETER Experiment Name: At_Germinating_Seeds_P Parameter: Age (hr) Value: 6 vs. 0
  misc_feature: MA Experiment 20000179 PARAMETER Experiment Name: At_Germinating_Seeds_P Parameter: Tissue Value: Germinating Seeds
  misc_feature: MA Experiment ID: 20000180 Result: Up-regulated in Transcription
  misc_feature: MA Experiment 20000180 PARAMETER Experiment Name: At_Germinating_Seeds_P Parameter: Age (hr) Value: 24 vs. 0
  misc_feature: MA Experiment 20000180 PARAMETER Experiment Name: At_Germinating_Seeds_P Parameter: Tissue Value: Germinating Seeds
  misc_feature: MA Experiment ID: 20000185 Result: Up-regulated in Transcription
  misc_feature: MA Experiment 20000185 PARAMETER Experiment Name: At_Roots__P Parameter: Age (day) Value: 7 vs. 21
  misc_feature: MA Experiment 20000185 PARAMETER Experiment Name: At_Roots__P Parameter: Organism Value: A. thaliana
  misc_feature: MA Experiment 20000185 PARAMETER Experiment Name: At_Roots__P Parameter: Tissue Value: Roots vs. Whole Plant
  misc_feature: MA Experiment ID: 20000227 Result: Up-regulated in Transcription
  misc_feature: MA Experiment 20000227 PARAMETER Experiment Name: At_Root-Tips-vs-Tops_P Parameter: Tissue Value: Root Tips vs. Root Tops
  misc_feature: MA Experiment ID: 20000234 Result: Up-regulated in Transcription
  misc_feature: MA Experiment 20000234 PARAMETER Experiment Name: At_Siliques_P Parameter: Age (day) Value: 21
  misc_feature: MA Experiment 20000234 PARAMETER Experiment Name: At_Siliques_P Parameter: Organism Value: A. thaliana
  misc_feature: MA Experiment 20000234 PARAMETER Experiment Name: At_Siliques_P Parameter: Plant Line Value: WS
  misc_feature: MA Experiment 20000234 PARAMETER Experiment Name: At_Siliques_P Parameter: Tissue Value: Less Than 5mm Siliques vs. Whole Plant
  misc_feature: MA Experiment ID: 20000264 Result: Up-regulated in Transcription
  misc_feature: MA Experiment 20000264 PARAMETER Experiment Name: At_Open_Flower_P Parameter: Age (day) Value: 21
  misc_feature: MA Experiment 20000264 PARAMETER Experiment Name: At_Open_Flower_P Parameter: Plant Line Value: WS
  misc_feature: MA Experiment 20000264 PARAMETER Experiment Name: At_Open_Flower_P Parameter: Tissue Value: Open Flower vs. Whole Plant
  misc_feature: MA Experiment ID: 20000265 Result: Up-regulated in Transcription
  misc_feature: MA Experiment 20000265 PARAMETER Experiment Name: At_Open_Flower_P Parameter: Age (day) Value: 21
  misc_feature: MA Experiment 20000265 PARAMETER Experiment Name: At_Open_Flower_P Parameter: Plant Line Value: WS
  misc_feature: MA Experiment 20000265 PARAMETER Experiment Name: At_Open_Flower_P Parameter: Tissue Value: Closed Flower vs. Whole Plant
  misc_feature: MA Experiment ID: 20000286 Result: Up-regulated in Transcription
  misc_feature: MA Experiment 20000286 PARAMETER Experiment Name: At_Open_Flower_P Parameter: Age (day) Value: 21
  misc_feature: MA Experiment 20000286 PARAMETER Experiment Name: At_Open_Flower_P Parameter: Plant Line Value: WS
  misc_feature: MA Experiment 20000286 PARAMETER Experiment Name: At_Open_Flower_P Parameter: Tissue Value: Half Open vs. Whole Plant
  misc_feature: MA Experiment ID: 20000439 Result: Up-regulated in Transcription
  misc_feature: MA Experiment 20000439 PARAMETER Experiment Name: At_Roots__P Parameter: Age (day) Value: 14 vs. 21
  misc_feature: MA Experiment 20000439 PARAMETER Experiment Name: At_Roots__P Parameter: Organism Value: A. thaliana
  misc_feature: MA Experiment 20000439 PARAMETER Experiment Name: At_Roots__P Parameter: Tissue Value: Roots vs. Whole Plant
  misc_feature: MA Experiment ID: 20000527 Result: Down-regulated in Transcription
  misc_feature: MA Experiment 20000527 PARAMETER Experiment Name: At_10percent_PEG_P Parameter: Age (day) Value: 20
  misc_feature: MA Experiment 20000527 PARAMETER Experiment Name: At_10percent_PEG_P Parameter: Organism Value: A. thaliana
  misc_feature: MA Experiment 20000527 PARAMETER Experiment Name: At_10percent_PEG_P Parameter: Plant Line Value: WS
  misc_feature: MA Experiment 20000527 PARAMETER Experiment Name: At_10percent_PEG_P Parameter: Timepoint (day) Value: 20
  misc_feature: MA Experiment 20000527 PARAMETER Experiment Name: At_10percent_PEG_P Parameter: Tissue Value: Whole Plant
  misc_feature: MA Experiment 20000527 PARAMETER Experiment Name: At_10percent_PEG_P Parameter: Treatment Value: 10percent PEG vs. No Treatment
  misc_feature: MA Experiment ID: 20001560 Result: Up-regulated in Transcription
  misc_feature: MA Experiment 20001560 PARAMETER Experiment Name: At_Drought_Soil_Dry_P Parameter: Age (day) Value: 28
  misc_feature: MA Experiment 20001560 PARAMETER Experiment Name: At_Drought_Soil_Dry_P Parameter: Organism Value: A. thaliana
  misc_feature: MA Experiment 20001560 PARAMETER Experiment Name: At_Drought_Soil_Dry_P Parameter: Plant Line Value: WS
  misc_feature: MA Experiment 20001560 PARAMETER Experiment Name: At_Drought_Soil_Dry_P Parameter: Post Timepoint (hr) Value: None
  misc_feature: MA Experiment 20001560 PARAMETER Experiment Name: At_Drought_Soil_Dry_P Parameter: Post-Treatment Value: None
  misc_feature: MA Experiment 20001560 PARAMETER Experiment Name: At_Drought_Soil_Dry_P Parameter: Timepoint (day) Value: 14
  misc_feature: MA Experiment 20001560 PARAMETER Experiment Name: At_Drought_Soil_Dry_P Parameter: Treatment Value: Drought vs. No Drought
  misc_feature: MA Experiment ID: 20001906 Result: Down-regulated in Transcription
  misc_feature: MA Experiment 20001906 PARAMETER Experiment Name: At_Drought_Reproduction_P Parameter: Age (day) Value: 35
  misc_feature: MA Experiment 20001906 PARAMETER Experiment Name: At_Drought_Reproduction_P Parameter: Organism Value: A. thaliana
  misc_feature: MA Experiment 20001906 PARAMETER Experiment Name: At_Drought_Reproduction_P Parameter: Plant Line Value: WS
  misc_feature: MA Experiment 20001906 PARAMETER Experiment Name: At_Drought_Reproduction_P Parameter: Timepoint (day) Value: 5
  misc_feature: MA Experiment 20001906 PARAMETER Experiment Name: At_Drought_Reproduction_P Parameter: Tissue Value: Siliques
  misc_feature: MA Experiment 20001906 PARAMETER Experiment Name: At_Drought_Reproduction_P Parameter: Treatment Value: Drought vs. No Drought
gtttaaacatcctaatcgaaaacatgtgatgtgaacaatctcactctctttctctatctctctttcgagtttctttggagtattatataacaaatcagtccaagacacctcttttctcacaccaatctcgctctcaccacaaaacagagaatctcagatcgaagaagcaaagaaagagagaatgggtttcacttcccgaggaaacccttcttttctcttcttcttctttttcttcctctgtctctccacagtctctgcttacatcaacaacacaagtagcaacaatgaagaagtaagaagagagctagcttcttggagatgtaattggtttagagggaattgggtttatgatgtaaagtacccactttatgatccttacaaatgtccattcatagatccacagtttaactgtaagaagtatggtcgtcctgacaatgcttaccttaagtatcgatggcaaccatcttcttgctctctccccagattcaatgggttgtatttcttgaggaggatgagagggaagaagataatgttcgttggagattcactaagcacaaacatgtggcaatctcttgcttgtctaattcactcttgggttcctaacactcgttacactcttattcgccaaaagggtctagcttcacttacctttgaggaatacggagtgacgttgttgctatacagaacacagttcttggtagatttgaatgtggagaaagttgggagagtgcttaagcttgattccattaagcaagggaatatgtggagaggcatggacgttttgattttcaactcgtggcattggtggacacacacaacacattcagccgtgggattacatggaagatgggaataggttgtacaaagacatgaaccggctcgttgctttctacaaaggaatgaccacttgggctcgatgggttaatgcttacgtcgatccttctaagactaaagtcttcttcaacggcgtgtctcctactcattacgagggaaaggattggggagagccaatgaactcatgtaggagtcaaacgcagccattttacggaaggaagtatccaggagggacaccaatggcttgggtgattctaaacaaagtgatgaggagattgaagaaaccggtccattggctcgatataaccggtctgtctcagcttcgtaaagatgctcatccttctgctttcagtgggaaccatcctggtaatgactgtagccattggtgtctccctggtttgcctgatacttggaacttgctcttttactctactcttttctcttcttaattaattcctttctcatcaatgtataagttaacttaaaacaacaatcaattatttttagtcatctttc

SEQ ID NO: 30412 - protein, 224 aa, Arabidopsis thaliana
  peptide (1)..(224): Ceres Seq. ID no. 15222720
  misc_feature (156)..(209): Homolog of NCBI NO: 34904010 NR Description: unnamed protein product [Oryza sativa (japonica
  misc_feature (16)..(165): Homolog of NCBI NO: 34904010 NR Description: unnamed protein product [Oryza sativa (japonica
  misc_feature (47)..(212): Homolog of NCBI NO: 30350855 NR Description: hypothetical protein At2g30900 [Arabidopsis
  misc_feature (11)..(212): Homolog of NCBI NO: 15219157 NR Description: hypothetical protein [Arabidopsis thaliana]
  misc_feature (47)..(212): Homolog of NCBI NO: 15224585 NR Description: expressed protein [Arabidopsis thaliana]
  misc_feature (23)..(212): Homolog of NCBI NO: 18403435 NR Description: expressed protein [Arabidopsis thaliana]
  misc_feature (39)..(212): Homolog of NCBI NO: 34911864 NR Description: OSJNBb0032K15.9 [Oryza sativa (japonica
  misc_feature (42)..(213): Homolog of NCBI NO: 28393769 NR Description: unknown protein [Arabidopsis thaliana]
  misc_feature (42)..(213): Homolog of NCBI NO: 21593142 NR Description: unknown [Arabidopsis thaliana]
  misc_feature (1)..(214): Homolog of NCBI NO: 18406003 NR Description: expressed protein [Arabidopsis thaliana]
MGFTSRGNPSFLFFFFFFLCLSTVSAYINNTSSNNEEVRRELASWRCNWFRGNWVYDVKYPLYDPYKCPFIDPQFNCKKYGRPDNAYLKYRWQPSSCSLPRFNGLYFLRRMRGKKIMFVGDSLSTNMWQSLACLIHSWVPNTRYTLIRQKGLASLTFEEYGVTLLLYRTQFLVDLNVEKVGRVLKLDSIKQGNMWRGMDVLIFNSWHWWTHTTHSAVGLHGRWE

SEQ ID NO: 30413 - protein, 147 aa, Arabidopsis thaliana
  peptide (1)..(147): Ceres Seq. ID no. 15222721
  misc_feature (1)..(144): Homolog of NCBI NO: 21553643 NR Description: unknown [Arabidopsis thaliana]
  misc_feature (1)..(144): Homolog of NCBI NO: 34904010 NR Description: unnamed protein product [Oryza sativa (japonica
  misc_feature (1)..(147): Homolog of NCBI NO: 30350855 NR Description: hypothetical protein At2g30900 [Arabidopsis
  misc_feature (1)..(146): Homolog of NCBI NO: 15219157 NR Description: hypothetical protein [Arabidopsis thaliana]
  misc_feature (1)..(147): Homolog of NCBI NO: 15224585 NR Description: expressed protein [Arabidopsis thaliana]
  misc_feature (1)..(144): Homolog of NCBI NO: 18403435 NR Description: expressed protein [Arabidopsis thaliana]
  misc_feature (1)..(146): Homolog of NCBI NO: 34911864 NR Description: OSJNBb0032K15.9 [Oryza sativa (japonica
  misc_feature (1)..(146): Homolog of NCBI NO: 28393769 NR Description: unknown protein [Arabidopsis thaliana]
  misc_feature (1)..(146): Homolog of NCBI NO: 21593142 NR Description: unknown [Arabidopsis thaliana]
  misc_feature (1)..(147): Homolog of NCBI NO: 18406003 NR Description: expressed protein [Arabidopsis thaliana]
MEDGNRLYKDMNRLVAFYKGMTTWARWVNAYVDPSKTKVFFNGVSPTHYEGKDWGEPMNSCRSQTQPFYGRKYPGGTPMAWVILNKVMRRLKKPVHWLDITGLSQLRKDAHPSAFSGNHPGNDCSHWCLPGLPDTWNLLFYSTLFSS

SEQ ID NO: 30414 - protein, 137 aa, Arabidopsis thaliana
  peptide (1)..(137): Ceres Seq. ID no. 15222722
  misc_feature (1)..(134): Homolog of NCBI NO: 21553643 NR Description: unknown [Arabidopsis thaliana]
  misc_feature (1)..(134): Homolog of NCBI NO: 34904010 NR Description: unnamed protein product [Oryza sativa (japonica
  misc_feature (1)..(137): Homolog of NCBI NO: 30350855 NR Description: hypothetical protein At2g30900 [Arabidopsis
  misc_feature (1)..(136): Homolog of NCBI NO: 15219157 NR Description: hypothetical protein [Arabidopsis thaliana]
  misc_feature (1)..(137): Homolog of NCBI NO: 15224585 NR Description: expressed protein [Arabidopsis thaliana]
  misc_feature (1)..(134): Homolog of NCBI NO: 18403435 NR Description: expressed protein [Arabidopsis thaliana]
  misc_feature (1)..(136): Homolog of NCBI NO: 34911864 NR Description: OSJNBb0032K15.9 [Oryza sativa (japonica
  misc_feature (1)..(136): Homolog of NCBI NO: 28393769 NR Description: unknown protein [Arabidopsis thaliana]
  misc_feature (1)..(136): Homolog of NCBI NO: 21593142 NR Description: unknown [Arabidopsis thaliana]
  misc_feature (1)..(137): Homolog of NCBI NO: 18406003 NR Description: expressed protein [Arabidopsis thaliana]
MNRLVAFYKGMTTWARWVNAYVDPSKTKVFFNGVSPTHYEGKDWGEPMNSCRSQTQPFYGRKYPGGTPMAWVILNKVMRRLKKPVHWLDITGLSQLRKDAHPSAFSGNHPGNDCSHWCLPGLPDTWNLLFYSTLFSS

SEQ ID NO: 30415 - DNA, 1286 bp, Arabidopsis thaliana
  misc_feature (1)..(1286): Ceres Seq. ID no. 12326413
  misc_feature: MA Experiment ID: 108585 Result: Up-regulated in Transcription
  misc_feature: MA Experiment 108585 PARAMETER Experiment Name: At_5mM_NaNP_cDNA_P Parameter: Timepoint (hr) Value: 6
  misc_feature: MA Experiment 108585 PARAMETER Experiment Name: At_5mM_NaNP_cDNA_P Parameter: Tissue Value: Aerial
  misc_feature: MA Experiment 108585 PARAMETER Experiment Name: At_5mM_NaNP_cDNA_P Parameter: Treatment Value: null
  misc_feature: MA Experiment ID: 20000180 Result: Down-regulated in Transcription
  misc_feature: MA Experiment 20000180 PARAMETER Experiment Name: At_Germinating_Seeds_P Parameter: Age (hr) Value: 24 vs. 0
  misc_feature: MA Experiment 20000180 PARAMETER Experiment Name: At_Germinating_Seeds_P Parameter: Tissue Value: Germinating Seeds
  misc_feature: MA Experiment ID: 20000184 Result: Down-regulated in Transcription
  misc_feature: MA Experiment 20000184 PARAMETER Experiment Name: At_Shoots__P Parameter: Age (day) Value: 7
  misc_feature: MA Experiment 20000184 PARAMETER Experiment Name: At_Shoots__P Parameter: Tissue Value: Shoots vs. Whole Plant
  misc_feature: MA Experiment ID: 20000227 Result: Down-regulated in Transcription
  misc_feature: MA Experiment 20000227 PARAMETER Experiment Name: At_Root-Tips-vs-Tops_P Parameter: Tissue Value: Root Tips vs. Root Tops
  misc_feature: MA Experiment ID: 20001557 Result: Down-regulated in Transcription
  misc_feature: MA Experiment 20001557 PARAMETER Experiment Name: At_Drought_Soil_Dry_P Parameter: Age (day) Value: 27
  misc_feature: MA Experiment 20001557 PARAMETER Experiment Name: At_Drought_Soil_Dry_P Parameter: Organism Value: A. thaliana
  misc_feature: MA Experiment 20001557 PARAMETER Experiment Name: At_Drought_Soil_Dry_P Parameter: Plant Line Value: WS
  misc_feature: MA Experiment 20001557 PARAMETER Experiment Name: At_Drought_Soil_Dry_P Parameter: Post Timepoint (hr) Value: 3
  misc_feature: MA Experiment 20001557 PARAMETER Experiment Name: At_Drought_Soil_Dry_P Parameter: Post-Treatment Value: Re-Water vs. No Drought
  misc_feature: MA Experiment 20001557 PARAMETER Experiment Name: At_Drought_Soil_Dry_P Parameter: Timepoint (day) Value: 13
  misc_feature: MA Experiment 20001557 PARAMETER Experiment Name: At_Drought_Soil_Dry_P Parameter: Treatment Value: Drought vs. No Drought
acagagatttgtgtagaactctctctctctctataacaaaattggacagaattgggcaatcgagagagaaagatgcaagccatctccaaagtttcttctgcagcatcattctttagatgttctaggctagttagtcagccatgtgtgaggccttgcgtgagacagcttcacgtcagaaagggtcttgtctctggtgtcatgaagctgttctcttcacctcttaggactttgcgtgatgctggtaaatccgttcgcatttcaagattctgcagtgtctccaatgtctcttcctcattgcaaattgaactggtgccatgtcttacggacaactatgcttatatcttacatgatgaggataccggtacagttggtgtggttgacccttctgaagctgtacctgttatggatgccctccagaagaatagtcgaaatctaacttatatattaaatacacatcaccattatgatcacactggtggcaatttggaattaaaagacaggtatggtgcaaaggtgatcggctcagctgcagatagggaccggattcctggaattgatgtagccttgaaagatgctgacaaatggatgtttgctggccatgaagtccatattatggaaactcctggccacaccagaggccatattagtttctactttccaggggcacgagcaattttcaccggggacaccttgtttagcttatcatgtggtaaactcttcgaaggtactccagagcagatgctagcttctctacagaggataattgcgttgccagatgacacaagcgtatactgtggccatgaatatacactgagtaattccaagtttgcattgtctatagaaccaacaaacgaagtgctccagtcttatgcagcctacgttgcagaactccgtgacaagaaattaccaacgattccaacgacgatgaagatggagaaagcttgtaacccgtttctccgcactgagaacacagatatccgtcgagctttaggtattccagagacagcagatgaagcagaagctctgggtattataagaagagcaaaggacaatttcaaagcttagctaaaatataataagaatggttcctctgtacagtgatgatgcgatcctggtttaatctgtaataaggtgttttgagttttgaccgtgacgttacgtctcctagtagttttcatggtcatactcgaaatgattttttttttccttttgatcaaacggtcctaagtacccaagtttctactttgatgaaccctcgaattttgttattatttgtttttggatct

SEQ ID NO: 30416 - protein, 330 aa, Arabidopsis thaliana
  peptide (1)..(330): Ceres Seq. ID no. 12326414
  misc_feature (85)..(243): Pfam Name: Metallo-beta-lactamase superfamily Pfam Description: Metallo-beta-lactamase superfamily
  misc_feature (4)..(328): Homolog of NCBI NO: 28143946 NR Description: glyoxalase II [Brassica juncea]
  misc_feature (1)..(328): Homolog of NCBI NO: 21070362 NR Description: glyoxalase II [Pennisetum glaucum]
  misc_feature (1)..(328): Homolog of NCBI NO: 16209608 NR Description: glyoxalase II [Oryza sativa]
  misc_feature (1)..(328): Homolog of NCBI NO: 2570340 NR Description: glyoxalase II mitochondrial isozyme [Arabidopsis
  misc_feature (1)..(328): Homolog of NCBI NO: 18406237 NR Description: glyoxalase II (hydroxyacylglutathione
  misc_feature (1)..(328): Homolog of NCBI NO: 15224661 NR Description: glyoxalase II, putative (hydroxyacylglutathione
  misc_feature (1)..(328): Homolog of NCBI NO: 30684920 NR Description: glyoxalase II, putative (hydroxyacylglutathione
  misc_feature (18)..(330): Homolog of NCBI NO: 25406895 NR Description: hypothetical protein [imported] - Arabidopsis
  misc_feature (1)..(330): Homolog of NCBI NO: 18390616 NR Description: glyoxalase II, putative (hydroxyacylglutathione
  misc_feature (1)..(330): Homolog of NCBI NO: 30679573 NR Description: glyoxalase II, putative (hydroxyacylglutathione
MQAISKVSSAASFFRCSRLVSQPCVRPCVRQLHVRKGLVSGVMKLFSSPLRTLRDAGKSVRISRFCSVSNVSSSLQIELVPCLTDNYAYILHDEDTGTVGVVDPSEAVPVMDALQKNSRNLTYILNTHHHYDHTGGNLELKDRYGAKVIGSAADRDRIPGIDVALKDADKWMFAGHEVHIMETPGHTRGHISFYFPGARAIFTGDTLFSLSCGKLFEGTPEQMLASLQRIIALPDDTSVYCGHEYTLSNSKFALSIEPTNEVLQSYAAYVAELRDKKLPTIPTTMKMEKACNPFLRTENTDIRRALGIPETADEAEALGIIRRAKDNFKA

SEQ ID NO: 30417 - protein, 288 aa, Arabidopsis thaliana
  peptide (1)..(288): Ceres Seq. ID no. 12326415
  misc_feature (43)..(201): Pfam Name: Metallo-beta-lactamase superfamily Pfam Description: Metallo-beta-lactamase superfamily
  misc_feature (1)..(286): Homolog of NCBI NO: 28143946 NR Description: glyoxalase II [Brassica juncea]
  misc_feature (1)..(286): Homolog of NCBI NO: 21070362 NR Description: glyoxalase II [Pennisetum glaucum]
  misc_feature (1)..(286): Homolog of NCBI NO: 16209608 NR Description: glyoxalase II [Oryza sativa]
  misc_feature (1)..(286): Homolog of NCBI NO: 2570340 NR Description: glyoxalase II mitochondrial isozyme [Arabidopsis
  misc_feature (1)..(286): Homolog of NCBI NO: 18406237 NR Description: glyoxalase II (hydroxyacylglutathione
  misc_feature (1)..(286): Homolog of NCBI NO: 15224661 NR Description: glyoxalase II, putative (hydroxyacylglutathione
  misc_feature (1)..(286): Homolog of NCBI NO: 30684920 NR Description: glyoxalase II, putative (hydroxyacylglutathione
  misc_feature (1)..(288): Homolog of NCBI NO: 25406895 NR Description: hypothetical protein [imported] - Arabidopsis
  misc_feature (1)..(288): Homolog of NCBI NO: 18390616 NR Description: glyoxalase II, putative (hydroxyacylglutathione
  misc_feature (1)..(288): Homolog of NCBI NO: 30679573 NR Description: glyoxalase II, putative (hydroxyacylglutathione
MKLFSSPLRTLRDAGKSVRISRFCSVSNVSSSLQIELVPCLTDNYAYILHDEDTGTVGVVDPSEAVPVMDALQKNSRNLTYILNTHHHYDHTGGNLELKDRYGAKVIGSAADRDRIPGIDVALKDADKWMFAGHEVHIMETPGHTRGHISFYFPGARAIFTGDTLFSLSCGKLFEGTPEQMLASLQRIIALPDDTSVYCGHEYTLSNSKFALSIEPTNEVLQSYAAYVAELRDKKLPTIPTTMKMEKACNPFLRTENTDIRRALGIPETADEAEALGIIRRAKDNFKA

SEQ ID NO: 30418 - protein, 220 aa, Arabidopsis thaliana
  peptide (1)..(220): Ceres Seq. ID no. 12326416
  misc_feature (1)..(133): Pfam Name: Metallo-beta-lactamase superfamily Pfam Description: Metallo-beta-lactamase superfamily
  misc_feature (1)..(218): Homolog of NCBI NO: 28143946 NR Description: glyoxalase II [Brassica juncea]
  misc_feature (1)..(218): Homolog of NCBI NO: 21070362 NR Description: glyoxalase II [Pennisetum glaucum]
  misc_feature (1)..(218): Homolog of NCBI NO: 16209608 NR Description: glyoxalase II [Oryza sativa]
  misc_feature (1)..(218): Homolog of NCBI NO: 2570340 NR Description: glyoxalase II mitochondrial isozyme [Arabidopsis
  misc_feature (1)..(218): Homolog of NCBI NO: 18406237 NR Description: glyoxalase II (hydroxyacylglutathione
  misc_feature (1)..(218): Homolog of NCBI NO: 15224661 NR Description: glyoxalase II, putative (hydroxyacylglutathione
  misc_feature (1)..(218): Homolog of NCBI NO: 30684920 NR Description: glyoxalase II, putative (hydroxyacylglutathione
  misc_feature (1)..(220): Homolog of NCBI NO: 25406895 NR Description: hypothetical protein [imported] - Arabidopsis
  misc_feature (1)..(220): Homolog of NCBI NO: 18390616 NR Description: glyoxalase II, putative (hydroxyacylglutathione
  misc_feature (1)..(220): Homolog of NCBI NO: 30679573 NR Description: glyoxalase II, putative (hydroxyacylglutathione
MDALQKNSRNLTYILNTHHHYDHTGGNLELKDRYGAKVIGSAADRDRIPGIDVALKDADKWMFAGHEVHIMETPGHTRGHISFYFPGARAIFTGDTLFSLSCGKLFEGTPEQMLASLQRIIALPDDTSVYCGHEYTLSNSKFALSIEPTNEVLQSYAAYVAELRDKKLPTIPTTMKMEKACNPFLRTENTDIRRALGIPETADEAEALGIIRRAKDNFKA

SEQ ID NO: 30419 - DNA, 1267 bp, Arabidopsis thaliana
  misc_feature (1)..(1267): Ceres Seq. ID no. 12334784
  misc_feature: MA Experiment ID: 108462 Result: Down-regulated in Transcription
  misc_feature: MA Experiment 108462 PARAMETER Experiment Name: At_Germinating_Seeds_cDNA_P Parameter: Age (day) Value: 2 vs. 0
  misc_feature: MA Experiment 108462 PARAMETER Experiment Name: At_Germinating_Seeds_cDNA_P Parameter: Tissue Value: Germinating Seeds
  misc_feature: MA Experiment ID: 108569 Result: Down-regulated in Transcription
  misc_feature: MA Experiment 108569 PARAMETER Experiment Name: At_0.001%_MeJA__cDNA_P Parameter: Timepoint (hr) Value: 6
  misc_feature: MA Experiment 108569 PARAMETER Experiment Name: At_0.001%_MeJA__cDNA_P Parameter: Tissue Value: Aerial
  misc_feature: MA Experiment 108569 PARAMETER Experiment Name: At_0.001%_MeJA__cDNA_P Parameter: Treatment Value: 0.001% MeJA vs. No Treatment
  misc_feature: MA Experiment ID: 20000184 Result: Down-regulated in Transcription
  misc_feature: MA Experiment 20000184 PARAMETER Experiment Name: At_Shoots__P Parameter: Age (day) Value: 7
  misc_feature: MA Experiment 20000184 PARAMETER Experiment Name: At_Shoots__P Parameter: Tissue Value: Shoots vs. Whole Plant
  misc_feature: MA Experiment ID: 20000794 Result: Up-regulated in Transcription
  misc_feature: MA Experiment 20000794 PARAMETER Experiment Name: At_Petals_P Parameter: Age (day) Value: 23-25 days
  misc_feature: MA Experiment 20000794 PARAMETER Experiment Name: At_Petals_P Parameter: Plant Line Value: WS
  misc_feature: MA Experiment 20000794 PARAMETER Experiment Name: At_Petals_P Parameter: Tissue Value: Petals vs. Whole plant
gtattggactaatttagtagactgctccctgaaatattgattttctcatgctaacaaaggcagacgaacagaagggtttggaggataaatgtgctaaacagatggcggaaattaaatctctcaaggctctaattgagaaactactcaaagaaaaactacagctgcaaaatctagcaagcatctgtacgcgtgaatgtaatgatgacaggggactggcagaaatcaaggattcacaacggaaagcccaagctcaggctgaagagctgaaaaacgttttggatgaacactttcttgaattgagagtgaaagcggctcatgagactgagagtgcttgccaagaaaggcttgctaccgccaaggctgaaattgctgaattgaggactcagttagatctttctgagagggaggttttggaacttaaggagggtattaaagttaaagagcaggaggcagaggcatccattgctgaaatggagactataggtcaagcctatgaagacatgcagacacagaaccaacatttgttgcagcaggtggctgagcgggacgattataatatcaagcttgtttccgaaagtgtcaagacaaagcatgcttacaacactcacttatctgagaagcaagtaatggaaaagcagctccatcaggttaatgcatccgtagagaattttaaagcaaggattgcacataatgaggaacagatgaaaggctgtttttctgaggcttataaattgattcaagaagatcgtcacctcgttatcagcctcgaaaccaccaaatgggaagtagctgatgctgacaaggaattcagatggctcaagtcggccgtgtcttcatccgaaaaggaatatgaacagatcagtaggaggacagacgacatcaaactggaactggatgatgaaaggagggagaagaagaagcttgaggaagagcttatggagttgaacaaagagcttgaagagttggattctgagagtgtagaagctgcaattgtgaggctccaggaagaagttaagaattgcaaaaacatcctcaaatgtggtgtatgttttgatcggcctaaagaggtggtaattgtgaaatgttatcatctgttctgccagcaatgcatccaacgtagcttagagatccgacaccggaaatgtccaggctgcggtaccgcctttggccagaatgacgtccggcttgtcaaaatgtaactcaaaacattcacacaaatgcactatgtgttggtacataacaaacttaattaaggtccacacagtcc

SEQ ID NO: 30420 - protein, 383 aa, Arabidopsis thaliana
  peptide (1)..(383): Ceres Seq. ID no. 12334785
  misc_feature (331)..(369): Pfam Name: Zinc finger, C3HC4 type (RING finger) Pfam Description: Zinc finger, C3HC4 type (RING finger)
  misc_feature (2)..(377): Homolog of NCBI NO: 34364873 NR Description: hypothetical protein [Homo sapiens]
  misc_feature (2)..(377): Homolog of NCBI NO: 28175093 NR Description: Similar to ring finger protein 40 [Homo sapiens]
  misc_feature (2)..(381): Homolog of NCBI NO: 26335243 NR Description: unnamed protein product [Mus musculus]
  misc_feature (7)..(377): Homolog of NCBI NO: 33284892 NR Description: SI:bZ1C10.1.2 (novel ring finger protein) [Danio
  misc_feature (1)..(379): Homolog of NCBI NO: 30689877 NR Description: zinc finger (C3HC4-type RING finger) protein
  misc_feature (1)..(379): Homolog of NCBI NO: 7486945 NR Description: hypothetical protein At2g44950 [imported] -
  misc_feature (29)..(383): Homolog of NCBI NO: 37536934 NR Description: unknown protein [Oryza sativa (japonica
  misc_feature (19)..(383): Homolog of NCBI NO: 21553880 NR Description: unknown [Arabidopsis thaliana]
  misc_feature (4)..(383): Homolog of NCBI NO: 25405809 NR Description: unknown protein, 71207-66119 [imported] -
  misc_feature (1)..(383): Homolog of NCBI NO: 18405292 NR Description: Expressed protein
MLTKADEQKGLEDKCAKQMAEIKSLKALIEKLLKEKLQLQNLASICTRECNDDRGLAEIKDSQRKAQAQAEELKNVLDEHFLELRVKAAHETESACQERLATAKAEIAELRTQLDLSEREVLELKEGIKVKEQEAEASIAEMETIGQAYEDMQTQNQHLLQQVAERDDYNIKLVSESVKTKHAYNTHLSEKQVMEKQLHQVNASVENFKARIAHNEEQMKGCFSEAYKLIQEDRHLVISLETTKWEVADADKEFRWLKSAVSSSEKEYEQISRRTDDIKLELDDERREKKKLEEELMELNKELEELDSESVEAAIVRLQEEVKNCKNILKCGVCFDRPKEVVIVKCYHLFCQQCIQRSLEIRHRKCPGCGTAFGQNDVRLVKM

SEQ ID NO: 30421 - protein, 365 aa, Arabidopsis thaliana
  peptide (1)..(365): Ceres Seq. ID no. 12334786
  misc_feature (313)..(351): Pfam Name: Zinc finger, C3HC4 type (RING finger) Pfam Description: Zinc finger, C3HC4 type (RING finger)
  misc_feature (1)..(359): Homolog of NCBI NO: 34364873 NR Description: hypothetical protein [Homo sapiens]
  misc_feature (1)..(359): Homolog of NCBI NO: 28175093 NR Description: Similar to ring finger protein 40 [Homo sapiens]
  misc_feature (1)..(363): Homolog of NCBI NO: 26335243 NR Description: unnamed protein product [Mus musculus]
  misc_feature (1)..(359): Homolog of NCBI NO: 33284892 NR Description: SI:bZ1C10.1.2 (novel ring finger protein) [Danio
  misc_feature (1)..(361): Homolog of NCBI NO: 30689877 NR Description: zinc finger (C3HC4-type RING finger) protein
  misc_feature (1)..(361): Homolog of NCBI NO: 7486945 NR Description: hypothetical protein At2g44950 [imported] -
  misc_feature (11)..(365): Homolog of NCBI NO: 37536934 NR Description: unknown protein [Oryza sativa (japonica
  misc_feature (1)..(365): Homolog of NCBI NO: 21553880 NR Description: unknown [Arabidopsis thaliana]
  misc_feature (1)..(365): Homolog of NCBI NO: 25405809 NR Description: unknown protein, 71207-66119 [imported] -
  misc_feature (1)..(365): Homolog of NCBI NO: 18405292 NR Description: Expressed protein
MAEIKSLKALIEKLLKEKLQLQNLASICTRECNDDRGLAEIKDSQRKAQAQAEELKNVLDEHFLELRVKAAHETESACQERLATAKAEIAELRTQLDLSEREVLELKEGIKVKEQEAEASIAEMETIGQAYEDMQTQNQHLLQQVAERDDYNIKLVSESVKTKHAYNTHLSEKQVMEKQLHQVNASVENFKARIAHNEEQMKGCFSEAYKLIQEDRHLVISLETTKWEVADADKEFRWLKSAVSSSEKEYEQISRRTDDIKLELDDERREKKKLEEELMELNKELEELDSESVEAAIVRLQEEVKNCKNILKCGVCFDRPKEVVIVKCYHLFCQQCIQRSLEIRHRKCPGCGTAFGQNDVRLVKM

SEQ ID NO: 30422 - protein, 242 aa, Arabidopsis thaliana
  peptide (1)..(242): Ceres Seq. ID no. 12334787
  misc_feature (190)..(228): Pfam Name: Zinc finger, C3HC4 type (RING finger) Pfam Description: Zinc finger, C3HC4 type (RING finger)
  misc_feature (1)..(236): Homolog of NCBI NO: 34364873 NR Description: hypothetical protein [Homo sapiens]
  misc_feature (1)..(236): Homolog of NCBI NO: 28175093 NR Description: Similar to ring finger protein 40 [Homo sapiens]
  misc_feature (1)..(240): Homolog of NCBI NO: 26335243 NR Description: unnamed protein product [Mus musculus]
  misc_feature (1)..(236): Homolog of NCBI NO: 33284892 NR Description: SI:bZ1C10.1.2 (novel ring finger protein) [Danio
  misc_feature (1)..(238): Homolog of NCBI NO: 30689877 NR Description: zinc finger (C3HC4-type RING finger) protein
  misc_feature (1)..(238): Homolog of NCBI NO: 7486945 NR Description: hypothetical protein At2g44950 [imported] -
  misc_feature (1)..(242): Homolog of NCBI NO: 37536934 NR Description: unknown protein [Oryza sativa (japonica
  misc_feature (1)..(242): Homolog of NCBI NO: 21553880 NR Description: unknown [Arabidopsis thaliana]
  misc_feature (1)..(242): Homolog of NCBI NO: 25405809 NR Description: unknown protein, 71207-66119 [imported] -
  misc_feature (1)..(242): Homolog of NCBI NO: 18405292 NR Description: Expressed protein
METIGQAYEDMQTQNQHLLQQVAERDDYNIKLVSESVKTKHAYNTHLSEKQVMEKQLHQVNASVENFKARIAHNEEQMKGCFSEAYKLIQEDRHLVISLETTKWEVADADKEFRWLKSAVSSSEKEYEQISRRTDDIKLELDDERREKKKLEEELMELNKELEELDSESVEAAIVRLQEEVKNCKNILKCGVCFDRPKEVVIVKCYHLFCQQCIQRSLEIRHRKCPGCGTAFGQNDVRLVKM

SEQ ID NO: 30423 - DNA, 1182 bp, Arabidopsis thaliana
  misc_feature (1)..(1182): Ceres Seq. ID no. 12482670
  misc_feature: MA Experiment ID: 20000179 Result: Up-regulated in Transcription
  misc_feature: MA Experiment 20000179 PARAMETER Experiment Name: At_Germinating_Seeds_P Parameter: Age (hr) Value: 6 vs. 0
  misc_feature: MA Experiment 20000179 PARAMETER Experiment Name: At_Germinating_Seeds_P Parameter: Tissue Value: Germinating Seeds
  misc_feature: MA Experiment ID: 20000227 Result: Up-regulated in Transcription
  misc_feature: MA Experiment 20000227 PARAMETER Experiment Name: At_Root-Tips-vs-Tops_P Parameter: Tissue Value: Root Tips vs. Root Tops
  misc_feature: MA Experiment ID: 20000234 Result: Up-regulated in Transcription
  misc_feature: MA Experiment 20000234 PARAMETER Experiment Name: At_Siliques_P Parameter: Age (day) Value: 21
  misc_feature: MA Experiment 20000234 PARAMETER Experiment Name: At_Siliques_P Parameter: Organism Value: A. thaliana
  misc_feature: MA Experiment 20000234 PARAMETER Experiment Name: At_Siliques_P Parameter: Plant Line Value: WS
  misc_feature: MA Experiment 20000234 PARAMETER Experiment Name: At_Siliques_P Parameter: Tissue Value: Less Than 5mm Siliques vs. Whole Plant
  misc_feature: MA Experiment ID: 20000235 Result: Up-regulated in Transcription
  misc_feature: MA Experiment 20000235 PARAMETER Experiment Name: At_Siliques_P Parameter: Age (day) Value: 21
  misc_feature: MA Experiment 20000235 PARAMETER Experiment Name: At_Siliques_P Parameter: Organism Value: A. thaliana
  misc_feature: MA Experiment 20000235 PARAMETER Experiment Name: At_Siliques_P Parameter: Plant Line Value: WS
  misc_feature: MA Experiment 20000235 PARAMETER Experiment Name: At_Siliques_P Parameter: Tissue Value: 5-10mm Siliques vs. Whole Plant
  misc_feature: MA Experiment ID: 20000264 Result: Up-regulated in Transcription
  misc_feature: MA Experiment 20000264 PARAMETER Experiment Name: At_Open_Flower_P Parameter: Age (day) Value: 21
  misc_feature: MA Experiment 20000264 PARAMETER Experiment Name: At_Open_Flower_P Parameter: Plant Line Value: WS
  misc_feature: MA Experiment 20000264 PARAMETER Experiment Name: At_Open_Flower_P Parameter: Tissue Value: Open Flower vs. Whole Plant
  misc_feature: MA Experiment ID: 20000286 Result: Up-regulated in Transcription
  misc_feature: MA Experiment 20000286 PARAMETER Experiment Name: At_Open_Flower_P Parameter: Age (day) Value: 21
  misc_feature: MA Experiment 20000286 PARAMETER Experiment Name: At_Open_Flower_P Parameter: Plant Line Value: WS
  misc_feature: MA Experiment 20000286 PARAMETER Experiment Name: At_Open_Flower_P Parameter: Tissue Value: Half Open vs. Whole Plant
  misc_feature: MA Experiment ID: 20001771 Result: Up-regulated in Transcription
  misc_feature: MA Experiment 20001771 PARAMETER Experiment Name: At_Far-red-enriched-adult_P Parameter: Age (day) Value: 28
  misc_feature: MA Experiment 20001771 PARAMETER Experiment Name: At_Far-red-enriched-adult_P Parameter: Light Value: Far-red enriched vs. White
  misc_feature: MA Experiment 20001771 PARAMETER Experiment Name: At_Far-red-enriched-adult_P Parameter: Organism Value: A. thaliana
  misc_feature: MA Experiment 20001771 PARAMETER Experiment Name: At_Far-red-enriched-adult_P Parameter: Plant Line Value: Columbia
  misc_feature: MA Experiment 20001771 PARAMETER Experiment Name: At_Far-red-enriched-adult_P Parameter: Timepoint (hr) Value: 16
  misc_feature: MA Experiment 20001771 PARAMETER Experiment Name: At_Far-red-enriched-adult_P Parameter: Tissue Value: Aerial
aaaaattcaaggctctttggcttcttctttcttctctgcacttgaatcaggttctcattgtttatacactaaaaaaaccttttttgcttactcggtgttgaaaaactgcttctctgtttttaactttggaaagaaaaaagtagaagcttttctcagaatgggttggtcgttgagaatgtggattgtgagtatactcgtgcttacacagctcgttaatggagctctctgttggggagacgctggtcattacgctgtctgcaaaatagctcagagttattttgaggaagatactgtagttgctgtgaagaaacttctgcctgaatctgcaaatggtgagctagcagctgtttgctcatggcctgatgaaatcaaaaagctcccgcaatggcgatggactagtgctttgcattttgctgatacgcctgattacaaatgcaactatgagtactctcgggactgtcctaaagactggtgtgtgacaggggcaatcttcaattacactaaccaactaatgtctacttctgaaaactcacagagtatagtccactataacttaacagaggctctcatgttcttatcacattatatgggagatatccatcagcctttacatgaaggttttattggagatctaggtggtaacaagataaaagttcactggtacaatcaggaaactaatttgcaccgtgtgtgggatgatatgataattgagtctgctctagaaacatactacaattcaagccttccacgcatgattcatgaacttcaagccaaactcaagaacggctggtcaaacgatgtaccttcatgggagtcatgtcaacttaaccaaacggcctgcccaaatccgtatgcttctgaaagcattgatcttgcctgcaagtatgcttacaggaacgccaccgcagggactactttaggagattactatttcgtctctcggttaccggtggtagagaagagacttgcacaaggcggaattcgcttggcagggactcttaaccgaatattttctgcaaaacggaagcttgctagagcatgaaaaaagatccaggagaatcacttgaacatccatgaacactcttatgtattaataatgtgtaatggtagtagttaaggttatggtttggtattgttcctgcgttttaactataataagtatgaaacgaaaactgtacgtct

SEQ ID NO: 30424 - protein, 346 aa, Arabidopsis thaliana
  peptide (1)..(346): Ceres Seq. ID no. 12482671
  misc_feature (54)..(337): Homolog of NCBI NO: 15221343 NR Description: putative bifunctional nuclease
  misc_feature (62)..(337): Homolog of NCBI NO: 34895514 NR Description: putative bifunctional nuclease
  misc_feature (62)..(337): Homolog of NCBI NO: 9558456 NR Description: unnamed protein product [Oryza sativa (japonica
  misc_feature (60)..(337): Homolog of NCBI NO: 4099835 NR Description: bifunctional nuclease [Zinnia elegans]
  misc_feature (88)..(152): Homolog of NCBI NO: 7485717 NR Description: hypothetical protein F18E5.210 - Arabidopsis
  misc_feature (183)..(346): Homolog of NCBI NO: 7485717 NR Description: hypothetical protein F18E5.210 - Arabidopsis
  misc_feature (53)..(344): Homolog of NCBI NO: 22328857 NR Description: expressed protein; protein id: At4g21585.1
  misc_feature (57)..(344): Homolog of NCBI NO: 21593575 NR Description: endonuclease, putative [Arabidopsis thaliana]
  misc_feature (57)..(344): Homolog of NCBI NO: 18415729 NR Description: endonuclease, putative
  misc_feature (53)..(346): Homolog of NCBI NO: 18415727 NR Description: putative bifunctional nuclease
KIQGSLASSFFSALESGSHCLYTKKTFFAYSVLKNCFSVFNFGKKKVEAFLRMGWSLRMWIVSILVLTQLVNGALCWGDAGHYAVCKIAQSYFEEDTVVAVKKLLPESANGELAAVCSWPDEIKKLPQWRWTSALHFADTPDYKCNYEYSRDCPKDWCVTGAIFNYTNQLMSTSENSQSIVHYNLTEALMFLSHYMGDIHQPLHEGFIGDLGGNKIKVHWYNQETNLHRVWDDMIIESALETYYNSSLPRMIHELQAKLKNGWSNDVPSWESCQLNQTACPNPYASESIDLACKYAYRNATAGTTLGDYYFVSRLPVVEKRLAQGGIRLAGTLNRIFSAKRKLARA

SEQ ID NO: 30425 - protein, 294 aa, Arabidopsis thaliana
  peptide (1)..(294): Ceres Seq. ID no. 12482672
  misc_feature (2)..(285): Homolog of NCBI NO: 15221343 NR Description: putative bifunctional nuclease
  misc_feature (10)..(285): Homolog of NCBI NO: 34895514 NR Description: putative bifunctional nuclease
  misc_feature (10)..(285): Homolog of NCBI NO: 9558456 NR Description: unnamed protein product [Oryza sativa (japonica
  misc_feature (8)..(285): Homolog of NCBI NO: 4099835 NR Description: bifunctional nuclease [Zinnia elegans]
  misc_feature (36)..(100): Homolog of NCBI NO: 7485717 NR Description: hypothetical protein F18E5.210 - Arabidopsis
  misc_feature (131)..(294): Homolog of NCBI NO: 7485717 NR Description: hypothetical protein F18E5.210 - Arabidopsis
  misc_feature (1)..(292): Homolog of NCBI NO: 22328857 NR Description: expressed protein; protein id: At4g21585.1
  misc_feature (5)..(292): Homolog of NCBI NO: 21593575 NR Description: endonuclease, putative [Arabidopsis thaliana]
  misc_feature (5)..(292): Homolog of NCBI NO: 18415729 NR Description: endonuclease, putative
  misc_feature (1)..(294): Homolog of NCBI NO: 18415727 NR Description: putative bifunctional nuclease
MGWSLRMWIVSILVLTQLVNGALCWGDAGHYAVCKIAQSYFEEDTVVAVKKLLPESANGELAAVCSWPDEIKKLPQWRWTSALHFADTPDYKCNYEYSRDCPKDWCVTGAIFNYTNQLMSTSENSQSIVHYNLTEALMFLSHYMGDIHQPLHEGFIGDLGGNKIKVHWYNQETNLHRVWDDMIIESALETYYNSSLPRMIHELQAKLKNGWSNDVPSWESCQLNQTACPNPYASESIDLACKYAYRNATAGTTLGDYYFVSRLPVVEKRLAQGGIRLAGTLNRIFSAKRKLARA

SEQ ID NO: 30426 - protein, 288 aa, Arabidopsis thaliana
  peptide (1)..(288): Ceres Seq. ID no. 12482673
  misc_feature (1)..(279): Homolog of NCBI NO: 15221343 NR Description: putative bifunctional nuclease
  misc_feature (4)..(279): Homolog of NCBI NO: 34895514 NR Description: putative bifunctional nuclease
  misc_feature (4)..(279): Homolog of NCBI NO: 9558456 NR Description: unnamed protein product [Oryza sativa (japonica
  misc_feature (2)..(279): Homolog of NCBI NO: 4099835 NR Description: bifunctional nuclease [Zinnia elegans]
  misc_feature (30)..(94): Homolog of NCBI NO: 7485717 NR Description: hypothetical protein F18E5.210 - Arabidopsis
  misc_feature (125)..(288): Homolog of NCBI NO: 7485717 NR Description: hypothetical protein F18E5.210 - Arabidopsis
  misc_feature (1)..(286): Homolog of NCBI NO: 22328857 NR Description: expressed protein; protein id: At4g21585.1
  misc_feature (1)..(286): Homolog of NCBI NO: 21593575 NR Description: endonuclease, putative [Arabidopsis thaliana]
  misc_feature (1)..(286): Homolog of NCBI NO: 18415729 NR Description: endonuclease, putative
  misc_feature (1)..(288): Homolog of NCBI NO: 18415727 NR Description: putative bifunctional nuclease
MWIVSILVLTQLVNGALCWGDAGHYAVCKIAQSYFEEDTVVAVKKLLPESANGELAAVCSWPDEIKKLPQWRWTSALHFADTPDYKCNYEYSRDCPKDWCVTGAIFNYTNQLMSTSENSQSIVHYNLTEALMFLSHYMGDIHQPLHEGFIGDLGGNKIKVHWYNQETNLHRVWDDMIIESALETYYNSSLPRMIHELQAKLKNGWSNDVPSWESCQLNQTACPNPYASESIDLACKYAYRNATAGTTLGDYYFVSRLPVVEKRLAQGGIRLAGTLNRIFSAKRKLARA

SEQ ID NO: 30427 - DNA, 1375 bp, Arabidopsis thaliana
  misc_feature (1)..(1375): Ceres Seq. ID no. 13491061
  misc_feature: MA Experiment ID: 108434 Result: Up-regulated in Transcription
  misc_feature: MA Experiment 108434 PARAMETER Experiment Name: At_Root_Tips_cDNA_P Parameter: Tissue Value: Root Tips
  misc_feature: MA Experiment ID: 108462 Result: Down-regulated in Transcription
  misc_feature: MA Experiment 108462 PARAMETER Experiment Name: At_Germinating_Seeds_cDNA_P Parameter: Age (day) Value: 2 vs. 0
  misc_feature: MA Experiment 108462 PARAMETER Experiment Name: At_Germinating_Seeds_cDNA_P Parameter: Tissue Value: Germinating Seeds
  misc_feature: MA Experiment ID: 108463 Result: Down-regulated in Transcription
  misc_feature: MA Experiment 108463 PARAMETER Experiment Name: At_Germinating_Seeds_cDNA_P Parameter: Age (day) Value: 3 vs. 0
  misc_feature: MA Experiment 108463 PARAMETER Experiment Name: At_Germinating_Seeds_cDNA_P Parameter: Tissue Value: Germinating Seeds
  misc_feature: MA Experiment ID: 108577 Result: Down-regulated in Transcription
  misc_feature: MA Experiment 108577 PARAMETER Experiment Name: At_42deg_Heat_cDNA_P Parameter: Temperature (deg C) Value: 42 vs. 22
  misc_feature: MA Experiment 108577 PARAMETER Experiment Name: At_42deg_Heat_cDNA_P Parameter: Timepoint (hr) Value: 6
  misc_feature: MA Experiment 108577 PARAMETER Experiment Name: At_42deg_Heat_cDNA_P Parameter: Tissue Value: Aerial
  misc_feature: MA Experiment ID: 20000437 Result: Down-regulated in Transcription
  misc_feature: MA Experiment 20000437 PARAMETER Experiment Name: At_Drought_P Parameter: Age (day) Value: 8
  misc_feature: MA Experiment 20000437 PARAMETER Experiment Name: At_Drought_P Parameter: Organism Value: A. thaliana
  misc_feature: MA Experiment 20000437 PARAMETER Experiment Name: At_Drought_P Parameter: Plant Line Value: WS
  misc_feature: MA Experiment 20000437 PARAMETER Experiment Name: At_Drought_P Parameter: Timepoint (hr) Value: 24
  misc_feature: MA Experiment 20000437 PARAMETER Experiment Name: At_Drought_P Parameter: Tissue Value: Whole Plant
  misc_feature: MA Experiment 20000437 PARAMETER Experiment Name: At_Drought_P Parameter: Treatment Value: Drought vs. No Drought
  misc_feature: MA Experiment ID: 20000496 Result: Up-regulated in Transcription
  misc_feature: MA Experiment 20000496 PARAMETER Experiment Name: At_Guard_Cells_P Parameter: Harvest Date Value: 7/19/2002
  misc_feature: MA Experiment 20000496 PARAMETER Experiment Name: At_Guard_Cells_P Parameter: Organism Value: Canola
  misc_feature: MA Experiment 20000496 PARAMETER Experiment Name: At_Guard_Cells_P Parameter: Tissue Value: Guard Cells vs. Leaves
  misc_feature: MA Experiment ID: 20001905 Result: Down-regulated in Transcription
  misc_feature: MA Experiment 20001905 PARAMETER Experiment Name: At_Drought_Reproduction_P Parameter: Age (day) Value: 40
  misc_feature: MA Experiment 20001905 PARAMETER Experiment Name: At_Drought_Reproduction_P Parameter: Organism Value: A. thaliana
  misc_feature: MA Experiment 20001905 PARAMETER Experiment Name: At_Drought_Reproduction_P Parameter: Plant Line Value: WS
  misc_feature: MA Experiment 20001905 PARAMETER Experiment Name: At_Drought_Reproduction_P Parameter: Timepoint (day) Value: 10
  misc_feature: MA Experiment 20001905 PARAMETER Experiment Name: At_Drought_Reproduction_P Parameter: Tissue Value: Rosettes
  misc_feature: MA Experiment 20001905 PARAMETER Experiment Name: At_Drought_Reproduction_P Parameter: Treatment Value: Drought vs. No Drought
aaaaaactaaacacaaaaatagaaaatatcgaaaatgagatgagagagagaggaggagtctctcatcgtgagtagggcttttgactccctccctactttgcctacttcttcttcttcctctgtggccactctacacagtccacacctacttcaagacacctttctcatccttgagatcggcgtcagatcctccgccgcttctcctcttcactatctccgtgttaaagatgatggaatctggcgctggtttcgtggccatggaagagaggatctctcctggaagtttcttccagtatcctctttctggattccgtgcttctcctaatcgatccccttgtcctccctctgatcgtgaaaggtacttgactgaattattgcaagagagacaaaagttgggtccctttttgcaagttatgccaaattgctgcagactgcttaatcatgaaatcaggagggtctctagttttcctgatcttgatagatatgagcatggcagtccatttagatcgcttggtcagccgacaaatggaaagcttgatttagagggatggtcgatgatgcaagccgaggaaaactgtcacctccagagagcttctccatttcgcggtccttccccagtgggctggattgggatgccgggactccctaacccacccattgtgaaaaaagtgattagacttgatgtcccagtggataaatatccaagctataattttgttgggaggattcttgggccacgtggaaactccctaaaaagagttgagctagcaacccactgcagggtgtttatcagaggacgaggatctgtgaaggatactgtcaaggaggaaaaattaaaaggtaagccagggtacgagcatctctgcgagccactacatgtactgatcgaggccgagcttccagaagacataataaactctcgattggagcatgcagtgcatttcctggaatcactcctgaagccgatggacgagtcaatggatcactacaagagggaacagctgaaggagttagcggctttgaatggtacactaagggaggagagtccgagtccgagcttgagcccttgtttgagccccagcatgtcccctttcaacagcaagcgtgctaagacagagatatgatcaagagaaaccactagtgcatgggtcttgtgggcaggatcatgagtttgctaagttctaacgtttggactcttgaattaatttattttgtcattaactttattctttatttttgttggttagctgagatgaccattaaccagtgggtaataaactaataatggtgtttatgaaattgtaatctccttctcaatcattgtaacctttatttaagttttaaaccccaaacgtttatttcattttaagttttg

SEQ ID NO: 30428 - protein, 298 aa, Arabidopsis thaliana
  peptide (1)..(298): Ceres Seq. ID no. 13491062
  misc_feature (150)..(205): Pfam Name: KH domain Pfam Description: KH domain
  misc_feature (41)..(296): Homolog of NCBI NO: 15241136 NR Description: KH domain protein [Arabidopsis thaliana]
  misc_feature (30)..(296): Homolog of NCBI NO: 15224909 NR Description: KH domain protein [Arabidopsis thaliana]
  misc_feature (41)..(296): Homolog of NCBI NO: 19424087 NR Description: putative RNA-binding protein [Arabidopsis
  misc_feature (31)..(295): Homolog of NCBI NO: 34900448 NR Description: contains EST C27129(C51039)~similar to
  misc_feature (4)..(296): Homolog of NCBI NO: 20268733 NR Description: unknown protein [Arabidopsis thaliana]
  misc_feature (4)..(296): Homolog of NCBI NO: 15236738 NR Description: KH domain protein [Arabidopsis thaliana]
  misc_feature (62)..(296): Homolog of NCBI NO: 34907446 NR Description: P0434C04.5 [Oryza sativa (japonica
  misc_feature (136)..(298): Homolog of NCBI NO: 25402559 NR Description: hypothetical protein [imported] - Arabidopsis
  misc_feature (1)..(298): Homolog of NCBI NO: 16930473 NR Description: At1g09660/F21M12_5 [Arabidopsis thaliana]
  misc_feature (1)..(298): Homolog of NCBI NO: 22329449 NR Description: KH domain quaking protein, putative [Arabidopsis
MMESGAGFVAMEERISPGSFFQYPLSGFRASPNRSPCPPSDRERYLTELLQERQKLGPFLQVMPNCCRLLNHEIRRVSSFPDLDRYEHGSPFRSLGQPTNGKLDLEGWSMMQAEENCHLQRASPFRGPSPVGWIGMPGLPNPPIVKKVIRLDVPVDKYPSYNFVGRILGPRGNSLKRVELATHCRVFIRGRGSVKDTVKEEKLKGKPGYEHLCEPLHVLIEAELPEDIINSRLEHAVHFLESLLKPMDESMDHYKREQLKELAALNGTLREESPSPSLSPCLSPSMSPFNSKRAKTEI

SEQ ID NO: 30429 - protein, 297 aa, Arabidopsis thaliana
  peptide (1)..(297): Ceres Seq. ID no. 13491063
  misc_feature (149)..(204): Pfam Name: KH domain Pfam Description: KH domain
  misc_feature (40)..(295): Homolog of NCBI NO: 15241136 NR Description: KH domain protein [Arabidopsis thaliana]
  misc_feature (29)..(295): Homolog of NCBI NO: 15224909 NR Description: KH domain protein [Arabidopsis thaliana]
  misc_feature (40)..(295): Homolog of NCBI NO: 19424087 NR Description: putative RNA-binding protein [Arabidopsis
  misc_feature (30)..(294): Homolog of NCBI NO: 34900448 NR Description: contains EST C27129(C51039)~similar to
  misc_feature (3)..(295): Homolog of NCBI NO: 20268733 NR Description: unknown protein [Arabidopsis thaliana]
  misc_feature (3)..(295): Homolog of NCBI NO: 15236738 NR Description: KH domain protein [Arabidopsis thaliana]
  misc_feature (61)..(295): Homolog of NCBI NO: 34907446 NR Description: P0434C04.5 [Oryza sativa (japonica
  misc_feature (135)..(297): Homolog of NCBI NO: 25402559 NR Description: hypothetical protein [imported] - Arabidopsis
  misc_feature (1)..(297): Homolog of NCBI NO: 16930473 NR Description: At1g09660/F21M12_5 [Arabidopsis thaliana]
  misc_feature (1)..(297): Homolog of NCBI NO: 22329449 NR Description: KH domain quaking protein, putative [Arabidopsis
MESGAGFVAMEERISPGSFFQYPLSGFRASPNRSPCPPSDRERYLTELLQERQKLGPFLQVMPNCCRLLNHEIRRVSSFPDLDRYEHGSPFRSLGQPTNGKLDLEGWSMMQAEENCHLQRASPFRGPSPVGWIGMPGLPNPPIVKKVIRLDVPVDKYPSYNFVGRILGPRGNSLKRVELATHCRVFIRGRGSVKDTVKEEKLKGKPGYEHLCEPLHVLIEAELPEDIINSRLEHAVHFLESLLKPMDESMDHYKREQLKELAALNGTLREESPSPSLSPCLSPSMSPFNSKRAKTEI

SEQ ID NO: 30430 - protein, 288 aa, Arabidopsis thaliana
  peptide (1)..(288): Ceres Seq. ID no. 13491064
  misc_feature (140)..(195): Pfam Name: KH domain Pfam Description: KH domain
  misc_feature (31)..(286): Homolog of NCBI NO: 15241136 NR Description: KH domain protein [Arabidopsis thaliana]
  misc_feature (20)..(286): Homolog of NCBI NO: 15224909 NR Description: KH domain protein [Arabidopsis thaliana]
  misc_feature (31)..(286): Homolog of NCBI NO: 19424087 NR Description: putative RNA-binding protein [Arabidopsis
  misc_feature (21)..(285): Homolog of NCBI NO: 34900448 NR Description: contains EST C27129(C51039)~similar to
  misc_feature (1)..(286): Homolog of NCBI NO: 20268733 NR Description: unknown protein [Arabidopsis thaliana]
  misc_feature (1)..(286): Homolog of NCBI NO: 15236738 NR Description: KH domain protein [Arabidopsis thaliana]
  misc_feature (52)..(286): Homolog of NCBI NO: 34907446 NR Description: P0434C04.5 [Oryza sativa (japonica
  misc_feature (126)..(288): Homolog of NCBI NO: 25402559 NR Description: hypothetical protein [imported] - Arabidopsis
  misc_feature (1)..(288): Homolog of NCBI NO: 16930473 NR Description: At1g09660/F21M12_5 [Arabidopsis thaliana]
  misc_feature (1)..(288): Homolog of NCBI NO: 22329449 NR Description: KH domain quaking protein, putative [Arabidopsis
MEERISPGSFFQYPLSGFRASPNRSPCPPSDRERYLTELLQERQKLGPFLQVMPNCCRLLNHEIRRVSSFPDLDRYEHGSPFRSLGQPTNGKLDLEGWSMMQAEENCHLQRASPFRGPSPVGWIGMPGLPNPPIVKKVIRLDVPVDKYPSYNFVGRILGPRGNSLKRVELATHCRVFIRGRGSVKDTVKEEKLKGKPGYEHLCEPLHVLIEAELPEDIINSRLEHAVHFLESLLKPMDESMDHYKREQLKELAALNGTLREESPSPSLSPCLSPSMSPFNSKRAKTEI

SEQ ID NO: 30431 - DNA, 1358 bp, Arabidopsis thaliana
  misc_feature (1)..(1358): Ceres Seq. ID no. 12423111
  misc_feature: MA Experiment ID: 108434 Result: Down-regulated in Transcription
  misc_feature: MA Experiment 108434 PARAMETER Experiment Name: At_Root_Tips_cDNA_P Parameter: Tissue Value: Root Tips
  misc_feature: MA Experiment ID: 108488 Result: Down-regulated in Transcription
  misc_feature: MA Experiment ID: 20000111 Result: Down-regulated in Transcription
  misc_feature: MA Experiment 20000111 PARAMETER Experiment Name: At_42deg_Heat_cDNA_P Parameter: Temperature (deg C) Value: 42 vs. 22
  misc_feature: MA Experiment 20000111 PARAMETER Experiment Name: At_42deg_Heat_cDNA_P Parameter: Timepoint (hr) Value: 6
  misc_feature: MA Experiment 20000111 PARAMETER Experiment Name: At_42deg_Heat_cDNA_P Parameter: Tissue Value: Aerial
  misc_feature: MA Experiment ID: 20000171 Result: Down-regulated in Transcription
  misc_feature: MA Experiment 20000171 PARAMETER Experiment Name: At_42deg_Heat_P Parameter: Age (day) Value: 14
  misc_feature: MA Experiment 20000171 PARAMETER Experiment Name: At_42deg_Heat_P Parameter: Organism Value: A. thaliana
  misc_feature: MA Experiment 20000171 PARAMETER Experiment Name: At_42deg_Heat_P Parameter: Plant Line Value: WS
  misc_feature: MA Experiment 20000171 PARAMETER Experiment Name: At_42deg_Heat_P Parameter: Temperature (deg C) Value: 42 vs. 22
  misc_feature: MA Experiment 20000171 PARAMETER Experiment Name: At_42deg_Heat_P Parameter: Timepoint (hr) Value: 1
  misc_feature: MA Experiment 20000171 PARAMETER Experiment Name: At_42deg_Heat_P Parameter: Tissue Value: Aerial
  misc_feature: MA Experiment ID: 20000173 Result: Down-regulated in Transcription
  misc_feature: MA Experiment 20000173 PARAMETER Experiment Name: At_42deg_Heat_P Parameter: Age (day) Value: 14
  misc_feature: MA Experiment 20000173 PARAMETER Experiment Name: At_42deg_Heat_P Parameter: Organism Value: A. thaliana
  misc_feature: MA Experiment 20000173 PARAMETER Experiment Name: At_42deg_Heat_P Parameter: Plant Line Value: WS
  misc_feature: MA Experiment 20000173 PARAMETER Experiment Name: At_42deg_Heat_P Parameter: Temperature (deg C) Value: 42 vs. 22
  misc_feature: MA Experiment 20000173 PARAMETER Experiment Name: At_42deg_Heat_P Parameter: Timepoint (hr) Value: 6
  misc_feature: MA Experiment 20000173 PARAMETER Experiment Name: At_42deg_Heat_P Parameter: Tissue Value: Aerial
  misc_feature: MA Experiment ID: 20000182 Result: Up-regulated in Transcription
  misc_feature: MA Experiment 20000182 PARAMETER Experiment Name: At_2mM_SA_P Parameter: Age (day) Value: 14
  misc_feature: MA Experiment 20000182 PARAMETER Experiment Name: At_2mM_SA_P Parameter: Organism Value: A. thaliana
  misc_feature: MA Experiment 20000182 PARAMETER Experiment Name: At_2mM_SA_P Parameter: Plant Line Value: WS
  misc_feature: MA Experiment 20000182 PARAMETER Experiment Name: At_2mM_SA_P Parameter: Timepoint (hr) Value: 6
  misc_feature: MA Experiment 20000182 PARAMETER Experiment Name: At_2mM_SA_P Parameter: Tissue Value: Aerial
  misc_feature: MA Experiment 20000182 PARAMETER Experiment Name: At_2mM_SA_P Parameter: Treatment Value: 2mM SA vs. No Treatment
  misc_feature: MA Experiment ID: 20000184 Result: Down-regulated in Transcription
  misc_feature: MA Experiment 20000184 PARAMETER Experiment Name: At_Shoots__P Parameter: Age (day) Value: 7
  misc_feature: MA Experiment 20000184 PARAMETER Experiment Name: At_Shoots__P Parameter: Tissue Value: Shoots vs. Whole Plant
  misc_feature: MA Experiment ID: 20000234 Result: Down-regulated in Transcription
  misc_feature: MA Experiment 20000234 PARAMETER Experiment Name: At_Siliques_P Parameter: Age (day) Value: 21
  misc_feature: MA Experiment 20000234 PARAMETER Experiment Name: At_Siliques_P Parameter: Organism Value: A. thaliana
  misc_feature: MA Experiment 20000234 PARAMETER Experiment Name: At_Siliques_P Parameter: Plant Line Value: WS
  misc_feature: MA Experiment 20000234 PARAMETER Experiment Name: At_Siliques_P Parameter: Tissue Value: Less Than 5mm Siliques vs. Whole Plant
  misc_feature: MA Experiment ID: 20000264 Result: Down-regulated in Transcription
  misc_feature: MA Experiment 20000264 PARAMETER Experiment Name: At_Open_Flower_P Parameter: Age (day) Value: 21
  misc_feature: MA Experiment 20000264 PARAMETER Experiment Name: At_Open_Flower_P Parameter: Plant Line Value: WS
  misc_feature: MA Experiment 20000264 PARAMETER Experiment Name: At_Open_Flower_P Parameter: Tissue Value: Open Flower vs. Whole Plant
  misc_feature: MA Experiment ID: 20000265 Result: Down-regulated in Transcription
  misc_feature: MA Experiment 20000265 PARAMETER Experiment Name: At_Open_Flower_P Parameter: Age (day) Value: 21
  misc_feature: MA Experiment 20000265 PARAMETER Experiment Name: At_Open_Flower_P Parameter: Plant Line Value: WS
  misc_feature: MA Experiment 20000265 PARAMETER Experiment Name: At_Open_Flower_P Parameter: Tissue Value: Closed Flower vs. Whole Plant
  misc_feature: MA Experiment ID: 20000286 Result: Down-regulated in Transcription
  misc_feature: MA Experiment 20000286 PARAMETER Experiment Name: At_Open_Flower_P Parameter: Age (day) Value: 21
  misc_feature: MA Experiment 20000286 PARAMETER Experiment Name: At_Open_Flower_P Parameter: Plant Line Value: WS
  misc_feature: MA Experiment 20000286 PARAMETER Experiment Name: At_Open_Flower_P Parameter: Tissue Value: Half Open vs. Whole Plant
  misc_feature: MA Experiment ID: 20000438 Result: Down-regulated in Transcription
  misc_feature: MA Experiment 20000438 PARAMETER Experiment Name: At_Shoots__P Parameter: Age (day) Value: 14
  misc_feature: MA Experiment 20000438 PARAMETER Experiment Name: At_Shoots__P Parameter: Tissue Value: Shoots vs. Whole Plant
  misc_feature: MA Experiment ID: 20000452 Result: Up-regulated in Transcription
  misc_feature: MA Experiment 20000452 PARAMETER Experiment Name: At_CS6879_Shoots-Roots_P Parameter: Age (day) Value: 14
  misc_feature: MA Experiment 20000452 PARAMETER Experiment Name: At_CS6879_Shoots-Roots_P Parameter: Organism Value: A. thaliana
  misc_feature: MA Experiment 20000452 PARAMETER Experiment Name: At_CS6879_Shoots-Roots_P Parameter: Plant Line Value: CS6879 vs. WS
  misc_feature: MA Experiment 20000452 PARAMETER Experiment Name: At_CS6879_Shoots-Roots_P Parameter: Tissue Value: Shoots
  misc_feature: MA Experiment ID: 20000495 Result: Down-regulated in Transcription
  misc_feature: MA Experiment 20000495 PARAMETER Experiment Name: At_Guard_Cells_P Parameter: Harvest Date Value: 8/2/2002
  misc_feature: MA Experiment 20000495 PARAMETER Experiment Name: At_Guard_Cells_P Parameter: Organism Value: A. thaliana
  misc_feature: MA Experiment 20000495 PARAMETER Experiment Name: At_Guard_Cells_P Parameter: Tissue Value: Guard Cells vs. Leaves
  misc_feature: MA Experiment ID: 20000496 Result: Down-regulated in Transcription
  misc_feature: MA Experiment 20000496 PARAMETER Experiment Name: At_Guard_Cells_P Parameter: Harvest Date Value: 7/19/2002
  misc_feature: MA Experiment 20000496 PARAMETER Experiment Name: At_Guard_Cells_P Parameter: Organism Value: Canola
  misc_feature: MA Experiment 20000496 PARAMETER Experiment Name: At_Guard_Cells_P Parameter: Tissue Value: Guard Cells vs. Leaves
  misc_feature: MA Experiment ID: 20000794 Result: Down-regulated in Transcription
  misc_feature: MA Experiment 20000794 PARAMETER Experiment Name: At_Petals_P Parameter: Age (day) Value: 23-25 days
  misc_feature: MA Experiment 20000794 PARAMETER Experiment Name: At_Petals_P Parameter: Plant Line Value: WS
  misc_feature: MA Experiment 20000794 PARAMETER Experiment Name: At_Petals_P Parameter: Tissue Value: Petals vs. Whole plant
  misc_feature: MA Experiment ID: 20001451 Result: Up-regulated in Transcription
  misc_feature: MA Experiment 20001451 PARAMETER Experiment Name: At_Far-red-induction_P Parameter: Age (day) Value: 7
  misc_feature: MA Experiment 20001451 PARAMETER Experiment Name: At_Far-red-induction_P Parameter: Light Value: Far-red vs. White
  misc_feature: MA Experiment 20001451 PARAMETER Experiment Name: At_Far-red-induction_P Parameter: Organism Value: A. thaliana
  misc_feature: MA Experiment 20001451 PARAMETER Experiment Name: At_Far-red-induction_P Parameter: Plant Line Value: Columbia
  misc_feature: MA Experiment 20001451 PARAMETER Experiment Name: At_Far-red-induction_P Parameter: Timepoint (hr) Value: 24
  misc_feature: MA Experiment 20001451 PARAMETER Experiment Name: At_Far-red-induction_P Parameter: Tissue Value: Whole Plant
  misc_feature: MA Experiment ID: 20001556 Result: Down-regulated in Transcription
  misc_feature: MA Experiment 20001556 PARAMETER Experiment Name: At_Drought_Soil_Dry_P Parameter: Age (day) Value: 26
  misc_feature: MA Experiment 20001556 PARAMETER Experiment Name: At_Drought_Soil_Dry_P Parameter: Organism Value: A. thaliana
  misc_feature: MA Experiment 20001556 PARAMETER Experiment Name: At_Drought_Soil_Dry_P Parameter: Plant Line Value: WS
  misc_feature: MA Experiment 20001556 PARAMETER Experiment Name: At_Drought_Soil_Dry_P Parameter: Post Timepoint (hr) Value: None
  misc_feature: MA Experiment 20001556 PARAMETER Experiment Name: At_Drought_Soil_Dry_P Parameter: Post-Treatment Value: None
  misc_feature: MA Experiment 20001556 PARAMETER Experiment Name: At_Drought_Soil_Dry_P Parameter: Timepoint (day) Value: 12
  misc_feature: MA Experiment 20001556 PARAMETER Experiment Name: At_Drought_Soil_Dry_P Parameter: Treatment Value: Drought vs. No Drought
  misc_feature: MA Experiment ID: 20001557 Result: Down-regulated in Transcription
  misc_feature: MA Experiment 20001557 PARAMETER Experiment Name: At_Drought_Soil_Dry_P Parameter: Age (day) Value: 27
  misc_feature: MA Experiment 20001557 PARAMETER Experiment Name: At_Drought_Soil_Dry_P Parameter: Organism Value: A. thaliana
  misc_feature: MA Experiment 20001557 PARAMETER Experiment Name: At_Drought_Soil_Dry_P Parameter: Plant Line Value: WS
  misc_feature: MA Experiment 20001557 PARAMETER Experiment Name: At_Drought_Soil_Dry_P Parameter: Post Timepoint (hr) Value: 3
  misc_feature: MA Experiment 20001557 PARAMETER Experiment Name: At_Drought_Soil_Dry_P Parameter: Post-Treatment Value: Re-Water vs. No Drought
  misc_feature: MA Experiment 20001557 PARAMETER Experiment Name: At_Drought_Soil_Dry_P Parameter: Timepoint (day) Value: 13
  misc_feature: MA Experiment 20001557 PARAMETER Experiment Name: At_Drought_Soil_Dry_P Parameter: Treatment Value: Drought vs. No Drought
  misc_feature: MA Experiment ID: 20001558 Result: Down-regulated in Transcription
  misc_feature: MA Experiment 20001558 PARAMETER Experiment Name: At_Drought_Soil_Dry_P Parameter: Age (day) Value: 27
  misc_feature: MA Experiment 20001558 PARAMETER Experiment Name: At_Drought_Soil_Dry_P Parameter: Organism Value: A. thaliana
  misc_feature: MA Experiment 20001558 PARAMETER Experiment Name: At_Drought_Soil_Dry_P Parameter: Plant Line Value: WS
  misc_feature: MA Experiment 20001558 PARAMETER Experiment Name: At_Drought_Soil_Dry_P Parameter: Post Timepoint (hr) Value: 6
  misc_feature: MA Experiment 20001558 PARAMETER Experiment Name: At_Drought_Soil_Dry_P Parameter: Post-Treatment Value: Re-Water vs. No Drought
  misc_feature: MA Experiment 20001558 PARAMETER Experiment Name: At_Drought_Soil_Dry_P Parameter: Timepoint (day) Value: 13
  misc_feature: MA Experiment 20001558 PARAMETER Experiment Name: At_Drought_Soil_Dry_P Parameter: Treatment Value: Drought vs. No Drought
  misc_feature: MA Experiment ID: 20001757 Result: Down-regulated in Transcription
  misc_feature: MA Experiment 20001757 PARAMETER Experiment Name: At_50mM_NH4NO3_L-to-H_P Parameter: Timepoint (hr) Value: 6
  misc_feature: MA Experiment 20001757 PARAMETER Experiment Name: At_50mM_NH4NO3_L-to-H_P Parameter: Tissue Value: Leaf
  misc_feature: MA Experiment 20001757 PARAMETER Experiment Name: At_50mM_NH4NO3_L-to-H_P Parameter: Treatment Value: 50mM NH4NO3 vs 100mM Mannitol
aaaaaaacccttctctgcttattatcaaaattctctctttttcccaaaaagattcacaaatttgttgtagtctcgccgttaagatggcgccggcgacggagcatcagagctcgttcttgagtcgactaagccgtcgcaatcaagtggtttccatggaggttaaccacgagcaagagcaagaagaactcgaagattttcaaaaacacgtagctgaacgtttcgcggagctcttaccaccgtcggattcgccggaatcttacccgattctttcgatccagtggctaaggaagcttcttgatgttttcatgtctatagaatcggagtttcattcggttttaacatcgaatccgtctcagatctcgaaacctccgttggataagcttgtaccggagatgcttgatcggattgttaaagctcttgatatttgtaccgccgtagtcaacggcgttgactcagtcagacaaatccaacgttgtgcggagattgctgttacggcgttgaaacaaacgccgttaagtgacggaagcgttaggagagctaaaagagctcttacaagcctcctcgccgctttaaacgctgataaaaacagcggtagcagcggcggaggaagtggtaggaggtcatcgacggatcagtggtcgtcgtttggtcgacgtagcggcggaagcagcggaggaggaggaggaggagcagggtgtgtgagtaagaattggtcagcggcgaagcagattcaagcaatgacggcgaatcttgtagcgccacgtggaggagaggcgtcgccgatgtatataatgagtagtgtgatggtaatggtgatgtggacgttagttgtagcggttccttgtcagacaagtaacggcttaatggttcatgtaccgctgccgaagaatcaggtatgggctagcgcggccgtgagtatctcggagagggtcggagaagagatgaaacggaaggagacgcgtggtggtggactgatggaggagatgcagaggatggagaggatctggttgaagctgatggagttcagtgaagggtttaggtttaatggggaggaggatgtggtggcggaagtggcggagatggaggagatttgccggaaaatggaagatgggcttgaggggttacagagaagagttagagaagtgtttcataggttggtgaaaagcagaagtgagatacttgaagtgattgatcactgattgtaatcttttaactttgttgttgtgaaaatttaatctttgagttaactcttttgattaagaaaagagaacaaattacaggttttttttgttttatttatgtgataatctttgatgtatataaattacaattcgtaattaaagaaagataatgtatgc

SEQ ID NO: 30432 - protein, 398 aa, Arabidopsis thaliana
  peptide (1)..(398): Ceres Seq. ID no. 12423112
  misc_feature (29)..(396): Pfam Name: Protein of unknown function (DUF793) Pfam Description: Protein of unknown function (DUF793)
  misc_feature (30)..(381): Homolog of NCBI NO: 18410617 NR Description: expressed protein
  misc_feature (30)..(381): Homolog of NCBI NO: 21536674 NR Description: unknown [Arabidopsis thaliana]
  misc_feature (30)..(394): Homolog of NCBI NO: 15218428 NR Description: hypothetical protein; protein id: At1g43630.1
  misc_feature (29)..(396): Homolog of NCBI NO: 38345505 NR Description: OSJNBa0039K24.3 [Oryza sativa (japonica
  misc_feature (30)..(394): Homolog of NCBI NO: 21593634 NR Description: unknown [Arabidopsis thaliana]
  misc_feature (30)..(394): Homolog of NCBI NO: 18394649 NR Description: expressed protein
  misc_feature (28)..(294): Homolog of NCBI NO: 15222577 NR Description: hypothetical protein; protein id: At1g63930.1
  misc_feature (28)..(397): Homolog of NCBI NO: 15236522 NR Description: putative protein
  misc_feature (28)..(398): Homolog of NCBI NO: 15237130 NR Description: putative protein
  misc_feature (28)..(398): Homolog of NCBI NO: 21553882 NR Description: unknown [Arabidopsis thaliana]
KNPSLLIIKILSFSQKDSQICCSLAVKMAPATEHQSSFLSRLSRRNQVVSMEVNHEQEQEELEDFQKHVAERFAELLPPSDSPESYPILSIQWLRKLLDVFMSIESEFHSVLTSNPSQISKPPLDKLVPEMLDRIVKALDICTAVVNGVDSVRQIQRCAEIAVTALKQTPLSDGSVRRAKRALTSLLAALNADKNSGSSGGGSGRRSSTDQWSSFGRRSGGSSGGGGGGAGCVSKNWSAAKQIQAMTANLVAPRGGEASPMYIMSSVMVMVMWTLVVAVPCQTSNGLMVHVPLPKNQVWASAAVSISERVGEEMKRKETRGGGLMEEMQRMERIWLKLMEFSEGFRFNGEEDVVAEVAEMEEICRKMEDGLEGLQRRVREVFHRLVKSRSEILEVIDH

SEQ ID NO: 30433 - protein, 371 aa, Arabidopsis thaliana
  peptide (1)..(371): Ceres Seq. ID no. 12423113
  misc_feature (2)..(369): Pfam Name: Protein of unknown function (DUF793) Pfam Description: Protein of unknown function (DUF793)
  misc_feature (3)..(354): Homolog of NCBI NO: 18410617 NR Description: expressed protein
  misc_feature (3)..(354): Homolog of NCBI NO: 21536674 NR Description: unknown [Arabidopsis thaliana]
  misc_feature (3)..(367): Homolog of NCBI NO: 15218428 NR Description: hypothetical protein; protein id: At1g43630.1
  misc_feature (2)..(369): Homolog of NCBI NO: 38345505 NR Description: OSJNBa0039K24.3 [Oryza sativa (japonica
  misc_feature (3)..(367): Homolog of NCBI NO: 21593634 NR Description: unknown [Arabidopsis thaliana]
  misc_feature (3)..(367): Homolog of NCBI NO: 18394649 NR Description: expressed protein
  misc_feature (1)..(267): Homolog of NCBI NO: 15222577 NR Description: hypothetical protein; protein id: At1g63930.1
  misc_feature (1)..(370): Homolog of NCBI NO: 15236522 NR Description: putative protein
  misc_feature (1)..(371): Homolog of NCBI NO: 15237130 NR Description: putative protein
  misc_feature (1)..(371): Homolog of NCBI NO: 21553882 NR Description: unknown [Arabidopsis thaliana]
MAPATEHQSSFLSRLSRRNQVVSMEVNHEQEQEELEDFQKHVAERFAELLPPSDSPESYPILSIQWLRKLLDVFMSIESEFHSVLTSNPSQISKPPLDKLVPEMLDRIVKALDICTAVVNGVDSVRQIQRCAEIAVTALKQTPLSDGSVRRAKRALTSLLAALNADKNSGSSGGGSGRRSSTDQWSSFGRRSGGSSGGGGGGAGCVSKNWSAAKQIQAMTANLVAPRGGEASPMYIMSSVMVMVMWTLVVAVPCQTSNGLMVHVPLPKNQVWASAAVSISERVGEEMKRKETRGGGLMEEMQRMERIWLKLMEFSEGFRFNGEEDVVAEVAEMEEICRKMEDGLEGLQRRVREVFHRLVKSRSEILEVIDH

SEQ ID NO: 30434 - protein, 348 aa, Arabidopsis thaliana
  peptide (1)..(348): Ceres Seq. ID no. 12423114
  misc_feature (1)..(346): Pfam Name: Protein of unknown function (DUF793) Pfam Description: Protein of unknown function (DUF793)
  misc_feature (1)..(331): Homolog of NCBI NO: 18410617 NR Description: expressed protein
  misc_feature (1)..(331): Homolog of NCBI NO: 21536674 NR Description: unknown [Arabidopsis thaliana]
  misc_feature (1)..(344): Homolog of NCBI NO: 15218428 NR Description: hypothetical protein; protein id: At1g43630.1
  misc_feature (1)..(346): Homolog of NCBI NO: 38345505 NR Description: OSJNBa0039K24.3 [Oryza sativa (japonica
  misc_feature (1)..(344): Homolog of NCBI NO: 21593634 NR Description: unknown [Arabidopsis thaliana]
  misc_feature (1)..(344): Homolog of NCBI NO: 18394649 NR Description: expressed protein
  misc_feature (1)..(244): Homolog of NCBI NO: 15222577 NR Description: hypothetical protein; protein id: At1g63930.1
  misc_feature (1)..(347): Homolog of NCBI NO: 15236522 NR Description: putative protein
  misc_feature (1)..(348): Homolog of NCBI NO: 15237130 NR Description: putative protein
  misc_feature (1)..(348): Homolog of NCBI NO: 21553882 NR Description: unknown [Arabidopsis thaliana]
MEVNHEQEQEELEDFQKHVAERFAELLPPSDSPESYPILSIQWLRKLLDVFMSIESEFHSVLTSNPSQISKPPLDKLVPEMLDRIVKALDICTAVVNGVDSVRQIQRCAEIAVTALKQTPLSDGSVRRAKRALTSLLAALNADKNSGSSGGGSGRRSSTDQWSSFGRRSGGSSGGGGGGAGCVSKNWSAAKQIQAMTANLVAPRGGEASPMYIMSSVMVMVMWTLVVAVPCQTSNGLMVHVPLPKNQVWASAAVSISERVGEEMKRKETRGGGLMEEMQRMERIWLKLMEFSEGFRFNGEEDVVAEVAEMEEICRKMEDGLEGLQRRVREVFHRLVKSRSEILEVIDH

SEQ ID NO: 30435 - DNA, 711 bp, Arabidopsis thaliana
  misc_feature (1)..(711): Ceres Seq. ID no. 12482108
  misc_feature: MA Experiment ID: 108462 Result: Down-regulated in Transcription
  misc_feature: MA Experiment 108462 PARAMETER Experiment Name: At_Germinating_Seeds_cDNA_P Parameter: Age (day) Value: 2 vs. 0
  misc_feature: MA Experiment 108462 PARAMETER Experiment Name: At_Germinating_Seeds_cDNA_P Parameter: Tissue Value: Germinating Seeds
  misc_feature: MA Experiment ID: 20000227 Result: Down-regulated in Transcription
  misc_feature: MA Experiment 20000227 PARAMETER Experiment Name: At_Root-Tips-vs-Tops_P Parameter: Tissue Value: Root Tips vs. Root Tops
aaacccatttagcttttgacttgtgttgttcttcgtcgctctgtcttaatattccctcaccaactcgtttcatttggggacaagcttcttcgattttcctctcagaccaatcgggctttcgaatcccatcagtagaaatggctacatcaaggttccaagcattcttgaacagtcccattggcccaaaaacaactcatttctgggggcctatcgctaattggggttttgttgctgctggtttggtggatatgcaaaagccccctgaaatgatttctggaaacatgtcgtcagctatgtgcgtttactctgcattgttcatgaggtttgcctggatggtgcaaccacgtaactatttgctacttgcgtgccatgcatcaaacgagactgtacaactctatcagctctcacgttgggctagagcccaggggtatttatcctccaagaaagaagaggagaaaccatctcagtaaaccaaaatgaggaaaggtttcttcaacgctgcttcagaatttgttcgtgggaattactgaatccatccatttgattttctttcgaaacgtgttttgtattgtgtccccaagctatggttgctttacttgttggatcattcactaacattatatcctttgttttcataagtaaccgcttgtaataaaatttgggaccagtcgtcattccacattcgtgttcacacaaaaaaggggttcaaac

SEQ ID NO: 30436 - protein, 155 aa, Arabidopsis thaliana
  peptide (1)..(155): Ceres Seq. ID no. 12482109
  misc_feature (46)..(155): Pfam Name: Uncharacterised protein family (UPF0041) Pfam Description: Uncharacterised protein family (UPF0041)
  misc_feature (63)..(137): Homolog of NCBI NO: 37546581 NR Description: similar to ENSANGP00000015797 [Homo sapiens]
  misc_feature (63)..(136): Homolog of NCBI NO: 12852283 NR Description: unnamed protein product [Mus musculus]
  misc_feature (63)..(144): Homolog of NCBI NO: 39591631 NR Description: Hypothetical protein CBG18071 [Caenorhabditis
  misc_feature (63)..(144): Homolog of NCBI NO: 17554512 NR Description: Uncharacterised protein family (UPF0041)
  misc_feature (63)..(136): Homolog of NCBI NO: 12852262 NR Description: unnamed protein product [Mus musculus]
  misc_feature (63)..(136): Homolog of NCBI NO: 9055178 NR Description: brain protein 44-like; apoptosis-regulating basic
  misc_feature (63)..(136): Homolog of NCBI NO: 7706369 NR Description: brain protein 44-like; HSPC040 protein [Homo
  misc_feature (63)..(136): Homolog of NCBI NO: 4929727 NR Description: CGI-129 protein [Homo sapiens]
  misc_feature (43)..(133): Homolog of NCBI NO: 19075237 NR Description: conserved hypothetical protein
  misc_feature (46)..(155): Homolog of NCBI NO: 15241266 NR Description: putative protein
THLAFDLCCSSSLCLNIPSPTRFIWGQASSIFLSDQSGFRIPSVEMATSRFQAFLNSPIGPKTTHFWGPIANWGFVAAGLVDMQKPPEMISGNMSSAMCVYSALFMRFAWMVQPRNYLLLACHASNETVQLYQLSRWARAQGYLSSKKEEEKPSQ

SEQ ID NO: 30437 - protein, 110 aa, Arabidopsis thaliana
  peptide (1)..(110): Ceres Seq. ID no. 12482110
  misc_feature (1)..(110): Pfam Name: Uncharacterised protein family (UPF0041) Pfam Description: Uncharacterised protein family (UPF0041)
  misc_feature (18)..(92): Homolog of NCBI NO: 37546581 NR Description: similar to ENSANGP00000015797 [Homo sapiens]
  misc_feature (18)..(91): Homolog of NCBI NO: 12852283 NR Description: unnamed protein product [Mus musculus]
  misc_feature (18)..(99): Homolog of NCBI NO: 39591631 NR Description: Hypothetical protein CBG18071 [Caenorhabditis
  misc_feature (18)..(99): Homolog of NCBI NO: 17554512 NR Description: Uncharacterised protein family (UPF0041)
  misc_feature (18)..(91): Homolog of NCBI NO: 12852262 NR Description: unnamed protein product [Mus musculus]
  misc_feature (18)..(91): Homolog of NCBI NO: 9055178 NR Description: brain protein 44-like; apoptosis-regulating basic
  misc_feature (18)..(91): Homolog of NCBI NO: 7706369 NR Description: brain protein 44-like; HSPC040 protein [Homo
  misc_feature (18)..(91): Homolog of NCBI NO: 4929727 NR Description: CGI-129 protein [Homo sapiens]
  misc_feature (1)..(88): Homolog of NCBI NO: 19075237 NR Description: conserved hypothetical protein
  misc_feature (1)..(110): Homolog of NCBI NO: 15241266 NR Description: putative protein
MATSRFQAFLNSPIGPKTTHFWGPIANWGFVAAGLVDMQKPPEMISGNMSSAMCVYSALFMRFAWMVQPRNYLLLACHASNETVQLYQLSRWARAQGYLSSKKEEEKPSQ

SEQ ID NO: 30438 - DNA, 2369 bp, Arabidopsis thaliana
  misc_feature (1)..(2369): Ceres Seq. ID no. 12327544
  misc_feature: MA Experiment ID: 20001451 Result: Down-regulated in Transcription
  misc_feature: MA Experiment 20001451 PARAMETER Experiment Name: At_Far-red-induction_P Parameter: Age (day) Value: 7
  misc_feature: MA Experiment 20001451 PARAMETER Experiment Name: At_Far-red-induction_P Parameter: Light Value: Far-red vs. White
  misc_feature: MA Experiment 20001451 PARAMETER Experiment Name: At_Far-red-induction_P Parameter: Organism Value: A. thaliana
  misc_feature: MA Experiment 20001451 PARAMETER Experiment Name: At_Far-red-induction_P Parameter: Plant Line Value: Columbia
  misc_feature: MA Experiment 20001451 PARAMETER Experiment Name: At_Far-red-induction_P Parameter: Timepoint (hr) Value: 24
  misc_feature: MA Experiment 20001451 PARAMETER Experiment Name: At_Far-red-induction_P Parameter: Tissue Value: Whole Plant
atctacgtgcatccacctctctcttcttcttcttgtgaccactcttcctgtctgttcactggaggtgaattttgatttttttggccgatcggatttgagtttttgaatctctgattgctgagaaaatgccggcgttttacggaggaaagcttacgaccttcgaggacgatgagaaggagagcgagtatggttacgttcgtaaggtttcaggtcctgttgttgttgccgatggtatggccggtgctgctatgtatgagttagtgcgtgttggtcatgataatttgattggtgaaatcatccgtcttgaaggagattctgccaccatccaagtttacgaggaaacagctggattgacagttaatgatcccgttcttcgaacacacaagccactttctgtggagctcgggccaggaatattgggaaatatctttgatggaattcagaggcctttgaagactattgcaagaatatccggtgatgtgtacattcctcggggtgtgtctgttccagctcttgacaaagattgtctttgggagttccagcccaataaatttgtcgagggagacacaataactggtggtgacttgtatgctactgtctttgagaacactttgatgaatcacctcgttgcccttcctccggatgccatggggaagatcacttacattgctccagctggtcaatattcgcttaaggataccgtgatagagcttgaattccaggggatcaagaaatcttacaccatgcttcagagctggcctgtacgtacgcctaggccagttgcatcaaagcttgctgccgatactcctctacttacggggcagcgtgttcttgatgcccttttcccttctgttcttggtggaacctgtgccattcctggtgcttttggctgtgggaaaactgttatcagtcaggcactttccaagtactccaactctgatgctgttgtgtatgttggttgtggagagagaggaaatgaaatggctgaggttcttatggacttcccacaattgacaatgacgttgcctgatggccgtgaggaatctgtcatgaaacgtaccacacttgttgctaacacctctaacatgcctgtggctgctcgtgaagcctcaatttacacaggaatcacaatcgctgaatattttagagatatgggctacaatgttagtatgatggcagactcaacttcccgttgggcagaagcattaagagaaatttcaggacggctggctgaaatgcctgctgacagtggatatccagcctatctagcagcacgtttagcatctttctatgaacgtgctggtaaagtaaaatgtcttggtggaccagaacgtaacggaagtgttacaattgttggtgcagtttcgcctcctggaggagacttttcagatcctgtgacttcagcaacccttagtattgtgcaggtcttctggggtttggacaaaaagcttgcccagagaaaacattttccctctgttaattggttgatttcttactcaaagtattcaacggcactggaatctttctatgagaagttcgatccagatttcatcaacatcaggacaaaggccagagaggtgttgcagagggaagacgatcttaatgaaattgtccagcttgtaggaaaagatgcgctagcagaaggggacaaaatcacattggaaacagctaagctattgagggaagattaccttgctcaaaacgcgtttacaccatatgacaaattctgtcctttctacaagtccgtgtggatgatgcgtaacattatccatttctacaacctagccaaccaggcggttgagagagcagctggaatggacggtcaaaagattacctacactcttatcaagcatcgcttaggagatcttttctaccgtttagtgtctcagaagttcgaagacccagcagaaggggaggatacactggtggaaaaattcaagaaattgtacgacgatctcaatgctggattccgtgctttggaagatgaaactcggtaagctgtcgagtctccaccgcaagtaaaaaaaatccacagaattgggttgtttttggagaaagagggtttcattcatggtctctttcttgtgtttttgaaccaacaactatcatagtggtcggtattttatttatcggtttggtcgatcgattgagttttagctctgtgagcgtcatgattctccggctgtgctgtgctgtgtaatatgtttgattcgttgttttcatgtttttatttcggtggtaataaggtacagccaatgtgagtcatatatttgatttgatgtaccctctcaattcaataagttaattttatgtccaaaaacatattggggataccgttatttttctcataataaataccatcattttgt

SEQ ID NO: 30439 - protein, 623 aa, Arabidopsis thaliana
  peptide (1)..(623): Ceres Seq. ID no. 12327545
  misc_feature (271)..(464): Pfam Name: ATP synthase alpha/beta family, Pfam Description: ATP synthase alpha/beta family,
  misc_feature (271)..(464): Pfam Name: ATP synthase alpha/beta family, Pfam Description: ATP synthase alpha/beta family,
  misc_feature (13)..(620): Homolog of NCBI NO: 20129479 NR Description: CG5075-PA [Drosophila melanogaster]
  misc_feature (8)..(620): Homolog of NCBI NO: 30584887 NR Description: Homo sapiens ATPase, H+ transporting, lysosomal
  misc_feature (1)..(623): Homolog of NCBI NO: 2506211 NR Description: Vacuolar ATP synthase catalytic subunit A A subunit) (Vacuolar proton pump alpha subunit) (V-ATPase 69 kDa
  misc_feature (1)..(623): Homolog of NCBI NO: 27883932 NR Description: vacuolar H+-ATPase A1 subunit isoform
  misc_feature (1)..(623): Homolog of NCBI NO: 3169287 NR Description: vacuolar H+-ATPase catalytic subunit [Gossypium
  misc_feature (13)..(620): Homolog of NCBI NO: 20129479 NR Description: CG5075-PA [Drosophila melanogaster]
  misc_feature (1)..(623): Homolog of NCBI NO: 2506211 NR Description: Vacuolar ATP synthase catalytic subunit A A subunit) (Vacuolar proton pump alpha subunit) (V-ATPase 69 kDa
  misc_feature (1)..(623): Homolog of NCBI NO: 3169287 NR Description: vacuolar H+-ATPase catalytic subunit [Gossypium
  misc_feature (1)..(623): Homolog of NCBI NO: 12585490 NR Description: Vacuolar ATP synthase catalytic subunit A A subunit) (Vacuolar proton pump alpha subunit) (V-ATPase 69 kDa
  misc_feature (1)..(623): Homolog of NCBI NO: 137460 NR Description: Vacuolar ATP synthase catalytic subunit A A subunit) (Vacuolar proton pump alpha subunit) (V-ATPase 69 kDa
  misc_feature (1)..(623): Homolog of NCBI NO: 15982954 NR Description: V-ATPase catalytic subunit A [Prunus persica]
  misc_feature (1)..(623): Homolog of NCBI NO: 27884018 NR Description: vacuolar H+-ATPase A2 subunit isoform
  misc_feature (1)..(623): Homolog of NCBI NO: 401322 NR Description: Vacuolar ATP synthase catalytic subunit A A subunit) (Vacuolar proton pump alpha subunit) (V-ATPase 69 kDa
  misc_feature (1)..(623): Homolog of NCBI NO: 27883932 NR Description: vacuolar H+-ATPase A1 subunit isoform
  misc_feature (8)..(620): Homolog of NCBI NO: 30584887 NR Description: Homo sapiens ATPase, H+ transporting, lysosomal
  misc_feature (1)..(623): Homolog of NCBI NO: 401322 NR Description: Vacuolar ATP synthase catalytic subunit A A subunit) (Vacuolar proton pump alpha subunit) (V-ATPase 69 kDa
  misc_feature (1)..(623): Homolog of NCBI NO: 27884018 NR Description: vacuolar H+-ATPase A2 subunit isoform
  misc_feature (1)..(623): Homolog of NCBI NO: 15982954 NR Description: V-ATPase catalytic subunit A [Prunus persica]
  misc_feature (1)..(623): Homolog of NCBI NO: 137460 NR Description: Vacuolar ATP synthase catalytic subunit A A subunit) (Vacuolar proton pump alpha subunit) (V-ATPase 69 kDa
  misc_feature (1)..(623): Homolog of NCBI NO: 12585490 NR Description: Vacuolar ATP synthase catalytic subunit A A subunit) (Vacuolar proton pump alpha subunit) (V-ATPase 69 kDa
MPAFYGGKLTTFEDDEKESEYGYVRKVSGPVVVADGMAGAAMYELVRVGHDNLIGEIIRLEGDSATIQVYEETAGLTVNDPVLRTHKPLSVELGPGILGNIFDGIQRPLKTIARISGDVYIPRGVSVPALDKDCLWEFQPNKFVEGDTITGGDLYATVFENTLMNHLVALPPDAMGKITYIAPAGQYSLKDTVIELEFQGIKKSYTMLQSWPVRTPRPVASKLAADTPLLTGQRVLDALFPSVLGGTCAIPGAFGCGKTVISQALSKYSNSDAVVYVGCGERGNEMAEVLMDFPQLTMTLPDGREESVMKRTTLVANTSNMPVAAREASIYTGITIAEYFRDMGYNVSMMADSTSRWAEALREISGRLAEMPADSGYPAYLAARLASFYERAGKVKCLGGPERNGSVTIVGAVSPPGGDFSDPVTSATLSIVQVFWGLDKKLAQRKHFPSVNWLISYSKYSTALESFYEKFDPDFINIRTKAREVLQREDDLNEIVQLVGKDALAEGDKITLETAKLLREDYLAQNAFTPYDKFCPFYKSVWMMRNIIHFYNLANQAVERAAGMDGQKITYTLIKHRLGDLFYRLVSQKFEDPAEGEDTLVEKFKKLYDDLNAGFRALEDETR

SEQ ID NO: 30440 - protein, 587 aa, Arabidopsis thaliana
  peptide (1)..(587): Ceres Seq. ID no. 12327546
  misc_feature (235)..(428): Pfam Name: ATP synthase alpha/beta family, Pfam Description: ATP synthase alpha/beta family,
  misc_feature (235)..(428): Pfam Name: ATP synthase alpha/beta family, Pfam Description: ATP synthase alpha/beta family,
  misc_feature (1)..(584): Homolog of NCBI NO: 20129479 NR Description: CG5075-PA [Drosophila melanogaster]
  misc_feature (1)..(584): Homolog of NCBI NO: 30584887 NR Description: Homo sapiens ATPase, H+ transporting, lysosomal
  misc_feature (1)..(587): Homolog of NCBI NO: 2506211 NR Description: Vacuolar ATP synthase catalytic subunit A A subunit) (Vacuolar proton pump alpha subunit) (V-ATPase 69 kDa
  misc_feature (1)..(587): Homolog of NCBI NO: 27883932 NR Description: vacuolar H+-ATPase A1 subunit isoform
  misc_feature (1)..(587): Homolog of NCBI NO: 3169287 NR Description: vacuolar H+-ATPase catalytic subunit [Gossypium
  misc_feature (1)..(584): Homolog of NCBI NO: 20129479 NR Description: CG5075-PA [Drosophila melanogaster]
  misc_feature (1)..(587): Homolog of NCBI NO: 2506211 NR Description: Vacuolar ATP synthase catalytic subunit A A subunit) (Vacuolar proton pump alpha subunit) (V-ATPase 69 kDa
  misc_feature (1)..(587): Homolog of NCBI NO: 3169287 NR Description: vacuolar H+-ATPase catalytic subunit [Gossypium
  misc_feature (1)..(587): Homolog of NCBI NO: 12585490 NR Description: Vacuolar ATP synthase catalytic subunit A A subunit) (Vacuolar proton pump alpha subunit) (V-ATPase 69 kDa
  misc_feature (1)..(587): Homolog of NCBI NO: 137460 NR Description: Vacuolar ATP synthase catalytic subunit A A subunit) (Vacuolar proton pump alpha subunit) (V-ATPase 69 kDa
  misc_feature (1)..(587): Homolog of NCBI NO: 15982954 NR Description: V-ATPase catalytic subunit A [Prunus persica]
  misc_feature (1)..(587): Homolog of NCBI NO: 27884018 NR Description: vacuolar H+-ATPase A2 subunit isoform
  misc_feature (1)..(587): Homolog of NCBI NO: 401322 NR Description: Vacuolar ATP synthase catalytic subunit A A subunit) (Vacuolar proton pump alpha subunit) (V-ATPase 69 kDa
  misc_feature (1)..(587): Homolog of NCBI NO: 27883932 NR Description: vacuolar H+-ATPase A1 subunit isoform
  misc_feature (1)..(584): Homolog of NCBI NO: 30584887 NR Description: Homo sapiens ATPase, H+ transporting, lysosomal
  misc_feature (1)..(587): Homolog of NCBI NO: 401322 NR Description: Vacuolar ATP synthase catalytic subunit A A subunit) (Vacuolar proton pump alpha subunit) (V-ATPase 69 kDa
  misc_feature (1)..(587): Homolog of NCBI NO: 27884018 NR Description: vacuolar H+-ATPase A2 subunit isoform
  misc_feature (1)..(587): Homolog of NCBI NO: 15982954 NR Description: V-ATPase catalytic subunit A [Prunus persica]
  misc_feature (1)..(587): Homolog of NCBI NO: 137460 NR Description: Vacuolar ATP synthase catalytic subunit A A subunit) (Vacuolar proton pump alpha subunit) (V-ATPase 69 kDa
  misc_feature (1)..(587): Homolog of NCBI NO: 12585490 NR Description: Vacuolar ATP synthase catalytic subunit A A subunit) (Vacuolar proton pump alpha subunit) (V-ATPase 69 kDa
MAGAAMYELVRVGHDNLIGEIIRLEGDSATIQVYEETAGLTVNDPVLRTHKPLSVELGPGILGNIFDGIQRPLKTIARISGDVYIPRGVSVPALDKDCLWEFQPNKFVEGDTITGGDLYATVFENTLMNHLVALPPDAMGKITYIAPAGQYSLKDTVIELEFQGIKKSYTMLQSWPVRTPRPVASKLAADTPLLTGQRVLDALFPSVLGGTCAIPGAFGCGKTVISQALSKYSNSDAVVYVGCGERGNEMAEVLMDFPQLTMTLPDGREESVMKRTTLVANTSNMPVAAREASIYTGITIAEYFRDMGYNVSMMADSTSRWAEALREISGRLAEMPADSGYPAYLAARLASFYERAGKVKCLGGPERNGSVTIVGAVSPPGGDFSDPVTSATLSIVQVFWGLDKKLAQRKHFPSVNWLISYSKYSTALESFYEKFDPDFINIRTKAREVLQREDDLNEIVQLVGKDALAEGDKITLETAKLLREDYLAQNAFTPYDKFCPFYKSVWMMRNIIHFYNLANQAVERAAGMDGQKITYTLIKHRLGDLFYRLVSQKFEDPAEGEDTLVEKFKKLYDDLNAGFRALEDETR

SEQ ID NO: 30441 - protein, 582 aa, Arabidopsis thaliana
  peptide (1)..(582): Ceres Seq. ID no. 12327547
  misc_feature (230)..(423): Pfam Name: ATP synthase alpha/beta family, Pfam Description: ATP synthase alpha/beta family,
  misc_feature (230)..(423): Pfam Name: ATP synthase alpha/beta family, Pfam Description: ATP synthase alpha/beta family,
  misc_feature (1)..(579): Homolog of NCBI NO: 20129479 NR Description: CG5075-PA [Drosophila melanogaster]
  misc_feature (1)..(579): Homolog of NCBI NO: 30584887 NR Description: Homo sapiens ATPase, H+ transporting, lysosomal
  misc_feature (1)..(582): Homolog of NCBI NO: 2506211 NR Description: Vacuolar ATP synthase catalytic subunit A A subunit) (Vacuolar proton pump alpha subunit) (V-ATPase 69 kDa
  misc_feature (1)..(582): Homolog of NCBI NO: 27883932 NR Description: vacuolar H+-ATPase A1 subunit isoform
  misc_feature (1)..(582): Homolog of NCBI NO: 3169287 NR Description: vacuolar H+-ATPase catalytic subunit [Gossypium
  misc_feature (1)..(579): Homolog of NCBI NO: 20129479 NR Description: CG5075-PA [Drosophila melanogaster]
  misc_feature (1)..(582): Homolog of NCBI NO: 2506211 NR Description: Vacuolar ATP synthase catalytic subunit A A subunit) (Vacuolar proton pump alpha subunit) (V-ATPase 69 kDa
  misc_feature (1)..(582): Homolog of NCBI NO: 3169287 NR Description: vacuolar H+-ATPase catalytic subunit [Gossypium
  misc_feature (1)..(582): Homolog of NCBI NO: 12585490 NR Description: Vacuolar ATP synthase catalytic subunit A A subunit) (Vacuolar proton pump alpha subunit) (V-ATPase 69 kDa
  misc_feature (1)..(582): Homolog of NCBI NO: 137460 NR Description: Vacuolar ATP synthase catalytic subunit A A subunit) (Vacuolar proton pump alpha subunit) (V-ATPase 69 kDa
  misc_feature (1)..(582): Homolog of NCBI NO: 15982954 NR Description: V-ATPase catalytic subunit A [Prunus persica]
  misc_feature (1)..(582): Homolog of NCBI NO: 27884018 NR Description: vacuolar H+-ATPase A2 subunit isoform
  misc_feature (1)..(582): Homolog of NCBI NO: 401322 NR Description: Vacuolar ATP synthase catalytic subunit A A subunit) (Vacuolar proton pump alpha subunit) (V-ATPase 69 kDa
  misc_feature (1)..(582): Homolog of NCBI NO: 27883932 NR Description: vacuolar H+-ATPase A1 subunit isoform
  misc_feature (1)..(579): Homolog of NCBI NO: 30584887 NR Description: Homo sapiens ATPase, H+ transporting, lysosomal
  misc_feature (1)..(582): Homolog of NCBI NO: 401322 NR Description: Vacuolar ATP synthase catalytic subunit A A subunit) (Vacuolar proton pump alpha subunit) (V-ATPase 69 kDa
  misc_feature (1)..(582): Homolog of NCBI NO: 27884018 NR Description: vacuolar H+-ATPase A2 subunit isoform
  misc_feature (1)..(582): Homolog of NCBI NO: 15982954 NR Description: V-ATPase catalytic subunit A [Prunus persica]
  misc_feature (1)..(582): Homolog of NCBI NO: 137460 NR Description: Vacuolar ATP synthase catalytic subunit A A subunit) (Vacuolar proton pump alpha subunit) (V-ATPase 69 kDa
  misc_feature (1)..(582): Homolog of NCBI NO: 12585490 NR Description: Vacuolar ATP synthase catalytic subunit A A subunit) (Vacuolar proton pump alpha subunit) (V-ATPase 69 kDa
MYELVRVGHDNLIGEIIRLEGDSATIQVYEETAGLTVNDPVLRTHKPLSVELGPGILGNIFDGIQRPLKTIARISGDVYIPRGVSVPALDKDCLWEFQPNKFVEGDTITGGDLYATVFENTLMNHLVALPPDAMGKITYIAPAGQYSLKDTVIELEFQGIKKSYTMLQSWPVRTPRPVASKLAADTPLLTGQRVLDALFPSVLGGTCAIPGAFGCGKTVISQALSKYSNSDAVVYVGCGERGNEMAEVLMDFPQLTMTLPDGREESVMKRTTLVANTSNMPVAAREASIYTGITIAEYFRDMGYNVSMMADSTSRWAEALREISGRLAEMPADSGYPAYLAARLASFYERAGKVKCLGGPERNGSVTIVGAVSPPGGDFSDPVTSATLSIVQVFWGLDKKLAQRKHFPSVNWLISYSKYSTALESFYEKFDPDFINIRTKAREVLQREDDLNEIVQLVGKDALAEGDKITLETAKLLREDYLAQNAFTPYDKFCPFYKSVWMMRNIIHFYNLANQAVERAAGMDGQKITYTLIKHRLGDLFYRLVSQKFEDPAEGEDTLVEKFKKLYDDLNAGFRALEDETR

SEQ ID NO: 30442 - DNA, 903 bp, Arabidopsis thaliana
  misc_feature (1)..(903): Ceres Seq. ID no. 12372123
  misc_feature: MA Experiment ID: 108461 Result: Up-regulated in Transcription
  misc_feature: MA Experiment 108461 PARAMETER Experiment Name: At_Germinating_Seeds_cDNA_P Parameter: Age (day) Value: 1 vs. 0
  misc_feature: MA Experiment 108461 PARAMETER Experiment Name: At_Germinating_Seeds_cDNA_P Parameter: Tissue Value: Germinating Seeds
  misc_feature: MA Experiment ID: 108462 Result: Up-regulated in Transcription
  misc_feature: MA Experiment 108462 PARAMETER Experiment Name: At_Germinating_Seeds_cDNA_P Parameter: Age (day) Value: 2 vs. 0
  misc_feature: MA Experiment 108462 PARAMETER Experiment Name: At_Germinating_Seeds_cDNA_P Parameter: Tissue Value: Germinating Seeds
  misc_feature: MA Experiment ID: 20000180 Result: Up-regulated in Transcription
  misc_feature: MA Experiment 20000180 PARAMETER Experiment Name: At_Germinating_Seeds_P Parameter: Age (hr) Value: 24 vs. 0
  misc_feature: MA Experiment 20000180 PARAMETER Experiment Name: At_Germinating_Seeds_P Parameter: Tissue Value: Germinating Seeds
  misc_feature: MA Experiment ID: 20000185 Result: Down-regulated in Transcription
  misc_feature: MA Experiment 20000185 PARAMETER Experiment Name: At_Roots__P Parameter: Age (day) Value: 7 vs. 21
  misc_feature: MA Experiment 20000185 PARAMETER Experiment Name: At_Roots__P Parameter: Organism Value: A. thaliana
  misc_feature: MA Experiment 20000185 PARAMETER Experiment Name: At_Roots__P Parameter: Tissue Value: Roots vs. Whole Plant
  misc_feature: MA Experiment ID: 20000224 Result: Down-regulated in Transcription
  misc_feature: MA Experiment ID: 20001557 Result: Up-regulated in Transcription
  misc_feature: MA Experiment 20001557 PARAMETER Experiment Name: At_Drought_Soil_Dry_P Parameter: Age (day) Value: 27
  misc_feature: MA Experiment 20001557 PARAMETER Experiment Name: At_Drought_Soil_Dry_P Parameter: Organism Value: A. thaliana
  misc_feature: MA Experiment 20001557 PARAMETER Experiment Name: At_Drought_Soil_Dry_P Parameter: Plant Line Value: WS
  misc_feature: MA Experiment 20001557 PARAMETER Experiment Name: At_Drought_Soil_Dry_P Parameter: Post Timepoint (hr) Value: 3
  misc_feature: MA Experiment 20001557 PARAMETER Experiment Name: At_Drought_Soil_Dry_P Parameter: Post-Treatment Value: Re-Water vs. No Drought
  misc_feature: MA Experiment 20001557 PARAMETER Experiment Name: At_Drought_Soil_Dry_P Parameter: Timepoint (day) Value: 13
  misc_feature: MA Experiment 20001557 PARAMETER Experiment Name: At_Drought_Soil_Dry_P Parameter: Treatment Value: Drought vs. No Drought
  misc_feature: MA Experiment ID: 20001905 Result: Down-regulated in Transcription
  misc_feature: MA Experiment 20001905 PARAMETER Experiment Name: At_Drought_Reproduction_P Parameter: Age (day) Value: 40
  misc_feature: MA Experiment 20001905 PARAMETER Experiment Name: At_Drought_Reproduction_P Parameter: Organism Value: A. thaliana
  misc_feature: MA Experiment 20001905 PARAMETER Experiment Name: At_Drought_Reproduction_P Parameter: Plant Line Value: WS
  misc_feature: MA Experiment 20001905 PARAMETER Experiment Name: At_Drought_Reproduction_P Parameter: Timepoint (day) Value: 10
  misc_feature: MA Experiment 20001905 PARAMETER Experiment Name: At_Drought_Reproduction_P Parameter: Tissue Value: Rosettes
  misc_feature: MA Experiment 20001905 PARAMETER Experiment Name: At_Drought_Reproduction_P Parameter: Treatment Value: Drought vs. No Drought
gtcgttttattgtagtttctccgcgtttggtacatcaacacttgtagctgtgtatctttctaattcttcctttctttcgctgacagtgcttgctcacacactaatcgcaattgttgctgcattgccgactctgattcgttcgatttcagcattttgttcttccgaagcgatgcctcgtcgatccggagattgcatgagatgtctggtgattttcgcggttgtatcagctttagttgtgtgtggacctgctctttattggaaattcaacaagggtttcgttggatccacacgtgccaactctctttgtcctccttgcgtttgtgattgtcctcctcctttgtctcttctccagattgctcctgggctcgcaaatctctctattacagattgtggaagcgacgatccagagcttaaacaagagatggagaagcaatttgtggaccttctgactgaggagctgaagctgcaagaagcagttgcagatgagcatagccgtcatatgaatgttacccttgcagaagctaaaagggttgcatctcagtatcaaaaggaggctgagaagtgcaatgccgccactgagatttgtgaatcagctagagagagagctgaagctttgttgatcaaggagaggaagattacttctttgtgggagaagagagctcggcaatcaggttgggaaggtgagtaaactgattgcacttctcagtctaccttaaagtgtttctctctgagaaatcgaattgtcacagctctaaaaggaaattgtttagttgtcaaggcaaagtcctatcttccacgtttctctatatacagtatgtagttttttgttttgcccttgatcggaatgtagctaaagaaaggccttgtatcaacttttattcatatataattgtccatttcttt

SEQ ID NO: 30443 - protein, 228 aa, Arabidopsis thaliana
  peptide (1)..(228): Ceres Seq. ID no. 12372124
  misc_feature (57)..(228): Pfam Name: Protein of unknown function (DUF1068) Pfam Description: Protein of unknown function (DUF1068)
  misc_feature (68)..(228): Homolog of NCBI NO: 7487433 NR Description: hypothetical protein At2g32580 [imported] -
  misc_feature (68)..(227): Homolog of NCBI NO: 18390477 NR Description: expressed protein
  misc_feature (68)..(228): Homolog of NCBI NO: 21553781 NR Description: unknown [Arabidopsis thaliana]
  misc_feature (68)..(228): Homolog of NCBI NO: 18403016 NR Description: expressed protein
  misc_feature (68)..(227): Homolog of NCBI NO: 27922919 NR Description: unknown protein [Phytophthora sojae]
  misc_feature (64)..(226): Homolog of NCBI NO: 38345038 NR Description: OSJNBa0029H02.22 [Oryza sativa (japonica
  misc_feature (65)..(228): Homolog of NCBI NO: 25364110 NR Description: hypothetical protein At2g24290 [imported] -
  misc_feature (57)..(228): Homolog of NCBI NO: 18400504 NR Description: expressed protein
  misc_feature (57)..(228): Homolog of NCBI NO: 18417716 NR Description: Expressed protein
  misc_feature (6)..(228): Homolog of NCBI NO: 25407700 NR Description: hypothetical protein AT4g30990 [imported] -
SFYCSFSAFGTSTLVAVYLSNSSFLSLTVLAHTLIAIVAALPTLIRSISAFCSSEAMPRRSGDCMRCLVIFAVVSALVVCGPALYWKFNKGFVGSTRANSLCPPCVCDCPPPLSLLQIAPGLANLSITDCGSDDPELKQEMEKQFVDLLTEELKLQEAVADEHSRHMNVTLAEAKRVASQYQKEAEKCNAATEICESARERAEALLIKERKITSLWEKRARQSGWEGE

SEQ ID NO: 30444 - protein, 172 aa, Arabidopsis thaliana
  peptide (1)..(172): Ceres Seq. ID no. 12372125
  misc_feature (1)..(172): Pfam Name: Protein of unknown function (DUF1068) Pfam Description: Protein of unknown function (DUF1068)
  misc_feature (12)..(172): Homolog of NCBI NO: 7487433 NR Description: hypothetical protein At2g32580 [imported] -
  misc_feature (12)..(171): Homolog of NCBI NO: 18390477 NR Description: expressed protein
  misc_feature (12)..(172): Homolog of NCBI NO: 21553781 NR Description: unknown [Arabidopsis thaliana]
  misc_feature (12)..(172): Homolog of NCBI NO: 18403016 NR Description: expressed protein
  misc_feature (12)..(171): Homolog of NCBI NO: 27922919 NR Description: unknown protein [Phytophthora sojae]
  misc_feature (8)..(170): Homolog of NCBI NO: 38345038 NR Description: OSJNBa0029H02.22 [Oryza sativa (japonica
  misc_feature (9)..(172): Homolog of NCBI NO: 25364110 NR Description: hypothetical protein At2g24290 [imported] -
  misc_feature (1)..(172): Homolog of NCBI NO: 18400504 NR Description: expressed protein
  misc_feature (1)..(172): Homolog of NCBI NO: 18417716 NR Description: Expressed protein
  misc_feature (1)..(172): Homolog of NCBI NO: 25407700 NR Description: hypothetical protein AT4g30990 [imported] -
MPRRSGDCMRCLVIFAVVSALVVCGPALYWKFNKGFVGSTRANSLCPPCVCDCPPPLSLLQIAPGLANLSITDCGSDDPELKQEMEKQFVDLLTEELKLQEAVADEHSRHMNVTLAEAKRVASQYQKEAEKCNAATEICESARERAEALLIKERKITSLWEKRARQSGWEGE

SEQ ID NO: 30445 - protein, 164 aa, Arabidopsis thaliana
  peptide (1)..(164): Ceres Seq. ID no. 12372126
  misc_feature (1)..(164): Pfam Name: Protein of unknown function (DUF1068) Pfam Description: Protein of unknown function (DUF1068)
  misc_feature (4)..(164): Homolog of NCBI NO: 7487433 NR Description: hypothetical protein At2g32580 [imported] -
  misc_feature (4)..(163): Homolog of NCBI NO: 18390477 NR Description: expressed protein
  misc_feature (4)..(164): Homolog of NCBI NO: 21553781 NR Description: unknown [Arabidopsis thaliana]
  misc_feature (4)..(164): Homolog of NCBI NO: 18403016 NR Description: expressed protein
  misc_feature (4)..(163): Homolog of NCBI NO: 27922919 NR Description: unknown protein [Phytophthora sojae]
  misc_feature (1)..(162): Homolog of NCBI NO: 38345038 NR Description: OSJNBa0029H02.22 [Oryza sativa (japonica
  misc_feature (1)..(164): Homolog of NCBI NO: 25364110 NR Description: hypothetical protein At2g24290 [imported] -
  misc_feature (1)..(164): Homolog of NCBI NO: 18400504 NR Description: expressed protein
  misc_feature (1)..(164): Homolog of NCBI NO: 18417716 NR Description: Expressed protein
  misc_feature (1)..(164): Homolog of NCBI NO: 25407700 NR Description: hypothetical protein AT4g30990 [imported] -
MRCLVIFAVVSALVVCGPALYWKFNKGFVGSTRANSLCPPCVCDCPPPLSLLQIAPGLANLSITDCGSDDPELKQEMEKQFVDLLTEELKLQEAVADEHSRHMNVTLAEAKRVASQYQKEAEKCNAATEICESARERAEALLIKERKITSLWEKRARQSGWEGE

SEQ ID NO: 30446 - DNA, 675 bp, Arabidopsis thaliana
  misc_feature (1)..(675): Ceres Seq. ID no. 12322124
  misc_feature: MA Experiment ID: 20000173 Result: Up-regulated in Transcription
  misc_feature: MA Experiment 20000173 PARAMETER Experiment Name: At_42deg_Heat_P Parameter: Age (day) Value: 14
  misc_feature: MA Experiment 20000173 PARAMETER Experiment Name: At_42deg_Heat_P Parameter: Organism Value: A. thaliana
  misc_feature: MA Experiment 20000173 PARAMETER Experiment Name: At_42deg_Heat_P Parameter: Plant Line Value: WS
  misc_feature: MA Experiment 20000173 PARAMETER Experiment Name: At_42deg_Heat_P Parameter: Temperature (deg C) Value: 42 vs. 22
  misc_feature: MA Experiment 20000173 PARAMETER Experiment Name: At_42deg_Heat_P Parameter: Timepoint (hr) Value: 6
  misc_feature: MA Experiment 20000173 PARAMETER Experiment Name: At_42deg_Heat_P Parameter: Tissue Value: Aerial
  misc_feature: MA Experiment ID: 20000227 Result: Down-regulated in Transcription
  misc_feature: MA Experiment 20000227 PARAMETER Experiment Name: At_Root-Tips-vs-Tops_P Parameter: Tissue Value: Root Tips vs. Root Tops
  misc_feature: MA Experiment ID: 20000234 Result: Down-regulated in Transcription
  misc_feature: MA Experiment 20000234 PARAMETER Experiment Name: At_Siliques_P Parameter: Age (day) Value: 21
  misc_feature: MA Experiment 20000234 PARAMETER Experiment Name: At_Siliques_P Parameter: Organism Value: A. thaliana
  misc_feature: MA Experiment 20000234 PARAMETER Experiment Name: At_Siliques_P Parameter: Plant Line Value: WS
  misc_feature: MA Experiment 20000234 PARAMETER Experiment Name: At_Siliques_P Parameter: Tissue Value: Less Than 5mm Siliques vs. Whole Plant
  misc_feature: MA Experiment ID: 20000265 Result: Down-regulated in Transcription
  misc_feature: MA Experiment 20000265 PARAMETER Experiment Name: At_Open_Flower_P Parameter: Age (day) Value: 21
  misc_feature: MA Experiment 20000265 PARAMETER Experiment Name: At_Open_Flower_P Parameter: Plant Line Value: WS
  misc_feature: MA Experiment 20000265 PARAMETER Experiment Name: At_Open_Flower_P Parameter: Tissue Value: Closed Flower vs. Whole Plant
  misc_feature: MA Experiment ID: 20000286 Result: Down-regulated in Transcription
  misc_feature: MA Experiment 20000286 PARAMETER Experiment Name: At_Open_Flower_P Parameter: Age (day) Value: 21
  misc_feature: MA Experiment 20000286 PARAMETER Experiment Name: At_Open_Flower_P Parameter: Plant Line Value: WS
  misc_feature: MA Experiment 20000286 PARAMETER Experiment Name: At_Open_Flower_P Parameter: Tissue Value: Half Open vs. Whole Plant
aataaagtttttatttatctatctatccaattggagacgaatcatatcgagcgatggatttggcagaactgtgggcgattttcggacccggattctccggcgccgttttcggaaccgggtggtggttttgggtcgacgccgtcgtttgcagttccatccaagttcccttcgtccattaccttcccggcatattcgcttctctcggagctttgatgttcaattgcgtcagaaaagaagacattgattactctccttacgacgaaggcgagtggagattgaagctgtggcttttcatagcgtatgtcgtagcatttgtttccttagctgcttctgttggcttgctgattcaagattcggttgtgaagactgggccttcaacttggactggtgtggctggtgtctttcaatgtgtatttgtattgataagtgggctaatgtattggacatcgcactcagagtagcgcacaggcacatacttcatctccgactcagattcatactgtgacaacttacaagttcctctcgtttctctactatgtaaattcctgtgtcttgtcttgtcaccttggcattgtgtgcgagattcctctgttgcatcagtgtgtgtttctgttaaaactttgtgtgaatgttattgaaaatactccaaatcaatcagttgtccaaagagaacgc

SEQ ID NO: 30447 - protein, 135 aa, Arabidopsis thaliana
  peptide (1)..(135): Ceres Seq. ID no. 12322125
  misc_feature (1)..(134): Pfam Name: Uncharacterised protein family (UPF0220) Pfam Description: Uncharacterised protein family (UPF0220)
  misc_feature (36)..(135): Homolog of NCBI NO: 38047947 NR Description: similar to Drosophila melanogaster CG15012
  misc_feature (15)..(129): Homolog of NCBI NO: 33150604 NR Description: IFNRC [Homo sapiens]
  misc_feature (15)..(135): Homolog of NCBI NO: 39595350 NR Description: Hypothetical protein CBG03988 [Caenorhabditis
  misc_feature (15)..(135): Homolog of NCBI NO: 27732805 NR Description: similar to Small membrane protein 1 [Rattus
  misc_feature (1)..(135): Homolog of NCBI NO: 34610239 NR Description: small membrane protein 1 [Mus musculus]
  misc_feature (15)..(135): Homolog of NCBI NO: 7657595 NR Description: small membrane protein 1 [Homo sapiens]
  misc_feature (15)..(135): Homolog of NCBI NO: 24657484 NR Description: CG15012-PB [Drosophila melanogaster]
  misc_feature (1)..(97): Homolog of NCBI NO: 25373092 NR Description: protein T32E20.29 [imported] - Arabidopsis
  misc_feature (1)..(135): Homolog of NCBI NO: 18400231 NR Description: expressed protein
MDLAELWAIFGPGFSGAVFGTGWWFWVDAVVCSSIQVPFVHYLPGIFASLGALMFNCVRKEDIDYSPYDEGEWRLKLWLFIAYVVAFVSLAASVGLLIQDSVVKTGPSTWTGVAGVFQCVFVLISGLMYWTSHSE

SEQ ID NO: 30448 - protein, 82 aa, Arabidopsis thaliana; identical to SEQ ID NO: 26444
  peptide (1)..(82): Ceres Seq. ID no. 12322126
  misc_feature (1)..(81): Pfam Name: Uncharacterised protein family (UPF0220) Pfam Description: Uncharacterised protein family (UPF0220)
  misc_feature (1)..(82): Homolog of NCBI NO: 38047947 NR Description: similar to Drosophila melanogaster CG15012
  misc_feature (1)..(76): Homolog of NCBI NO: 33150604 NR Description: IFNRC [Homo sapiens]
  misc_feature (1)..(82): Homolog of NCBI NO: 39595350 NR Description: Hypothetical protein CBG03988 [Caenorhabditis
  misc_feature (1)..(82): Homolog of NCBI NO: 27732805 NR Description: similar to Small membrane protein 1 [Rattus
  misc_feature (1)..(82): Homolog of NCBI NO: 34610239 NR Description: small membrane protein 1 [Mus musculus]
  misc_feature (1)..(82): Homolog of NCBI NO: 7657595 NR Description: small membrane protein 1 [Homo sapiens]
  misc_feature (1)..(82): Homolog of NCBI NO: 24657484 NR Description: CG15012-PB [Drosophila melanogaster]
  misc_feature (1)..(44): Homolog of NCBI NO: 25373092 NR Description: protein T32E20.29 [imported] - Arabidopsis
  misc_feature (1)..(82): Homolog of NCBI NO: 18400231 NR Description: expressed protein

SEQ ID NO: 30449 - protein, 80 aa, Arabidopsis thaliana
  peptide (1)..(80): Ceres Seq. ID no. 12322127
IKFLFIYLSNWRRIISSDGFGRTVGDFRTRILRRRFRNRVVVLGRRRRLQFHPSSLRPLPSRHIRFSRSFDVQLRQKRRH

SEQ ID NO: 30450 - DNA, 1040 bp, Arabidopsis thaliana
  misc_feature (1)..(1040): Ceres Seq. ID no. 13492462
  misc_feature: MA Experiment ID: 108462 Result: Up-regulated in Transcription
  misc_feature: MA Experiment 108462 PARAMETER Experiment Name: At_Germinating_Seeds_cDNA_P Parameter: Age (day) Value: 2 vs. 0
  misc_feature: MA Experiment 108462 PARAMETER Experiment Name: At_Germinating_Seeds_cDNA_P Parameter: Tissue Value: Germinating Seeds
  misc_feature: MA Experiment ID: 108463 Result: Up-regulated in Transcription
  misc_feature: MA Experiment 108463 PARAMETER Experiment Name: At_Germinating_Seeds_cDNA_P Parameter: Age (day) Value: 3 vs. 0
  misc_feature: MA Experiment 108463 PARAMETER Experiment Name: At_Germinating_Seeds_cDNA_P Parameter: Tissue Value: Germinating Seeds
  misc_feature: MA Experiment ID: 108464 Result: Up-regulated in Transcription
  misc_feature: MA Experiment 108464 PARAMETER Experiment Name: At_Germinating_Seeds_cDNA_P Parameter: Age (day) Value: 4 vs. 0
  misc_feature: MA Experiment 108464 PARAMETER Experiment Name: At_Germinating_Seeds_cDNA_P Parameter: Tissue Value: Germinating Seeds
  misc_feature: MA Experiment ID: 108489 Result: Up-regulated in Transcription
  misc_feature: MA Experiment ID: 108576 Result: Down-regulated in Transcription
  misc_feature: MA Experiment 108576 PARAMETER Experiment Name: At_42deg_Heat_cDNA_P Parameter: Temperature (deg C) Value: 42 vs. 22
  misc_feature: MA Experiment 108576 PARAMETER Experiment Name: At_42deg_Heat_cDNA_P Parameter: Timepoint (hr) Value: 1
  misc_feature: MA Experiment 108576 PARAMETER Experiment Name: At_42deg_Heat_cDNA_P Parameter: Tissue Value: Aerial
  misc_feature: MA Experiment ID: 108577 Result: Down-regulated in Transcription
  misc_feature: MA Experiment 108577 PARAMETER Experiment Name: At_42deg_Heat_cDNA_P Parameter: Temperature (deg C) Value: 42 vs. 22
  misc_feature: MA Experiment 108577 PARAMETER Experiment Name: At_42deg_Heat_cDNA_P Parameter: Timepoint (hr) Value: 6
  misc_feature: MA Experiment 108577 PARAMETER Experiment Name: At_42deg_Heat_cDNA_P Parameter: Tissue Value: Aerial
  misc_feature: MA Experiment ID: 108579 Result: Down-regulated in Transcription
  misc_feature: MA Experiment 108579 PARAMETER Experiment Name: At_4deg_Cold_cDNA_P Parameter: Temperature (deg C) Value: 4 vs. 22
  misc_feature: MA Experiment 108579 PARAMETER Experiment Name: At_4deg_Cold_cDNA_P Parameter: Timepoint (hr) Value: 6
  misc_feature: MA Experiment 108579 PARAMETER Experiment Name: At_4deg_Cold_cDNA_P Parameter: Tissue Value: Aerial
  misc_feature: MA Experiment ID: 108595 Result: Down-regulated in Transcription
  misc_feature: MA Experiment 108595 PARAMETER Experiment Name: At_Ler-pi_Ovule_cDNA_P Parameter: Plant Line Value: null
  misc_feature: MA Experiment ID: 108607 Result: Down-regulated in Transcription
  misc_feature: MA Experiment 108607 PARAMETER Experiment Name: At_100uM_ABA_cDNA_P Parameter: Timepoint (hr) Value: 4
  misc_feature: MA Experiment 108607 PARAMETER Experiment Name: At_100uM_ABA_cDNA_P Parameter: Tissue Value: Aerial
  misc_feature: MA Experiment 108607 PARAMETER Experiment Name: At_100uM_ABA_cDNA_P Parameter: Treatment Value: 100uM ABA vs. No Treatment
  misc_feature: MA Experiment ID: 108608 Result: Down-regulated in Transcription
  misc_feature: MA Experiment 108608 PARAMETER Experiment Name: At_100uM_ABA_cDNA_P Parameter: Timepoint (hr) Value: 1
  misc_feature: MA Experiment 108608 PARAMETER Experiment Name: At_100uM_ABA_cDNA_P Parameter: Tissue Value: Aerial
  misc_feature: MA Experiment 108608 PARAMETER Experiment Name: At_100uM_ABA_cDNA_P Parameter: Treatment Value: 100uM ABA vs. No Treatment
  misc_feature: MA Experiment ID: 20000069 Result: Down-regulated in Transcription
  misc_feature: MA Experiment 20000069 PARAMETER Experiment Name: At_100uM_ABA_Mutants_cDNA_P Parameter: Plant Line Value: CS23
  misc_feature: MA Experiment 20000069 PARAMETER Experiment Name: At_100uM_ABA_Mutants_cDNA_P Parameter: Timepoint (hr) Value: 6
  misc_feature: MA Experiment 20000069 PARAMETER Experiment Name: At_100uM_ABA_Mutants_cDNA_P Parameter: Tissue Value: Aerial
  misc_feature: MA Experiment 20000069 PARAMETER Experiment Name: At_100uM_ABA_Mutants_cDNA_P Parameter: Treatment Value: 100uM ABA vs. No Treatment
  misc_feature: MA Experiment ID: 20000070 Result: Down-regulated in Transcription
  misc_feature: MA Experiment 20000070 PARAMETER Experiment Name: At_100uM_ABA_Mutants_cDNA_P Parameter: Plant Line Value: CS24
  misc_feature: MA Experiment 20000070 PARAMETER Experiment Name: At_100uM_ABA_Mutants_cDNA_P Parameter: Timepoint (hr) Value: 6
  misc_feature: MA Experiment 20000070 PARAMETER Experiment Name: At_100uM_ABA_Mutants_cDNA_P Parameter: Tissue Value: Aerial
  misc_feature: MA Experiment 20000070 PARAMETER Experiment Name: At_100uM_ABA_Mutants_cDNA_P Parameter: Treatment Value: 100uM ABA vs. No Treatment
  misc_feature: MA Experiment ID: 20000087 Result: Down-regulated in Transcription
  misc_feature: MA Experiment 20000087 PARAMETER Experiment Name: At_100uM_ABA_Mutants_cDNA_P Parameter: Plant Line Value: WS
  misc_feature: MA Experiment 20000087 PARAMETER Experiment Name: At_100uM_ABA_Mutants_cDNA_P Parameter: Timepoint (hr) Value: 6
  misc_feature: MA Experiment 20000087 PARAMETER Experiment Name: At_100uM_ABA_Mutants_cDNA_P Parameter: Tissue Value: Aerial
  misc_feature: MA Experiment 20000087 PARAMETER Experiment Name: At_100uM_ABA_Mutants_cDNA_P Parameter: Treatment Value: 100uM ABA vs. No Treatment
  misc_feature: MA Experiment ID: 20000166 Result: Down-regulated in Transcription
  misc_feature: MA Experiment 20000166 PARAMETER Experiment Name: At_100uM_ABA_P Parameter: Age (day) Value: 14
  misc_feature: MA Experiment 20000166 PARAMETER Experiment Name: At_100uM_ABA_P Parameter: Organism Value: A. thaliana
  misc_feature: MA Experiment 20000166 PARAMETER Experiment Name: At_100uM_ABA_P Parameter: Plant Line Value: WS
  misc_feature: MA Experiment 20000166 PARAMETER Experiment Name: At_100uM_ABA_P Parameter: Timepoint (hr) Value: 1
  misc_feature: MA Experiment 20000166 PARAMETER Experiment Name: At_100uM_ABA_P Parameter: Tissue Value: Aerial
  misc_feature: MA Experiment 20000166 PARAMETER Experiment Name: At_100uM_ABA_P Parameter: Treatment Value: 100uM ABA vs. No Treatment
  misc_feature: MA Experiment ID: 20000180 Result: Up-regulated in Transcription
  misc_feature: MA Experiment 20000180 PARAMETER Experiment Name: At_Germinating_Seeds_P Parameter: Age (hr) Value: 24 vs. 0
  misc_feature: MA Experiment 20000180 PARAMETER Experiment Name: At_Germinating_Seeds_P Parameter: Tissue Value: Germinating Seeds
  misc_feature: MA Experiment ID: 20000184 Result: Up-regulated in Transcription
  misc_feature: MA Experiment 20000184 PARAMETER Experiment Name: At_Shoots__P Parameter: Age (day) Value: 7
  misc_feature: MA Experiment 20000184 PARAMETER Experiment Name: At_Shoots__P Parameter: Tissue Value: Shoots vs. Whole Plant
  misc_feature: MA Experiment ID: 20000185 Result: Up-regulated in Transcription
  misc_feature: MA Experiment 20000185 PARAMETER Experiment Name: At_Roots__P Parameter: Age (day) Value: 7 vs. 21
  misc_feature: MA Experiment 20000185 PARAMETER Experiment Name: At_Roots__P Parameter: Organism Value: A. thaliana
  misc_feature: MA Experiment 20000185 PARAMETER Experiment Name: At_Roots__P Parameter: Tissue Value: Roots vs. Whole Plant
  misc_feature: MA Experiment ID: 20000234 Result: Down-regulated in Transcription
  misc_feature: MA Experiment 20000234 PARAMETER Experiment Name: At_Siliques_P Parameter: Age (day) Value: 21
  misc_feature: MA Experiment 20000234 PARAMETER Experiment Name: At_Siliques_P Parameter: Organism Value: A. thaliana
  misc_feature: MA Experiment 20000234 PARAMETER Experiment Name: At_Siliques_P Parameter: Plant Line Value: WS
  misc_feature: MA Experiment 20000234 PARAMETER Experiment Name: At_Siliques_P Parameter: Tissue Value: Less Than 5mm Siliques vs. Whole Plant
  misc_feature: MA Experiment ID: 20000235 Result: Down-regulated in Transcription
  misc_feature: MA Experiment 20000235 PARAMETER Experiment Name: At_Siliques_P Parameter: Age (day) Value: 21
  misc_feature: MA Experiment 20000235 PARAMETER Experiment Name: At_Siliques_P Parameter: Organism Value: A. thaliana
  misc_feature: MA Experiment 20000235 PARAMETER Experiment Name: At_Siliques_P Parameter: Plant Line Value: WS
  misc_feature: MA Experiment 20000235 PARAMETER Experiment Name: At_Siliques_P Parameter: Tissue Value: 5-10mm Siliques vs. Whole Plant
  misc_feature: MA Experiment ID: 20000264 Result: Down-regulated in Transcription
  misc_feature: MA Experiment 20000264 PARAMETER Experiment Name: At_Open_Flower_P Parameter: Age (day) Value: 21
  misc_feature: MA Experiment 20000264 PARAMETER Experiment Name: At_Open_Flower_P Parameter: Plant Line Value: WS
  misc_feature: MA Experiment 20000264 PARAMETER Experiment Name: At_Open_Flower_P Parameter: Tissue Value: Open Flower vs. Whole Plant
  misc_feature: MA Experiment ID: 20000265 Result: Down-regulated in Transcription
  misc_feature: MA Experiment 20000265 PARAMETER Experiment Name: At_Open_Flower_P Parameter: Age (day) Value: 21
  misc_feature: MA Experiment 20000265 PARAMETER Experiment Name: At_Open_Flower_P Parameter: Plant Line Value: WS
  misc_feature: MA Experiment 20000265 PARAMETER Experiment Name: At_Open_Flower_P Parameter: Tissue Value: Closed Flower vs. Whole Plant
  misc_feature: MA Experiment ID: 20000268 Result: Down-regulated in Transcription
  misc_feature: MA Experiment 20000268 PARAMETER Experiment Name: At_100mM_NaCl__P Parameter: Age (day) Value: 14
  misc_feature: MA Experiment 20000268 PARAMETER Experiment Name: At_100mM_NaCl__P Parameter: Organism Value: A. thaliana
  misc_feature: MA Experiment 20000268 PARAMETER Experiment Name: At_100mM_NaCl__P Parameter: Plant Line Value: WS
  misc_feature: MA Experiment 20000268 PARAMETER Experiment Name: At_100mM_NaCl__P Parameter: Timepoint (hr) Value: 6
  misc_feature: MA Experiment 20000268 PARAMETER Experiment Name: At_100mM_NaCl__P Parameter: Tissue Value: Whole Plant
  misc_feature: MA Experiment 20000268 PARAMETER Experiment Name: At_100mM_NaCl__P Parameter: Treatment Value: 100mM NaCl vs. No Treatment
  misc_feature: MA Experiment ID: 20000269 Result: Down-regulated in Transcription
  misc_feature: MA Experiment 20000269 PARAMETER Experiment Name: At_1mM_KNO3_L-vs-H_Roots_P Parameter: Age (day) Value: 7,10,12
  misc_feature: MA Experiment 20000269 PARAMETER Experiment Name: At_1mM_KNO3_L-vs-H_Roots_P Parameter: Organism Value: A. thaliana
  misc_feature: MA Experiment 20000269 PARAMETER Experiment Name: At_1mM_KNO3_L-vs-H_Roots_P Parameter: Plant Line Value: WS
  misc_feature: MA Experiment 20000269 PARAMETER Experiment Name: At_1mM_KNO3_L-vs-H_Roots_P Parameter: Timepoint (day) Value: 7,10,12
  misc_feature: MA Experiment 20000269 PARAMETER Experiment Name: At_1mM_KNO3_L-vs-H_Roots_P Parameter: Tissue Value: Roots
  misc_feature: MA Experiment 20000269 PARAMETER Experiment Name: At_1mM_KNO3_L-vs-H_Roots_P Parameter: Treatment Value: 1mM KNO3 vs. 50mM KNO3
  misc_feature: MA Experiment ID: 20000286 Result: Down-regulated in Transcription
  misc_feature: MA Experiment 20000286 PARAMETER Experiment Name: At_Open_Flower_P Parameter: Age (day) Value: 21
  misc_feature: MA Experiment 20000286 PARAMETER Experiment Name: At_Open_Flower_P Parameter: Plant Line Value: WS
  misc_feature: MA Experiment 20000286 PARAMETER Experiment Name: At_Open_Flower_P Parameter: Tissue Value: Half Open vs. Whole Plant
  misc_feature: MA Experiment ID: 20000308 Result: Down-regulated in Transcription
  misc_feature: MA Experiment 20000308 PARAMETER Experiment Name: At_100mM_NaCl__P Parameter: Age (day) Value: 17
  misc_feature: MA Experiment 20000308 PARAMETER Experiment Name: At_100mM_NaCl__P Parameter: Organism Value: A. thaliana
  misc_feature: MA Experiment 20000308 PARAMETER Experiment Name: At_100mM_NaCl__P Parameter: Plant Line Value: WS
  misc_feature: MA Experiment 20000308 PARAMETER Experiment Name: At_100mM_NaCl__P Parameter: Timepoint (hr) Value: 72
  misc_feature: MA Experiment 20000308 PARAMETER Experiment Name: At_100mM_NaCl__P Parameter: Tissue Value: Whole Plant
  misc_feature: MA Experiment 20000308 PARAMETER Experiment Name: At_100mM_NaCl__P Parameter: Treatment Value: 100mM NaCl vs. No Treatment
  misc_feature: MA Experiment ID: 20000436 Result: Down-regulated in Transcription
  misc_feature: MA Experiment 20000436 PARAMETER Experiment Name: At_Drought_P Parameter: Age (day) Value: 7
  misc_feature: MA Experiment 20000436 PARAMETER Experiment Name: At_Drought_P Parameter: Organism Value: A. thaliana
  misc_feature: MA Experiment 20000436 PARAMETER Experiment Name: At_Drought_P Parameter: Plant Line Value: WS
  misc_feature: MA Experiment 20000436 PARAMETER Experiment Name: At_Drought_P Parameter: Timepoint (hr) Value: 12
  misc_feature: MA Experiment 20000436 PARAMETER Experiment Name: At_Drought_P Parameter: Tissue Value: Whole Plant
  misc_feature: MA Experiment 20000436 PARAMETER Experiment Name: At_Drought_P Parameter: Treatment Value: Drought vs. No Drought
  misc_feature: MA Experiment ID: 20000437 Result: Down-regulated in Transcription
  misc_feature: MA Experiment 20000437 PARAMETER Experiment Name: At_Drought_P Parameter: Age (day) Value: 8
  misc_feature: MA Experiment 20000437 PARAMETER Experiment Name: At_Drought_P Parameter: Organism Value: A. thaliana
  misc_feature: MA Experiment 20000437 PARAMETER Experiment Name: At_Drought_P Parameter: Plant Line Value: WS
  misc_feature: MA Experiment 20000437 PARAMETER Experiment Name: At_Drought_P Parameter: Timepoint (hr) Value: 24
  misc_feature: MA Experiment 20000437 PARAMETER Experiment Name: At_Drought_P Parameter: Tissue Value: Whole Plant
  misc_feature: MA Experiment 20000437 PARAMETER Experiment Name: At_Drought_P Parameter: Treatment Value: Drought vs. No Drought
  misc_feature: MA Experiment ID: 20000439 Result: Up-regulated in Transcription
  misc_feature: MA Experiment 20000439 PARAMETER Experiment Name: At_Roots__P Parameter: Age (day) Value: 14 vs. 21
  misc_feature: MA Experiment 20000439 PARAMETER Experiment Name: At_Roots__P Parameter: Organism Value: A. thaliana
  misc_feature: MA Experiment 20000439 PARAMETER Experiment Name: At_Roots__P Parameter: Tissue Value: Roots vs. Whole Plant
  misc_feature: MA Experiment ID: 20000453 Result: Down-regulated in Transcription
  misc_feature: MA Experiment 20000453 PARAMETER Experiment Name: At_100uM_ABA_P Parameter: Age (day) Value: 15
  misc_feature: MA Experiment 20000453 PARAMETER Experiment Name: At_100uM_ABA_P Parameter: Organism Value: A. thaliana
  misc_feature: MA Experiment 20000453 PARAMETER Experiment Name: At_100uM_ABA_P Parameter: Plant Line Value: WS
  misc_feature: MA Experiment 20000453 PARAMETER Experiment Name: At_100uM_ABA_P Parameter: Timepoint (hr) Value: 24
  misc_feature: MA Experiment 20000453 PARAMETER Experiment Name: At_100uM_ABA_P Parameter: Tissue Value: Aerial
  misc_feature: MA Experiment 20000453 PARAMETER Experiment Name: At_100uM_ABA_P Parameter: Treatment Value: 100uM ABA vs. No Treatment
  misc_feature: MA Experiment ID: 20000455 Result: Down-regulated in Transcription
  misc_feature: MA Experiment 20000455 PARAMETER Experiment Name: At_100uM_ABA_P Parameter: Age (day) Value: 16
  misc_feature: MA Experiment 20000455 PARAMETER Experiment Name: At_100uM_ABA_P Parameter: Organism Value: A. thaliana
  misc_feature: MA Experiment 20000455 PARAMETER Experiment Name: At_100uM_ABA_P Parameter: Plant Line Value: WS
  misc_feature: MA Experiment 20000455 PARAMETER Experiment Name: At_100uM_ABA_P Parameter: Timepoint (hr) Value: 48
  misc_feature: MA Experiment 20000455 PARAMETER Experiment Name: At_100uM_ABA_P Parameter: Tissue Value: Aerial
  misc_feature: MA Experiment 20000455 PARAMETER Experiment Name: At_100uM_ABA_P Parameter: Treatment Value: 100uM ABA vs. No Treatment
  misc_feature: MA Experiment ID: 20000709 Result: Up-regulated in Transcription
  misc_feature: MA Experiment 20000709 PARAMETER Experiment Name: At_15mM_NH4NO3_L-to-H_P Parameter: Age (hr) Value: 14
  misc_feature: MA Experiment 20000709 PARAMETER Experiment Name: At_15mM_NH4NO3_L-to-H_P Parameter: Organism Value: A. thaliana
  misc_feature: MA Experiment 20000709 PARAMETER Experiment Name: At_15mM_NH4NO3_L-to-H_P Parameter: Plant Line Value: WS
  misc_feature: MA Experiment 20000709 PARAMETER Experiment Name: At_15mM_NH4NO3_L-to-H_P Parameter: Timepoint (hr) Value: 4
  misc_feature: MA Experiment 20000709 PARAMETER Experiment Name: At_15mM_NH4NO3_L-to-H_P Parameter: Tissue Value: Aerial
  misc_feature: MA Experiment 20000709 PARAMETER Experiment Name: At_15mM_NH4NO3_L-to-H_P Parameter: Treatment Value: 15mM NH4NO3 vs. 30mM Mannitol
  misc_feature: MA Experiment ID: 20000794 Result: Down-regulated in Transcription
  misc_feature: MA Experiment 20000794 PARAMETER Experiment Name: At_Petals_P Parameter: Age (day) Value: 23-25 days
  misc_feature: MA Experiment 20000794 PARAMETER Experiment Name: At_Petals_P Parameter: Plant Line Value: WS
  misc_feature: MA Experiment 20000794 PARAMETER Experiment Name: At_Petals_P Parameter: Tissue Value: Petals vs. Whole plant
  misc_feature: MA Experiment ID: 20001247 Result: Up-regulated in Transcription
  misc_feature: MA Experiment 20001247 PARAMETER Experiment Name: At_Far-red-induction_P Parameter: Age (day) Value: 7
  misc_feature: MA Experiment 20001247 PARAMETER Experiment Name: At_Far-red-induction_P Parameter: Light Value: Far-red vs. White
  misc_feature: MA Experiment 20001247 PARAMETER Experiment Name: At_Far-red-induction_P Parameter: Organism Value: A. thaliana
  misc_feature: MA Experiment 20001247 PARAMETER Experiment Name: At_Far-red-induction_P Parameter: Plant Line Value: Columbia
  misc_feature: MA Experiment 20001247 PARAMETER Experiment Name: At_Far-red-induction_P Parameter: Timepoint (hr) Value: 1
  misc_feature: MA Experiment 20001247 PARAMETER Experiment Name: At_Far-red-induction_P Parameter: Tissue Value: Whole Plant
  misc_feature: MA Experiment ID: 20001451 Result: Up-regulated in Transcription
  misc_feature: MA Experiment 20001451 PARAMETER Experiment Name: At_Far-red-induction_P Parameter: Age (day) Value: 7
  misc_feature: MA Experiment 20001451 PARAMETER Experiment Name: At_Far-red-induction_P Parameter: Light Value: Far-red vs. White
  misc_feature: MA Experiment 20001451 PARAMETER Experiment Name: At_Far-red-induction_P Parameter: Organism Value: A. thaliana
  misc_feature: MA Experiment 20001451 PARAMETER Experiment Name: At_Far-red-induction_P Parameter: Plant Line Value: Columbia
  misc_feature: MA Experiment 20001451 PARAMETER Experiment Name: At_Far-red-induction_P Parameter: Timepoint (hr) Value: 24
  misc_feature: MA Experiment 20001451 PARAMETER Experiment Name: At_Far-red-induction_P Parameter: Tissue Value: Whole Plant
  misc_feature: MA Experiment ID: 20001457 Result: Up-regulated in Transcription
  misc_feature: MA Experiment 20001457 PARAMETER Experiment Name: At_50mM_NH4NO3_L-to-H_P Parameter: Age (day) Value: Undefined
  misc_feature: MA Experiment 20001457 PARAMETER Experiment Name: At_50mM_NH4NO3_L-to-H_P Parameter: Organism Value: Undefined
  misc_feature: MA Experiment 20001457 PARAMETER Experiment Name: At_50mM_NH4NO3_L-to-H_P Parameter: Plant Line Value: Undefined
  misc_feature: MA Experiment 20001457 PARAMETER Experiment Name: At_50mM_NH4NO3_L-to-H_P Parameter: Timepoint (hr) Value: 0.5
  misc_feature: MA Experiment 20001457 PARAMETER Experiment Name: At_50mM_NH4NO3_L-to-H_P Parameter: Tissue Value: Siliques
  misc_feature: MA Experiment 20001457 PARAMETER Experiment Name: At_50mM_NH4NO3_L-to-H_P Parameter: Treatment Value: 50mM NH4NO3 vs. 100mM Manitol
  misc_feature: MA Experiment ID: 20001458 Result: Up-regulated in Transcription
  misc_feature: MA Experiment 20001458 PARAMETER Experiment Name: At_50mM_NH4NO3_L-to-H_P Parameter: Age (day) Value: Undefined
  misc_feature: MA Experiment 20001458 PARAMETER Experiment Name: At_50mM_NH4NO3_L-to-H_P Parameter: Organism Value: Undefined
  misc_feature: MA Experiment 20001458 PARAMETER Experiment Name: At_50mM_NH4NO3_L-to-H_P Parameter: Plant Line Value: Undefined
  misc_feature: MA Experiment 20001458 PARAMETER Experiment Name: At_50mM_NH4NO3_L-to-H_P Parameter: Timepoint (hr) Value: 2
  misc_feature: MA Experiment 20001458 PARAMETER Experiment Name: At_50mM_NH4NO3_L-to-H_P Parameter: Tissue Value: Siliques
  misc_feature: MA Experiment 20001458 PARAMETER Experiment Name: At_50mM_NH4NO3_L-to-H_P Parameter: Treatment Value: 50mM NH4NO3 vs. 100mM Manitol
  misc_feature: MA Experiment ID: 20001459 Result: Up-regulated in Transcription
  misc_feature: MA Experiment 20001459 PARAMETER Experiment Name: At_50mM_NH4NO3_L-to-H_P Parameter: Age (day) Value: Undefined
  misc_feature: MA Experiment 20001459 PARAMETER Experiment Name: At_50mM_NH4NO3_L-to-H_P Parameter: Organism Value: Undefined
  misc_feature: MA Experiment 20001459 PARAMETER Experiment Name: At_50mM_NH4NO3_L-to-H_P Parameter: Plant Line Value: Undefined
  misc_feature: MA Experiment 20001459 PARAMETER Experiment Name: At_50mM_NH4NO3_L-to-H_P Parameter: Timepoint (hr) Value: 4
  misc_feature: MA Experiment 20001459 PARAMETER Experiment Name: At_50mM_NH4NO3_L-to-H_P Parameter: Tissue Value: Siliques
  misc_feature: MA Experiment 20001459 PARAMETER Experiment Name: At_50mM_NH4NO3_L-to-H_P Parameter: Treatment Value: 50mM NH4NO3 vs. 100mM Manitol
  misc_feature: MA Experiment ID: 20001554 Result: Down-regulated in Transcription
  misc_feature: MA Experiment 20001554 PARAMETER Experiment Name: At_Drought_Soil_Dry_P Parameter: Age (day) Value: 21
  misc_feature: MA Experiment 20001554 PARAMETER Experiment Name: At_Drought_Soil_Dry_P Parameter: Organism Value: A. thaliana
  misc_feature: MA Experiment 20001554 PARAMETER Experiment Name: At_Drought_Soil_Dry_P Parameter: Plant Line Value: WS
  misc_feature: MA Experiment 20001554 PARAMETER Experiment Name: At_Drought_Soil_Dry_P Parameter: Post Timepoint (hr) Value: None
  misc_feature: MA Experiment 20001554 PARAMETER Experiment Name: At_Drought_Soil_Dry_P Parameter: Post-Treatment Value: None
  misc_feature: MA Experiment 20001554 PARAMETER Experiment Name: At_Drought_Soil_Dry_P Parameter: Timepoint (day) Value: 7
  misc_feature: MA Experiment 20001554 PARAMETER Experiment Name: At_Drought_Soil_Dry_P Parameter: Treatment Value: Drought vs. No Drought
  misc_feature: MA Experiment ID: 20001555 Result: Down-regulated in Transcription
  misc_feature: MA Experiment 20001555 PARAMETER Experiment Name: At_Drought_Soil_Dry_P Parameter: Age (day) Value: 24
  misc_feature: MA Experiment 20001555 PARAMETER Experiment Name: At_Drought_Soil_Dry_P Parameter: Organism Value: A. thaliana
  misc_feature: MA Experiment 20001555 PARAMETER Experiment Name: At_Drought_Soil_Dry_P Parameter: Plant Line Value: WS
  misc_feature: MA Experiment 20001555 PARAMETER Experiment Name: At_Drought_Soil_Dry_P Parameter: Post Timepoint (hr) Value: None
  misc_feature: MA Experiment 20001555 PARAMETER Experiment Name: At_Drought_Soil_Dry_P Parameter: Post-Treatment Value: None
  misc_feature: MA Experiment 20001555 PARAMETER Experiment Name: At_Drought_Soil_Dry_P Parameter: Timepoint (day) Value: 10
  misc_feature: MA Experiment 20001555 PARAMETER Experiment Name: At_Drought_Soil_Dry_P Parameter: Treatment Value: Drought vs. No Drought
  misc_feature: MA Experiment ID: 20001556 Result: Down-regulated in Transcription
  misc_feature: MA Experiment 20001556 PARAMETER Experiment Name: At_Drought_Soil_Dry_P Parameter: Age (day) Value: 26
  misc_feature: MA Experiment 20001556 PARAMETER Experiment Name: At_Drought_Soil_Dry_P Parameter: Organism Value: A. thaliana
  misc_feature: MA Experiment 20001556 PARAMETER Experiment Name: At_Drought_Soil_Dry_P Parameter: Plant Line Value: WS
  misc_feature: MA Experiment 20001556 PARAMETER Experiment Name: At_Drought_Soil_Dry_P Parameter: Post Timepoint (hr) Value: None
  misc_feature: MA Experiment 20001556 PARAMETER Experiment Name: At_Drought_Soil_Dry_P Parameter: Post-Treatment Value: None
  misc_feature: MA Experiment 20001556 PARAMETER Experiment Name: At_Drought_Soil_Dry_P Parameter: Timepoint (day) Value: 12
  misc_feature: MA Experiment 20001556 PARAMETER Experiment Name: At_Drought_Soil_Dry_P Parameter: Treatment Value: Drought vs. No Drought
  misc_feature: MA Experiment ID: 20001559 Result: Down-regulated in Transcription
  misc_feature: MA Experiment 20001559 PARAMETER Experiment Name: At_Drought_Soil_Dry_P Parameter: Age (day) Value: 28
  misc_feature: MA Experiment 20001559 PARAMETER Experiment Name: At_Drought_Soil_Dry_P Parameter: Organism Value: A. thaliana
  misc_feature: MA Experiment 20001559 PARAMETER Experiment Name: At_Drought_Soil_Dry_P Parameter: Plant Line Value: WS
  misc_feature: MA Experiment 20001559 PARAMETER Experiment Name: At_Drought_Soil_Dry_P Parameter: Post Timepoint (hr) Value: 29
  misc_feature: MA Experiment 20001559 PARAMETER Experiment Name: At_Drought_Soil_Dry_P Parameter: Post-Treatment Value: Re-Water vs. No Drought
  misc_feature: MA Experiment 20001559 PARAMETER Experiment Name: At_Drought_Soil_Dry_P Parameter: Timepoint (day) Value: 14
  misc_feature: MA Experiment 20001559 PARAMETER Experiment Name: At_Drought_Soil_Dry_P Parameter: Treatment Value: Drought vs. No Drought
  misc_feature: MA Experiment ID: 20001757 Result: Up-regulated in Transcription
  misc_feature: MA Experiment 20001757 PARAMETER Experiment Name: At_50mM_NH4NO3_L-to-H_P Parameter: Timepoint (hr) Value: 6
  misc_feature: MA Experiment 20001757 PARAMETER Experiment Name: At_50mM_NH4NO3_L-to-H_P Parameter: Tissue Value: Leaf
  misc_feature: MA Experiment 20001757 PARAMETER Experiment Name: At_50mM_NH4NO3_L-to-H_P Parameter: Treatment Value: 50mM NH4NO3 vs 100mM Mannitol
  misc_feature: MA Experiment ID: 20001759 Result: Up-regulated in Transcription
  misc_feature: MA Experiment 20001759 PARAMETER Experiment Name: At_50mM_NH4NO3_L-to-H_P Parameter: Timepoint (hr) Value: 1
  misc_feature: MA Experiment 20001759 PARAMETER Experiment Name: At_50mM_NH4NO3_L-to-H_P Parameter: Tissue Value: Siliques
  misc_feature: MA Experiment 20001759 PARAMETER Experiment Name: At_50mM_NH4NO3_L-to-H_P Parameter: Treatment Value: 50mM NH4NO3 vs 100mM Mannitol
  misc_feature: MA Experiment ID: 20001760 Result: Up-regulated in Transcription
  misc_feature: MA Experiment 20001760 PARAMETER Experiment Name: At_50mM_NH4NO3_L-to-H_P Parameter: Timepoint (hr) Value: 2
  misc_feature: MA Experiment 20001760 PARAMETER Experiment Name: At_50mM_NH4NO3_L-to-H_P Parameter: Tissue Value: Siliques
  misc_feature: MA Experiment 20001760 PARAMETER Experiment Name: At_50mM_NH4NO3_L-to-H_P Parameter: Treatment Value: 50mM NH4NO3 vs 100mM Mannitol
  misc_feature: MA Experiment ID: 20001904 Result: Down-regulated in Transcription
  misc_feature: MA Experiment 20001904 PARAMETER Experiment Name: At_Drought_Reproduction_P Parameter: Age (day) Value: 37
  misc_feature: MA Experiment 20001904 PARAMETER Experiment Name: At_Drought_Reproduction_P Parameter: Organism Value: A. thaliana
  misc_feature: MA Experiment 20001904 PARAMETER Experiment Name: At_Drought_Reproduction_P Parameter: Plant Line Value: WS
  misc_feature: MA Experiment 20001904 PARAMETER Experiment Name: At_Drought_Reproduction_P Parameter: Timepoint (day) Value: 7
  misc_feature: MA Experiment 20001904 PARAMETER Experiment Name: At_Drought_Reproduction_P Parameter: Tissue Value: Rosettes
  misc_feature: MA Experiment 20001904 PARAMETER Experiment Name: At_Drought_Reproduction_P Parameter: Treatment Value: Drought vs. No Drought
  misc_feature: MA Experiment ID: 20001905 Result: Down-regulated in Transcription
  misc_feature: MA Experiment 20001905 PARAMETER Experiment Name: At_Drought_Reproduction_P Parameter: Age (day) Value: 40
  misc_feature: MA Experiment 20001905 PARAMETER Experiment Name: At_Drought_Reproduction_P Parameter: Organism Value: A. thaliana
  misc_feature: MA Experiment 20001905 PARAMETER Experiment Name: At_Drought_Reproduction_P Parameter: Plant Line Value: WS
  misc_feature: MA Experiment 20001905 PARAMETER Experiment Name: At_Drought_Reproduction_P Parameter: Timepoint (day) Value: 10
  misc_feature: MA Experiment 20001905 PARAMETER Experiment Name: At_Drought_Reproduction_P Parameter: Tissue Value: Rosettes
  misc_feature: MA Experiment 20001905 PARAMETER Experiment Name: At_Drought_Reproduction_P Parameter: Treatment Value: Drought vs. No Drought
  misc_feature: MA Experiment ID: 20001906 Result: Down-regulated in Transcription
  misc_feature: MA Experiment 20001906 PARAMETER Experiment Name: At_Drought_Reproduction_P Parameter: Age (day) Value: 35
  misc_feature: MA Experiment 20001906 PARAMETER Experiment Name: At_Drought_Reproduction_P Parameter: Organism Value: A. thaliana
  misc_feature: MA Experiment 20001906 PARAMETER Experiment Name: At_Drought_Reproduction_P Parameter: Plant Line Value: WS
  misc_feature: MA Experiment 20001906 PARAMETER Experiment Name: At_Drought_Reproduction_P Parameter: Timepoint (day) Value: 5
  misc_feature: MA Experiment 20001906 PARAMETER Experiment Name: At_Drought_Reproduction_P Parameter: Tissue Value: Siliques
  misc_feature: MA Experiment 20001906 PARAMETER Experiment Name: At_Drought_Reproduction_P Parameter: Treatment Value: Drought vs. No Drought
  misc_feature: MA Experiment ID: 20001908 Result: Down-regulated in Transcription
  misc_feature: MA Experiment 20001908 PARAMETER Experiment Name: At_Drought_Reproduction_P Parameter: Age (day) Value: 40
  misc_feature: MA Experiment 20001908 PARAMETER Experiment Name: At_Drought_Reproduction_P Parameter: Organism Value: A. thaliana
  misc_feature: MA Experiment 20001908 PARAMETER Experiment Name: At_Drought_Reproduction_P Parameter: Plant Line Value: WS
  misc_feature: MA Experiment 20001908 PARAMETER Experiment Name: At_Drought_Reproduction_P Parameter: Timepoint (day) Value: 10
  misc_feature: MA Experiment 20001908 PARAMETER Experiment Name: At_Drought_Reproduction_P Parameter: Tissue Value: Siliques
  misc_feature: MA Experiment 20001908 PARAMETER Experiment Name: At_Drought_Reproduction_P Parameter: Treatment Value: Drought vs. No Drought
  misc_feature: MA Experiment ID: 20001911 Result: Down-regulated in Transcription
  misc_feature: MA Experiment 20001911 PARAMETER Experiment Name: At_Drought_Reproduction_P Parameter: Age (day) Value: 40
  misc_feature: MA Experiment 20001911 PARAMETER Experiment Name: At_Drought_Reproduction_P Parameter: Organism Value: A. thaliana
  misc_feature: MA Experiment 20001911 PARAMETER Experiment Name: At_Drought_Reproduction_P Parameter: Plant Line Value: WS
  misc_feature: MA Experiment 20001911 PARAMETER Experiment Name: At_Drought_Reproduction_P Parameter: Timepoint (day) Value: 10
  misc_feature: MA Experiment 20001911 PARAMETER Experiment Name: At_Drought_Reproduction_P Parameter: Tissue Value: Flowers
  misc_feature: MA Experiment 20001911 PARAMETER Experiment Name: At_Drought_Reproduction_P Parameter: Treatment Value: Drought vs. No Drought
aaacattgaaacactttgtcccactctctctctttctctttcttgtaccaaaagctttttgaatctccaagattatagcaaaaccaaagataaaatactaacttaaaaagatttctgaaaataatgagttgcaatggttgtcgagttctacgaaaaggttgcagtgagaattgcatcctccgtccatgtattcaatggatcgaatcacctgaagctcaaggccacgccaccgtcttcgtcgctaagttcttcggccgtgccggtttaatgtctttcatctccgccgtaccggaatctcaatgccctgctttgtttcagtctttgctatacgaagcttgtgggagaactgtgaatccggtgaacggagccgtcggattgttgtggacggggaattggaatgtttgtcaagcggcggttgagacggtgcttcgtggtggttctttaaaaccaataccggagcttcttaacggcggtggattcgccgggtttccgtctcctacttccgacgaagcttcggagatctgtacggaaatgttgaatctacgaaaagctgatgattccggtgatcggaacatttatcatcactgccgattctcaagctctagatctagatcaagatcaacagcttctccgccgaaacggaaacgattatcgtcggaacaacaaccttcgtcggagcttgatctctctcttattcctatttatccgattaaaaccttgccgtttaaggaagatacaccgtcgatgtactcggaggagtctgttaccacggtttcgtttcaaaacaacaacgccggtgatcggtacgtacgctgcggcggaggaggaggaggagcaacgacaaagttgctcaatctcttcgcttgaacggcgtcgtttttgttatgagggttaaaaatgtaatttcgagtaactttttgttgtggccttttttggattaatagcccttaatattttgtgaaatgtagcaaattacgtgatttatttctctctttaattatgagaaattatccaaagtaatagagaataatgatataatt

SEQ ID NO: 30451 - protein, 247 aa, Arabidopsis thaliana
  peptide (1)..(247): Ceres Seq. ID no. 13492463
  misc_feature (2)..(107): Pfam Name: Protein of unknown function DUF260 Pfam Description: Protein of unknown function DUF260
  misc_feature (1)..(111): Homolog of NCBI NO: 34895540 NR Description: unnamed protein product [Oryza sativa (japonica
  misc_feature (1)..(193): Homolog of NCBI NO: 15219829 NR Description: lateral organ boundaries (LOB) domain family
  misc_feature (1)..(247): Homolog of NCBI NO: 40539088 NR Description: expressed protein [Oryza sativa (japonica
  misc_feature (1)..(216): Homolog of NCBI NO: 34394489 NR Description: putative lateral organ boundaries (LOB) domain
  misc_feature (1)..(246): Homolog of NCBI NO: 15235604 NR Description: lateral organ boundaries (LOB) domain family
  misc_feature (1)..(246): Homolog of NCBI NO: 21592894 NR Description: unknown [Arabidopsis thaliana]
  misc_feature (1)..(246): Homolog of NCBI NO: 21593577 NR Description: unknown [Arabidopsis thaliana]
  misc_feature (1)..(246): Homolog of NCBI NO: 15240739 NR Description: lateral organ boundaries (LOB) domain protein 37
  misc_feature (1)..(247): Homolog of NCBI NO: 21553886 NR Description: unknown [Arabidopsis thaliana]
  misc_feature (1)..(247): Homolog of NCBI NO: 15229644 NR Description: lateral organ boundaries (LOB) domain protein,
MSCNGCRVLRKGCSENCILRPCIQWIESPEAQGHATVFVAKFFGRAGLMSFISAVPESQCPALFQSLLYEACGRTVNPVNGAVGLLWTGNWNVCQAAVETVLRGGSLKPIPELLNGGGFAGFPSPTSDEASEICTEMLNLRKADDSGDRNIYHHCRFSSSRSRSRSTASPPKRKRLSSEQQPSSELDLSLIPIYPIKTLPFKEDTPSMYSEESVTTVSFQNNNAGDRYVRCGGGGGGATTKLLNLFA

SEQ ID NO: 30452 - protein, 199 aa, Arabidopsis thaliana
  peptide (1)..(199): Ceres Seq. ID no. 13492464
  misc_feature (1)..(59): Pfam Name: Protein of unknown function DUF260 Pfam Description: Protein of unknown function DUF260
  misc_feature (1)..(63): Homolog of NCBI NO: 34895540 NR Description: unnamed protein product [Oryza sativa (japonica
  misc_feature (1)..(145): Homolog of NCBI NO: 15219829 NR Description: lateral organ boundaries (LOB) domain family
  misc_feature (1)..(199): Homolog of NCBI NO: 40539088 NR Description: expressed protein [Oryza sativa (japonica
  misc_feature (1)..(168): Homolog of NCBI NO: 34394489 NR Description: putative lateral organ boundaries (LOB) domain
  misc_feature (1)..(198): Homolog of NCBI NO: 15235604 NR Description: lateral organ boundaries (LOB) domain family
  misc_feature (1)..(198): Homolog of NCBI NO: 21592894 NR Description: unknown [Arabidopsis thaliana]
  misc_feature (1)..(198): Homolog of NCBI NO: 21593577 NR Description: unknown [Arabidopsis thaliana]
  misc_feature (1)..(198): Homolog of NCBI NO: 15240739 NR Description: lateral organ boundaries (LOB) domain protein 37
  misc_feature (1)..(199): Homolog of NCBI NO: 21553886 NR Description: unknown [Arabidopsis thaliana]
  misc_feature (1)..(199): Homolog of NCBI NO: 15229644 NR Description: lateral organ boundaries (LOB) domain protein,
MSFISAVPESQCPALFQSLLYEACGRTVNPVNGAVGLLWTGNWNVCQAAVETVLRGGSLKPIPELLNGGGFAGFPSPTSDEASEICTEMLNLRKADDSGDRNIYHHCRFSSSRSRSRSTASPPKRKRLSSEQQPSSELDLSLIPIYPIKTLPFKEDTPSMYSEESVTTVSFQNNNAGDRYVRCGGGGGGATTKLLNLFA

SEQ ID NO: 30453 - DNA, 662 bp, Arabidopsis thaliana
  misc_feature (1)..(662): Ceres Seq. ID no. 12579870
  misc_feature: MA Experiment ID: 108434 Result: Down-regulated in Transcription
  misc_feature: MA Experiment 108434 PARAMETER Experiment Name: At_Root_Tips_cDNA_P Parameter: Tissue Value: Root Tips
  misc_feature: MA Experiment ID: 108435 Result: Down-regulated in Transcription
  misc_feature: MA Experiment 108435 PARAMETER Experiment Name: At_stm_Mutants_cDNA_P Parameter: Plant Line Value: wt Landsburg vs stm
  misc_feature: MA Experiment 108435 PARAMETER Experiment Name: At_stm_Mutants_cDNA_P Parameter: Tissue Value: Shoot Apical Meristem Region
  misc_feature: MA Experiment ID: 108464 Result: Up-regulated in Transcription
  misc_feature: MA Experiment 108464 PARAMETER Experiment Name: At_Germinating_Seeds_cDNA_P Parameter: Age (day) Value: 4 vs. 0
  misc_feature: MA Experiment 108464 PARAMETER Experiment Name: At_Germinating_Seeds_cDNA_P Parameter: Tissue Value: Germinating Seeds
  misc_feature: MA Experiment ID: 108488 Result: Down-regulated in Transcription
  misc_feature: MA Experiment ID: 108501 Result: Down-regulated in Transcription
  misc_feature: MA Experiment 108501 PARAMETER Experiment Name: At_ap2_floral_buds_cDNA_P Parameter: Plant Line Value: ap2 (Ler.)
  misc_feature: MA Experiment 108501 PARAMETER Experiment Name: At_ap2_floral_buds_cDNA_P Parameter: Tissue Value: Closed Flower
  misc_feature: MA Experiment ID: 108573 Result: Up-regulated in Transcription
  misc_feature: MA Experiment 108573 PARAMETER Experiment Name: At_Drought_cDNA_P Parameter: Timepoint (hr) Value: 6
  misc_feature: MA Experiment 108573 PARAMETER Experiment Name: At_Drought_cDNA_P Parameter: Tissue Value: Aerial
  misc_feature: MA Experiment 108573 PARAMETER Experiment Name: At_Drought_cDNA_P Parameter: Treatment Value: Drought vs. No Drought
  misc_feature: MA Experiment ID: 108574 Result: Down-regulated in Transcription
  misc_feature: MA Experiment 108574 PARAMETER Experiment Name: At_Wounding__cDNA_P Parameter: Timepoint (hr) Value: 1
  misc_feature: MA Experiment 108574 PARAMETER Experiment Name: At_Wounding__cDNA_P Parameter: Tissue Value: Aerial
  misc_feature: MA Experiment 108574 PARAMETER Experiment Name: At_Wounding__cDNA_P Parameter: Treatment Value: Wounding vs. No Wounding
  misc_feature: MA Experiment ID: 108579 Result: Down-regulated in Transcription
  misc_feature: MA Experiment 108579 PARAMETER Experiment Name: At_4deg_Cold_cDNA_P Parameter: Temperature (deg C) Value: 4 vs. 22
  misc_feature: MA Experiment 108579 PARAMETER Experiment Name: At_4deg_Cold_cDNA_P Parameter: Timepoint (hr) Value: 6
  misc_feature: MA Experiment 108579 PARAMETER Experiment Name: At_4deg_Cold_cDNA_P Parameter: Tissue Value: Aerial
  misc_feature: MA Experiment ID: 20000111 Result: Down-regulated in Transcription
  misc_feature: MA Experiment 20000111 PARAMETER Experiment Name: At_42deg_Heat_cDNA_P Parameter: Temperature (deg C) Value: 42 vs. 22
  misc_feature: MA Experiment 20000111 PARAMETER Experiment Name: At_42deg_Heat_cDNA_P Parameter: Timepoint (hr) Value: 6
  misc_feature: MA Experiment 20000111 PARAMETER Experiment Name: At_42deg_Heat_cDNA_P Parameter: Tissue Value: Aerial
  misc_feature: MA Experiment ID: 20000213 Result: Down-regulated in Transcription
  misc_feature: MA Experiment 20000213 PARAMETER Experiment Name: At_4deg_Cold_P Parameter: Timepoint (hr) Value: 2
  misc_feature: MA Experiment ID: 20000224 Result: Down-regulated in Transcription
  misc_feature: MA Experiment ID: 20000234 Result: Down-regulated in Transcription
  misc_feature: MA Experiment 20000234 PARAMETER Experiment Name: At_Siliques_P Parameter: Age (day) Value: 21
  misc_feature: MA Experiment 20000234 PARAMETER Experiment Name: At_Siliques_P Parameter: Organism Value: A. thaliana
  misc_feature: MA Experiment 20000234 PARAMETER Experiment Name: At_Siliques_P Parameter: Plant Line Value: WS
  misc_feature: MA Experiment 20000234 PARAMETER Experiment Name: At_Siliques_P Parameter: Tissue Value: Less Than 5mm Siliques vs. Whole Plant
  misc_feature: MA Experiment ID: 20000286 Result: Down-regulated in Transcription
  misc_feature: MA Experiment 20000286 PARAMETER Experiment Name: At_Open_Flower_P Parameter: Age (day) Value: 21
  misc_feature: MA Experiment 20000286 PARAMETER Experiment Name: At_Open_Flower_P Parameter: Plant Line Value: WS
  misc_feature: MA Experiment 20000286 PARAMETER Experiment Name: At_Open_Flower_P Parameter: Tissue Value: Half Open vs. Whole Plant
  misc_feature: MA Experiment ID: 20001248 Result: Up-regulated in Transcription
  misc_feature: MA Experiment 20001248 PARAMETER Experiment Name: At_Far-red-induction_P Parameter: Age (day) Value: 7
  misc_feature: MA Experiment 20001248 PARAMETER Experiment Name: At_Far-red-induction_P Parameter: Light Value: Far-red vs. White
  misc_feature: MA Experiment 20001248 PARAMETER Experiment Name: At_Far-red-induction_P Parameter: Organism Value: A. thaliana
  misc_feature: MA Experiment 20001248 PARAMETER Experiment Name: At_Far-red-induction_P Parameter: Plant Line Value: Columbia
  misc_feature: MA Experiment 20001248 PARAMETER Experiment Name: At_Far-red-induction_P Parameter: Timepoint (hr) Value: 4
  misc_feature: MA Experiment 20001248 PARAMETER Experiment Name: At_Far-red-induction_P Parameter: Tissue Value: Whole Plant
  misc_feature: MA Experiment ID: 20001450 Result: Up-regulated in Transcription
  misc_feature: MA Experiment 20001450 PARAMETER Experiment Name: At_Far-red-induction_P Parameter: Age (day) Value: 7
  misc_feature: MA Experiment 20001450 PARAMETER Experiment Name: At_Far-red-induction_P Parameter: Light Value: Far-red vs. White
  misc_feature: MA Experiment 20001450 PARAMETER Experiment Name: At_Far-red-induction_P Parameter: Organism Value: A. thaliana
  misc_feature: MA Experiment 20001450 PARAMETER Experiment Name: At_Far-red-induction_P Parameter: Plant Line Value: Columbia
  misc_feature: MA Experiment 20001450 PARAMETER Experiment Name: At_Far-red-induction_P Parameter: Timepoint (hr) Value: 8
  misc_feature: MA Experiment 20001450 PARAMETER Experiment Name: At_Far-red-induction_P Parameter: Tissue Value: Whole Plant
  misc_feature: MA Experiment ID: 20001557 Result: Down-regulated in Transcription
  misc_feature: MA Experiment 20001557 PARAMETER Experiment Name: At_Drought_Soil_Dry_P Parameter: Age (day) Value: 27
  misc_feature: MA Experiment 20001557 PARAMETER Experiment Name: At_Drought_Soil_Dry_P Parameter: Organism Value: A. thaliana
  misc_feature: MA Experiment 20001557 PARAMETER Experiment Name: At_Drought_Soil_Dry_P Parameter: Plant Line Value: WS
  misc_feature: MA Experiment 20001557 PARAMETER Experiment Name: At_Drought_Soil_Dry_P Parameter: Post Timepoint (hr) Value: 3
  misc_feature: MA Experiment 20001557 PARAMETER Experiment Name: At_Drought_Soil_Dry_P Parameter: Post-Treatment Value: Re-Water vs. No Drought
  misc_feature: MA Experiment 20001557 PARAMETER Experiment Name: At_Drought_Soil_Dry_P Parameter: Timepoint (day) Value: 13
  misc_feature: MA Experiment 20001557 PARAMETER Experiment Name: At_Drought_Soil_Dry_P Parameter: Treatment Value: Drought vs. No Drought
  misc_feature: MA Experiment ID: 20001558 Result: Down-regulated in Transcription
  misc_feature: MA Experiment 20001558 PARAMETER Experiment Name: At_Drought_Soil_Dry_P Parameter: Age (day) Value: 27
  misc_feature: MA Experiment 20001558 PARAMETER Experiment Name: At_Drought_Soil_Dry_P Parameter: Organism Value: A. thaliana
  misc_feature: MA Experiment 20001558 PARAMETER Experiment Name: At_Drought_Soil_Dry_P Parameter: Plant Line Value: WS
  misc_feature: MA Experiment 20001558 PARAMETER Experiment Name: At_Drought_Soil_Dry_P Parameter: Post Timepoint (hr) Value: 6
  misc_feature: MA Experiment 20001558 PARAMETER Experiment Name: At_Drought_Soil_Dry_P Parameter: Post-Treatment Value: Re-Water vs. No Drought
  misc_feature: MA Experiment 20001558 PARAMETER Experiment Name: At_Drought_Soil_Dry_P Parameter: Timepoint (day) Value: 13
  misc_feature: MA Experiment 20001558 PARAMETER Experiment Name: At_Drought_Soil_Dry_P Parameter: Treatment Value: Drought vs. No Drought
  misc_feature: MA Experiment ID: 20001560 Result: Down-regulated in Transcription
  misc_feature: MA Experiment 20001560 PARAMETER Experiment Name: At_Drought_Soil_Dry_P Parameter: Age (day) Value: 28
  misc_feature: MA Experiment 20001560 PARAMETER Experiment Name: At_Drought_Soil_Dry_P Parameter: Organism Value: A. thaliana
  misc_feature: MA Experiment 20001560 PARAMETER Experiment Name: At_Drought_Soil_Dry_P Parameter: Plant Line Value: WS
  misc_feature: MA Experiment 20001560 PARAMETER Experiment Name: At_Drought_Soil_Dry_P Parameter: Post Timepoint (hr) Value: None
  misc_feature: MA Experiment 20001560 PARAMETER Experiment Name: At_Drought_Soil_Dry_P Parameter: Post-Treatment Value: None
  misc_feature: MA Experiment 20001560 PARAMETER Experiment Name: At_Drought_Soil_Dry_P Parameter: Timepoint (day) Value: 14
  misc_feature: MA Experiment 20001560 PARAMETER Experiment Name: At_Drought_Soil_Dry_P Parameter: Treatment Value: Drought vs. No Drought
  misc_feature: MA Experiment ID: 20001911 Result: Up-regulated in Transcription
  misc_feature: MA Experiment 20001911 PARAMETER Experiment Name: At_Drought_Reproduction_P Parameter: Age (day) Value: 40
  misc_feature: MA Experiment 20001911 PARAMETER Experiment Name: At_Drought_Reproduction_P Parameter: Organism Value: A. thaliana
  misc_feature: MA Experiment 20001911 PARAMETER Experiment Name: At_Drought_Reproduction_P Parameter: Plant Line Value: WS
  misc_feature: MA Experiment 20001911 PARAMETER Experiment Name: At_Drought_Reproduction_P Parameter: Timepoint (day) Value: 10
  misc_feature: MA Experiment 20001911 PARAMETER Experiment Name: At_Drought_Reproduction_P Parameter: Tissue Value: Flowers
  misc_feature: MA Experiment 20001911 PARAMETER Experiment Name: At_Drought_Reproduction_P Parameter: Treatment Value: Drought vs. No Drought
atttgctttttctttcatatcttttcgttaattgttgttgttatcttcaacgatagcgttgtgctctggagaagtgtttgatcgcagaaaagcttcgttctttgtagtctacaggcgtggaaggaatggcaaaaagctcgttcaagcaagagcatgacttagagaagagaagggcagaggctgctaggattagagagaagtatcctgataggattccggtgattgttgagaaggctgagaagagtgatataccaaccatcgacaagaaaaagtacctagtcccggctgatctgactgtgggacagtttgtgtatgtcattcgcaaaagaatcaaattgagtgcagaaaaggctatcttcatattcgtggacaatgttcttcctccaacaggtgcgctcatgtcttctgtgtacgaagagaaaaaggatgatgatgggttcctctatgtcacttaaagcggagaaaacacatttggatttggatctccataatagagacctcttgctggatatttcattttactcctctctattttcaccaaatatttcatcttcttattaattactaagcaagcaagccacctatgtacttattctctaaggacctttggtcgggcgttaatatgtacagaaaacataaaataatgtatataatcttctttc

SEQ ID NO: 30454 - protein, 109 aa, Arabidopsis thaliana
  peptide (1)..(109): Ceres Seq. ID no. 12579871
  misc_feature (14)..(109): Pfam Name: Microtubule associated protein 1A/1B, light chain 3 Pfam Description: Microtubule associated protein 1A/1B, light
  misc_feature (1)..(109): Homolog of NCBI NO: 38344173 NR Description: OSJNBa0053K19.12 [Oryza sativa (japonica
  misc_feature (1)..(109): Homolog of NCBI NO: 34595981 NR Description: microtubule-associated protein 1 light chain 3
  misc_feature (1)..(109): Homolog of NCBI NO: 15224577 NR Description: putative microtubule-associated protein
  misc_feature (1)..(109): Homolog of NCBI NO: 21592920 NR Description: putative microtubule-associated protein
  misc_feature (1)..(109): Homolog of NCBI NO: 15232387 NR Description: putative protein
  misc_feature (1)..(109): Homolog of NCBI NO: 40253647 NR Description: putative microtubial binding protein
  misc_feature (1)..(109): Homolog of NCBI NO: 15225418 NR Description: putative microtubule-associated protein
  misc_feature (1)..(109): Homolog of NCBI NO: 15724332 NR Description: At2g45170/T14P1.2 [Arabidopsis thaliana]
  misc_feature (1)..(109): Homolog of NCBI NO: 21615419 NR Description: microtubule associated protein [Cicer arietinum]
  misc_feature (1)..(109): Homolog of NCBI NO: 18414683 NR Description: symbiosis-related like protein
MAKSSFKQEHDLEKRRAEAARIREKYPDRIPVIVEKAEKSDIPTIDKKKYLVPADLTVGQFVYVIRKRIKLSAEKAIFIFVDNVLPPTGALMSSVYEEKKDDDGFLYVT

SEQ ID NO: 30455 - protein, 62 aa, Arabidopsis thaliana
  peptide (1)..(62): Ceres Seq. ID no. 12579872
  misc_feature (1)..(62): Homolog of NCBI NO: 7446943 NR Description: hypothetical protein - Arabidopsis thaliana
MFFLQQVRSCLLCTKRKRMMMGSSMSLKAEKTHLDLDLHNRDLLLDISFYSSLFSPNISSSY

SEQ ID NO: 30456 - DNA, 737 bp, Arabidopsis thaliana
  misc_feature (1)..(737): Ceres Seq. ID no. 13653789
  misc_feature: MA Experiment ID: 20000171 Result: Up-regulated in Transcription
  misc_feature: MA Experiment 20000171 PARAMETER Experiment Name: At_42deg_Heat_P Parameter: Age (day) Value: 14
  misc_feature: MA Experiment 20000171 PARAMETER Experiment Name: At_42deg_Heat_P Parameter: Organism Value: A. thaliana
  misc_feature: MA Experiment 20000171 PARAMETER Experiment Name: At_42deg_Heat_P Parameter: Plant Line Value: WS
  misc_feature: MA Experiment 20000171 PARAMETER Experiment Name: At_42deg_Heat_P Parameter: Temperature (deg C) Value: 42 vs. 22
  misc_feature: MA Experiment 20000171 PARAMETER Experiment Name: At_42deg_Heat_P Parameter: Timepoint (hr) Value: 1
  misc_feature: MA Experiment 20000171 PARAMETER Experiment Name: At_42deg_Heat_P Parameter: Tissue Value: Aerial
  misc_feature: MA Experiment ID: 20000173 Result: Up-regulated in Transcription
  misc_feature: MA Experiment 20000173 PARAMETER Experiment Name: At_42deg_Heat_P Parameter: Age (day) Value: 14
  misc_feature: MA Experiment 20000173 PARAMETER Experiment Name: At_42deg_Heat_P Parameter: Organism Value: A. thaliana
  misc_feature: MA Experiment 20000173 PARAMETER Experiment Name: At_42deg_Heat_P Parameter: Plant Line Value: WS
  misc_feature: MA Experiment 20000173 PARAMETER Experiment Name: At_42deg_Heat_P Parameter: Temperature (deg C) Value: 42 vs. 22
  misc_feature: MA Experiment 20000173 PARAMETER Experiment Name: At_42deg_Heat_P Parameter: Timepoint (hr) Value: 6
  misc_feature: MA Experiment 20000173 PARAMETER Experiment Name: At_42deg_Heat_P Parameter: Tissue Value: Aerial
  misc_feature: MA Experiment ID: 20000214 Result: Down-regulated in Transcription
  misc_feature: MA Experiment 20000214 PARAMETER Experiment Name: At_4deg_Cold_P Parameter: Timepoint (hr) Value: 6
  misc_feature: MA Experiment ID: 20000794 Result: Up-regulated in Transcription
  misc_feature: MA Experiment 20000794 PARAMETER Experiment Name: At_Petals_P Parameter: Age (day) Value: 23-25 days
  misc_feature: MA Experiment 20000794 PARAMETER Experiment Name: At_Petals_P Parameter: Plant Line Value: WS
  misc_feature: MA Experiment 20000794 PARAMETER Experiment Name: At_Petals_P Parameter: Tissue Value: Petals vs. Whole plant
  misc_feature: MA Experiment ID: 20001554 Result: Up-regulated in Transcription
  misc_feature: MA Experiment 20001554 PARAMETER Experiment Name: At_Drought_Soil_Dry_P Parameter: Age (day) Value: 21
  misc_feature: MA Experiment 20001554 PARAMETER Experiment Name: At_Drought_Soil_Dry_P Parameter: Organism Value: A. thaliana
  misc_feature: MA Experiment 20001554 PARAMETER Experiment Name: At_Drought_Soil_Dry_P Parameter: Plant Line Value: WS
  misc_feature: MA Experiment 20001554 PARAMETER Experiment Name: At_Drought_Soil_Dry_P Parameter: Post Timepoint (hr) Value: None
  misc_feature: MA Experiment 20001554 PARAMETER Experiment Name: At_Drought_Soil_Dry_P Parameter: Post-Treatment Value: None
  misc_feature: MA Experiment 20001554 PARAMETER Experiment Name: At_Drought_Soil_Dry_P Parameter: Timepoint (day) Value: 7
  misc_feature: MA Experiment 20001554 PARAMETER Experiment Name: At_Drought_Soil_Dry_P Parameter: Treatment Value: Drought vs. No Drought
  misc_feature: MA Experiment ID: 20001555 Result: Up-regulated in Transcription
  misc_feature: MA Experiment 20001555 PARAMETER Experiment Name: At_Drought_Soil_Dry_P Parameter: Age (day) Value: 24
  misc_feature: MA Experiment 20001555 PARAMETER Experiment Name: At_Drought_Soil_Dry_P Parameter: Organism Value: A. thaliana
  misc_feature: MA Experiment 20001555 PARAMETER Experiment Name: At_Drought_Soil_Dry_P Parameter: Plant Line Value: WS
  misc_feature: MA Experiment 20001555 PARAMETER Experiment Name: At_Drought_Soil_Dry_P Parameter: Post Timepoint (hr) Value: None
  misc_feature: MA Experiment 20001555 PARAMETER Experiment Name: At_Drought_Soil_Dry_P Parameter: Post-Treatment Value: None
  misc_feature: MA Experiment 20001555 PARAMETER Experiment Name: At_Drought_Soil_Dry_P Parameter: Timepoint (day) Value: 10
  misc_feature: MA Experiment 20001555 PARAMETER Experiment Name: At_Drought_Soil_Dry_P Parameter: Treatment Value: Drought vs. No Drought
ctcgcattaagtccaaacactttcatttgtctcctttcgtcaactccacagagatctcctcatggctccaattgctgtcggcgatgtcgtaccagacggaactatctccttcttcgatgagaatgatcaacttcagaccgcctccgttcactctctcgccgccggtaaaaaagtcattctctttggtgttcctggtgctttcactcccacttgcagcatgaagcatgttcctgggttcattgagaaagcagaggagctgaagtcaaagggtgttgatgagatcatttgctttagcgtgaacaatccgtttgtgatgaaagcatgggggaaaacatacccagagaacaaacatgtgaagtttgtagctgatgggtctggagaatacacacaccttctcggacttgagcttgaccttaaagacaagggtcttggtgttaggtcaaggagatttgctctgttacttgatgatctcaaagtgactgtagccaatgtcgaatctggtggcgaattcacagtttccagcgccgatgatatcctcaaggctctctaagaaatgtaccacttgtgttgtctatgtaaaccgctgtatgtgtagtagaggattctatagcttgttctcagacattaaccaaggttgtaataaagcggtttcattgtgacttgtttggcataacaaagtatttggttttgttgtttttctgtgcgttgattaatgaaagatgtgactcattgacgtc

SEQ ID NO: 30457 - protein, 162 aa, Arabidopsis thaliana
  peptide (1)..(162): Ceres Seq. ID no. 13653790
  misc_feature (6)..(160): Pfam Name: AhpC/TSA family Pfam Description: AhpC/TSA family
  misc_feature (1)..(162): Homolog of NCBI NO: 19548660 NR Description: peroxiredoxin [Populus tremula x Populus
  misc_feature (1)..(162): Homolog of NCBI NO: 18654477 NR Description: thioredoxin peroxidase [Capsicum annuum]
  misc_feature (1)..(162): Homolog of NCBI NO: 30841938 NR Description: thioredoxin peroxidase 1 [Lycopersicon esculentum]
  misc_feature (1)..(162): Homolog of NCBI NO: 21553913 NR Description: peroxiredoxin, putative [Arabidopsis thaliana]
  misc_feature (1)..(162): Homolog of NCBI NO: 4704732 NR Description: peroxiredoxin TPx2 [Arabidopsis thaliana]
  misc_feature (1)..(162): Homolog of NCBI NO: 18406870 NR Description: peroxiredoxin -related [Arabidopsis thaliana]
  misc_feature (1)..(162): Homolog of NCBI NO: 15218876 NR Description: type 2 peroxiredoxin -related [Arabidopsis
  misc_feature (1)..(162): Homolog of NCBI NO: 21593881 NR Description: type 2 peroxiredoxin, putative [Arabidopsis
  misc_feature (1)..(162): Homolog of NCBI NO: 4928472 NR Description: type 2 peroxiredoxin [Brassica rapa subsp.
  misc_feature (1)..(162): Homolog of NCBI NO: 15218877 NR Description: type 2 peroxiredoxin -related [Arabidopsis
MAPIAVGDVVPDGTISFFDENDQLQTASVHSLAAGKKVILFGVPGAFTPTCSMKHVPGFIEKAEELKSKGVDEIICFSVNNPFVMKAWGKTYPENKHVKFVADGSGEYTHLLGLELDLKDKGLGVRSRRFALLLDDLKVTVANVESGGEFTVSSADDILKAL

SEQ ID NO: 30458 - protein, 110 aa, Arabidopsis thaliana
  peptide (1)..(110): Ceres Seq. ID no. 13653791
  misc_feature (1)..(108): Pfam Name: AhpC/TSA family Pfam Description: AhpC/TSA family
  misc_feature (1)..(110): Homolog of NCBI NO: 19548660 NR Description: peroxiredoxin [Populus tremula x Populus
  misc_feature (1)..(110): Homolog of NCBI NO: 18654477 NR Description: thioredoxin peroxidase [Capsicum annuum]
  misc_feature (1)..(110): Homolog of NCBI NO: 30841938 NR Description: thioredoxin peroxidase 1 [Lycopersicon esculentum]
  misc_feature (1)..(110): Homolog of NCBI NO: 21553913 NR Description: peroxiredoxin, putative [Arabidopsis thaliana]
  misc_feature (1)..(110): Homolog of NCBI NO: 4704732 NR Description: peroxiredoxin TPx2 [Arabidopsis thaliana]
  misc_feature (1)..(110): Homolog of NCBI NO: 18406870 NR Description: peroxiredoxin -related [Arabidopsis thaliana]
  misc_feature (1)..(110): Homolog of NCBI NO: 15218876 NR Description: type 2 peroxiredoxin -related [Arabidopsis
  misc_feature (1)..(110): Homolog of NCBI NO: 21593881 NR Description: type 2 peroxiredoxin, putative [Arabidopsis
  misc_feature (1)..(110): Homolog of NCBI NO: 4928472 NR Description: type 2 peroxiredoxin [Brassica rapa subsp.
  misc_feature (1)..(110): Homolog of NCBI NO: 15218877 NR Description: type 2 peroxiredoxin -related [Arabidopsis
MKHVPGFIEKAEELKSKGVDEIICFSVNNPFVMKAWGKTYPENKHVKFVADGSGEYTHLLGLELDLKDKGLGVRSRRFALLLDDLKVTVANVESGGEFTVSSADDILKAL

SEQ ID NO: 30459 - DNA, 706 bp, Arabidopsis thaliana
  misc_feature (1)..(706): Ceres Seq. ID no. 12325438
  misc_feature: MA Experiment ID: 108464 Result: Up-regulated in Transcription
  misc_feature: MA Experiment 108464 PARAMETER Experiment Name: At_Germinating_Seeds_cDNA_P Parameter: Age (day) Value: 4 vs. 0
  misc_feature: MA Experiment 108464 PARAMETER Experiment Name: At_Germinating_Seeds_cDNA_P Parameter: Tissue Value: Germinating Seeds
  misc_feature: MA Experiment ID: 20000111 Result: Down-regulated in Transcription
  misc_feature: MA Experiment 20000111 PARAMETER Experiment Name: At_42deg_Heat_cDNA_P Parameter: Temperature (deg C) Value: 42 vs. 22
  misc_feature: MA Experiment 20000111 PARAMETER Experiment Name: At_42deg_Heat_cDNA_P Parameter: Timepoint (hr) Value: 6
  misc_feature: MA Experiment 20000111 PARAMETER Experiment Name: At_42deg_Heat_cDNA_P Parameter: Tissue Value: Aerial
  misc_feature: MA Experiment ID: 20000180 Result: Up-regulated in Transcription
  misc_feature: MA Experiment 20000180 PARAMETER Experiment Name: At_Germinating_Seeds_P Parameter: Age (hr) Value: 24 vs. 0
  misc_feature: MA Experiment 20000180 PARAMETER Experiment Name: At_Germinating_Seeds_P Parameter: Tissue Value: Germinating Seeds
gtacaagtggaattttgaaaaaagaagcagagagcgatggagaaagtggttgatctcttcggagtcggagaagctaattcccagaagctactcgaaggaggcaaagatctcagcgagatccaacagggattgttcataggatcagtagctgaagcgaataacaaggattttctcaaaagctctaatatcactcatgtcttaaccgttgctgtggccttggctcctccttatcctgatgattttgtctacaaagtcattgaagtatatttcgatgagtgttatagcttcatcgaccaagctattcaatctggtggtggtgttttggttcattgcttcatgggaatgtctaggagtgtgactatagtggtggcttacctgatgaaaaagcatggaatgggattctctaaagctatggaacttgtaaggagccgacgacatcaggcatatcctaatcccggtttcatttcgcagctccagcaatttgaaaaatccatccaaggtaatgcatgattgcttcacctgataagaagattcaagaaagtggcatgatgaactctcatgaaattccggcaagtgtcttcagccccatgttggccaaaaaagttgattggtttcgtgctgtgaaggattttttcttgtgaactattgatggtgagcactttgccatgtccattagccaattgaaattaatgataacgcagaattt

SEQ ID NO: 30460 - protein, 157 aa, Arabidopsis thaliana
  peptide (1)..(157): Ceres Seq. ID no. 12325439
  misc_feature (24)..(152): Pfam Name: Dual specificity phosphatase, catalytic domain Pfam Description: Dual specificity phosphatase, catalytic domain
  misc_feature (24)..(58): Homolog of NCBI NO: 24643158 NR Description: CG7378-PA [Drosophila melanogaster]
  misc_feature (74)..(154): Homolog of NCBI NO: 24643158 NR Description: CG7378-PA [Drosophila melanogaster]
  misc_feature (20)..(151): Homolog of NCBI NO: 24643332 NR Description: CG14211-PB [Drosophila melanogaster]
  misc_feature (24)..(58): Homolog of NCBI NO: 19528569 NR Description: RH25447p [Drosophila melanogaster]
  misc_feature (74)..(154): Homolog of NCBI NO: 19528569 NR Description: RH25447p [Drosophila melanogaster]
  misc_feature (28)..(155): Homolog of NCBI NO: 34905574 NR Description: hypothetical protein~similar to Arabidopsis
  misc_feature (26)..(154): Homolog of NCBI NO: 15229482 NR Description: dual-specificity protein phosphatase; protein id:
  misc_feature (26)..(154): Homolog of NCBI NO: 9294518 NR Description: dual-specificity protein phosphatase-like protein
  misc_feature (1)..(157): Homolog of NCBI NO: 30679726 NR Description: dual-specificity protein phosphatase -related
  misc_feature (1)..(157): Homolog of NCBI NO: 18397475 NR Description: putative dual-specificity protein phosphatase
MEKVVDLFGVGEANSQKLLEGGKDLSEIQQGLFIGSVAEANNKDFLKSSNITHVLTVAVALAPPYPDDFVYKVIEVYFDECYSFIDQAIQSGGGVLVHCFMGMSRSVTIVVAYLMKKHGMGFSKAMELVRSRRHQAYPNPGFISQLQQFEKSIQGNA

SEQ ID NO: 30461 - DNA, 904 bp, Arabidopsis thaliana
  misc_feature (1)..(904): Ceres Seq. ID no. 12323499
  misc_feature: MA Experiment ID: 108488 Result: Down-regulated in Transcription
  misc_feature: MA Experiment ID: 108573 Result: Up-regulated in Transcription
  misc_feature: MA Experiment 108573 PARAMETER Experiment Name: At_Drought_cDNA_P Parameter: Timepoint (hr) Value: 6
  misc_feature: MA Experiment 108573 PARAMETER Experiment Name: At_Drought_cDNA_P Parameter: Tissue Value: Aerial
  misc_feature: MA Experiment 108573 PARAMETER Experiment Name: At_Drought_cDNA_P Parameter: Treatment Value: Drought vs. No Drought
  misc_feature: MA Experiment ID: 108605 Result: Up-regulated in Transcription
  misc_feature: MA Experiment 108605 PARAMETER Experiment Name: At_100uM_ABA_cDNA_P Parameter: Timepoint (hr) Value: 6
  misc_feature: MA Experiment 108605 PARAMETER Experiment Name: At_100uM_ABA_cDNA_P Parameter: Tissue Value: Aerial
  misc_feature: MA Experiment 108605 PARAMETER Experiment Name: At_100uM_ABA_cDNA_P Parameter: Treatment Value: 100uM ABA vs. No Treatment
  misc_feature: MA Experiment ID: 20000185 Result: Up-regulated in Transcription
  misc_feature: MA Experiment 20000185 PARAMETER Experiment Name: At_Roots__P Parameter: Age (day) Value: 7 vs. 21
  misc_feature: MA Experiment 20000185 PARAMETER Experiment Name: At_Roots__P Parameter: Organism Value: A. thaliana
  misc_feature: MA Experiment 20000185 PARAMETER Experiment Name: At_Roots__P Parameter: Tissue Value: Roots vs. Whole Plant
  misc_feature: MA Experiment ID: 20000794 Result: Up-regulated in Transcription
  misc_feature: MA Experiment 20000794 PARAMETER Experiment Name: At_Petals_P Parameter: Age (day) Value: 23-25 days
  misc_feature: MA Experiment 20000794 PARAMETER Experiment Name: At_Petals_P Parameter: Plant Line Value: WS
  misc_feature: MA Experiment 20000794 PARAMETER Experiment Name: At_Petals_P Parameter: Tissue Value: Petals vs. Whole plant
aaacaaaacgtagacacttcatcttcctctctctcctgcgcttttctttactcaggttcacattacttgctgatttggatttttttcatctgcggttttctcttccaagcaacaatggtgtcggcgaacagagaaatggctgtttactgtttcgacactttggtctctcactacaacaatgaagagactccaccacctgcctttgaagaggccaatcatccattgtttgttacctggaagaaaatagtgaatggtggagagcctcggttgcgtggatgtattggtacactggaagcacgccgcttgatcagtggcttcaaggattatgccttgacaagtgccttgagggatcgcaggttcccacctatacaggccaaagaattgccatctctgcagtgtacggtgtctgtcttgactgattatgaagatgcagaagattaccttgattgggaggttggtaagcatggtataatcattgagtttactgaacctgagactaatacaaagcgaagcgccacatatttgcctgaggtgccagctcatgaaggctggacaaagatagaggcaatcgattcgctggtgcgtaaagcaggatacaatggtgtaataacagaagcagtgcgtaggcgaatcaatctaacgcgttaccagagtacattattcagcatgcattatagcgaatacctttcatatgtgaaggcgaccaggggcgttgttggcccggttattaatgggatcaacaagcacgcctttgcctgatttgcacctgcaaatggatgccattgattatgtttggctacctcctaatttatcctctgtcttgttgtctggctctcataaaagaaacgagacttcgaacttggctgtttcactattgtaacattaattaaatcactttcatccc

SEQ ID NO: 30462 - protein, 252 aa, Arabidopsis thaliana
  peptide (1)..(252): Ceres Seq. ID no. 12323500
  misc_feature (42)..(225): Pfam Name: AMMECR1 Pfam Description: AMMECR1
  misc_feature (39)..(231): Homolog of NCBI NO: 39597428 NR Description: Hypothetical protein CBG03076 [Caenorhabditis
  misc_feature (39)..(241): Homolog of NCBI NO: 17535669 NR Description: Putative cytoplasmic protein of ancient origin
  misc_feature (45)..(242): Homolog of NCBI NO: 24649478 NR Description: CG5902-PA [Drosophila melanogaster]
  misc_feature (45)..(230): Homolog of NCBI NO: 34878672 NR Description: similar to hypothetical protein MGC32132 [Rattus
  misc_feature (45)..(230): Homolog of NCBI NO: 23943793 NR Description: hypothetical protein MGC32132 [Mus musculus]
  misc_feature (39)..(231): Homolog of NCBI NO: 34784081 NR Description: Similar to AMMECR1 protein [Danio rerio]
  misc_feature (39)..(231): Homolog of NCBI NO: 9506383 NR Description: AMMECR1 protein [Mus musculus]
  misc_feature (39)..(231): Homolog of NCBI NO: 7669554 NR Description: AMMECR1 protein [Homo sapiens]
  misc_feature (39)..(245): Homolog of NCBI NO: 37537060 NR Description: unknown protein [Oryza sativa (japonica
  misc_feature (39)..(252): Homolog of NCBI NO: 18404840 NR Description: expressed protein
KQNVDTSSSSLSCAFLYSGSHYLLIWIFFICGFLFQATMVSANREMAVYCFDTLVSHYNNEETPPPAFEEANHPLFVTWKKIVNGGEPRLRGCIGTLEARRLISGFKDYALTSALRDRRFPPIQAKELPSLQCTVSVLTDYEDAEDYLDWEVGKHGIIIEFTEPETNTKRSATYLPEVPAHEGWTKIEAIDSLVRKAGYNGVITEAVRRRINLTRYQSTLFSMHYSEYLSYVKATRGVVGPVINGINKHAFA

SEQ ID NO: 30463 - protein, 214 aa, Arabidopsis thaliana
  peptide (1)..(214): Ceres Seq. ID no. 12323501
  misc_feature (4)..(187): Pfam Name: AMMECR1 Pfam Description: AMMECR1
  misc_feature (1)..(193): Homolog of NCBI NO: 39597428 NR Description: Hypothetical protein CBG03076 [Caenorhabditis
  misc_feature (1)..(203): Homolog of NCBI NO: 17535669 NR Description: Putative cytoplasmic protein of ancient origin
  misc_feature (7)..(204): Homolog of NCBI NO: 24649478 NR Description: CG5902-PA [Drosophila melanogaster]
  misc_feature (7)..(192): Homolog of NCBI NO: 34878672 NR Description: similar to hypothetical protein MGC32132 [Rattus
  misc_feature (7)..(192): Homolog of NCBI NO: 23943793 NR Description: hypothetical protein MGC32132 [Mus musculus]
  misc_feature (1)..(193): Homolog of NCBI NO: 34784081 NR Description: Similar to AMMECR1 protein [Danio rerio]
  misc_feature (1)..(193): Homolog of NCBI NO: 9506383 NR Description: AMMECR1 protein [Mus musculus]
  misc_feature (1)..(193): Homolog of NCBI NO: 7669554 NR Description: AMMECR1 protein [Homo sapiens]
  misc_feature (1)..(207): Homolog of NCBI NO: 37537060 NR Description: unknown protein [Oryza sativa (japonica
  misc_feature (1)..(214): Homolog of NCBI NO: 18404840 NR Description: expressed protein
MVSANREMAVYCFDTLVSHYNNEETPPPAFEEANHPLFVTWKKIVNGGEPRLRGCIGTLEARRLISGFKDYALTSALRDRRFPPIQAKELPSLQCTVSVLTDYEDAEDYLDWEVGKHGIIIEFTEPETNTKRSATYLPEVPAHEGWTKIEAIDSLVRKAGYNGVITEAVRRRINLTRYQSTLFSMHYSEYLSYVKATRGVVGPVINGINKHAFA

SEQ ID NO: 30464 - protein, 207 aa, Arabidopsis thaliana
  peptide (1)..(207): Ceres Seq. ID no. 12323502
  misc_feature (1)..(180): Pfam Name: AMMECR1 Pfam Description: AMMECR1
  misc_feature (1)..(186): Homolog of NCBI NO: 39597428 NR Description: Hypothetical protein CBG03076 [Caenorhabditis
  misc_feature (1)..(196): Homolog of NCBI NO: 17535669 NR Description: Putative cytoplasmic protein of ancient origin
  misc_feature (1)..(197): Homolog of NCBI NO: 24649478 NR Description: CG5902-PA [Drosophila melanogaster]
  misc_feature (1)..(185): Homolog of NCBI NO: 34878672 NR Description: similar to hypothetical protein MGC32132 [Rattus
  misc_feature (1)..(185): Homolog of NCBI NO: 23943793 NR Description: hypothetical protein MGC32132 [Mus musculus]
  misc_feature (1)..(186): Homolog of NCBI NO: 34784081 NR Description: Similar to AMMECR1 protein [Danio rerio]
  misc_feature (1)..(186): Homolog of NCBI NO: 9506383 NR Description: AMMECR1 protein [Mus musculus]
  misc_feature (1)..(186): Homolog of NCBI NO: 7669554 NR Description: AMMECR1 protein [Homo sapiens]
  misc_feature (1)..(200): Homolog of NCBI NO: 37537060 NR Description: unknown protein [Oryza sativa (japonica
  misc_feature (1)..(207): Homolog of NCBI NO: 18404840 NR Description: expressed protein
MAVYCFDTLVSHYNNEETPPPAFEEANHPLFVTWKKIVNGGEPRLRGCIGTLEARRLISGFKDYALTSALRDRRFPPIQAKELPSLQCTVSVLTDYEDAEDYLDWEVGKHGIIIEFTEPETNTKRSATYLPEVPAHEGWTKIEAIDSLVRKAGYNGVITEAVRRRINLTRYQSTLFSMHYSEYLSYVKATRGVVGPVINGINKHAFA

SEQ ID NO: 30465 - DNA, 1243 bp, Arabidopsis thaliana; identical to SEQ ID NO: 20950
  misc_feature (1)..(1243): Ceres Seq. ID no. 12394450
  misc_feature: MA Experiment ID: 108434 Result: Down-regulated in Transcription
  misc_feature: MA Experiment 108434 PARAMETER Experiment Name: At_Root_Tips_cDNA_P Parameter: Tissue Value: Root Tips
  misc_feature: MA Experiment ID: 108461 Result: Up-regulated in Transcription
  misc_feature: MA Experiment 108461 PARAMETER Experiment Name: At_Germinating_Seeds_cDNA_P Parameter: Age (day) Value: 1 vs. 0
  misc_feature: MA Experiment 108461 PARAMETER Experiment Name: At_Germinating_Seeds_cDNA_P Parameter: Tissue Value: Germinating Seeds
  misc_feature: MA Experiment ID: 108462 Result: Up-regulated in Transcription
  misc_feature: MA Experiment 108462 PARAMETER Experiment Name: At_Germinating_Seeds_cDNA_P Parameter: Age (day) Value: 2 vs. 0
  misc_feature: MA Experiment 108462 PARAMETER Experiment Name: At_Germinating_Seeds_cDNA_P Parameter: Tissue Value: Germinating Seeds
  misc_feature: MA Experiment ID: 108463 Result: Up-regulated in Transcription
  misc_feature: MA Experiment 108463 PARAMETER Experiment Name: At_Germinating_Seeds_cDNA_P Parameter: Age (day) Value: 3 vs. 0
  misc_feature: MA Experiment 108463 PARAMETER Experiment Name: At_Germinating_Seeds_cDNA_P Parameter: Tissue Value: Germinating Seeds
  misc_feature: MA Experiment ID: 108464 Result: Up-regulated in Transcription
  misc_feature: MA Experiment 108464 PARAMETER Experiment Name: At_Germinating_Seeds_cDNA_P Parameter: Age (day) Value: 4 vs. 0
  misc_feature: MA Experiment 108464 PARAMETER Experiment Name: At_Germinating_Seeds_cDNA_P Parameter: Tissue Value: Germinating Seeds
  misc_feature: MA Experiment ID: 108474 Result: Down-regulated in Transcription
  misc_feature: MA Experiment 108474 PARAMETER Experiment Name: At_Drought_Flowers_cDNA_P Parameter: Timepoint (hr) Value: null
  misc_feature: MA Experiment 108474 PARAMETER Experiment Name: At_Drought_Flowers_cDNA_P Parameter: Treatment Value: Drought vs. No Drought
  misc_feature: MA Experiment ID: 108594 Result: Down-regulated in Transcription
  misc_feature: MA Experiment 108594 PARAMETER Experiment Name: At_Ler-rhl_Root_cDNA_P Parameter: Plant Line Value: null
  misc_feature: MA Experiment ID: 108609 Result: Up-regulated in Transcription
  misc_feature: MA Experiment 108609 PARAMETER Experiment Name: At_100uM_ABA_cDNA_P Parameter: Timepoint (hr) Value: 24
  misc_feature: MA Experiment 108609 PARAMETER Experiment Name: At_100uM_ABA_cDNA_P Parameter: Tissue Value: Aerial
  misc_feature: MA Experiment 108609 PARAMETER Experiment Name: At_100uM_ABA_cDNA_P Parameter: Treatment Value: 100uM ABA vs. No Treatment
  misc_feature: MA Experiment ID: 20000071 Result: Up-regulated in Transcription
  misc_feature: MA Experiment 20000071 PARAMETER Experiment Name: At_100uM_ABA_Mutants_cDNA_P Parameter: Plant Line Value: CS8104
  misc_feature: MA Experiment 20000071 PARAMETER Experiment Name: At_100uM_ABA_Mutants_cDNA_P Parameter: Timepoint (hr) Value: 6
  misc_feature: MA Experiment 20000071 PARAMETER Experiment Name: At_100uM_ABA_Mutants_cDNA_P Parameter: Tissue Value: Aerial
  misc_feature: MA Experiment 20000071 PARAMETER Experiment Name: At_100uM_ABA_Mutants_cDNA_P Parameter: Treatment Value: 100uM ABA vs. No Treatment
  misc_feature: MA Experiment ID: 20000087 Result: Up-regulated in Transcription
  misc_feature: MA Experiment 20000087 PARAMETER Experiment Name: At_100uM_ABA_Mutants_cDNA_P Parameter: Plant Line Value: WS
  misc_feature: MA Experiment 20000087 PARAMETER Experiment Name: At_100uM_ABA_Mutants_cDNA_P Parameter: Timepoint (hr) Value: 6
  misc_feature: MA Experiment 20000087 PARAMETER Experiment Name: At_100uM_ABA_Mutants_cDNA_P Parameter: Tissue Value: Aerial
  misc_feature: MA Experiment 20000087 PARAMETER Experiment Name: At_100uM_ABA_Mutants_cDNA_P Parameter: Treatment Value: 100uM ABA vs. No Treatment
  misc_feature: MA Experiment ID: 20000184 Result: Up-regulated in Transcription
  misc_feature: MA Experiment 20000184 PARAMETER Experiment Name: At_Shoots__P Parameter: Age (day) Value: 7
  misc_feature: MA Experiment 20000184 PARAMETER Experiment Name: At_Shoots__P Parameter: Tissue Value: Shoots vs. Whole Plant
  misc_feature: MA Experiment ID: 20000185 Result: Up-regulated in Transcription
  misc_feature: MA Experiment 20000185 PARAMETER Experiment Name: At_Roots__P Parameter: Age (day) Value: 7 vs. 21
  misc_feature: MA Experiment 20000185 PARAMETER Experiment Name: At_Roots__P Parameter: Organism Value: A. thaliana
  misc_feature: MA Experiment 20000185 PARAMETER Experiment Name: At_Roots__P Parameter: Tissue Value: Roots vs. Whole Plant
  misc_feature: MA Experiment ID: 20000234 Result: Up-regulated in Transcription
  misc_feature: MA Experiment 20000234 PARAMETER Experiment Name: At_Siliques_P Parameter: Age (day) Value: 21
  misc_feature: MA Experiment 20000234 PARAMETER Experiment Name: At_Siliques_P Parameter: Organism Value: A. thaliana
  misc_feature: MA Experiment 20000234 PARAMETER Experiment Name: At_Siliques_P Parameter: Plant Line Value: WS
  misc_feature: MA Experiment 20000234 PARAMETER Experiment Name: At_Siliques_P Parameter: Tissue Value: Less Than 5mm Siliques vs. Whole Plant
  misc_feature: MA Experiment ID: 20000235 Result: Up-regulated in Transcription
  misc_feature: MA Experiment 20000235 PARAMETER Experiment Name: At_Siliques_P Parameter: Age (day) Value: 21
  misc_feature: MA Experiment 20000235 PARAMETER Experiment Name: At_Siliques_P Parameter: Organism Value: A. thaliana
  misc_feature: MA Experiment 20000235 PARAMETER Experiment Name: At_Siliques_P Parameter: Plant Line Value: WS
  misc_feature: MA Experiment 20000235 PARAMETER Experiment Name: At_Siliques_P Parameter: Tissue Value: 5-10mm Siliques vs. Whole Plant
  misc_feature: MA Experiment ID: 20000286 Result: Up-regulated in Transcription
  misc_feature: MA Experiment 20000286 PARAMETER Experiment Name: At_Open_Flower_P Parameter: Age (day) Value: 21
  misc_feature: MA Experiment 20000286 PARAMETER Experiment Name: At_Open_Flower_P Parameter: Plant Line Value: WS
  misc_feature: MA Experiment 20000286 PARAMETER Experiment Name: At_Open_Flower_P Parameter: Tissue Value: Half Open vs. Whole Plant
  misc_feature: MA Experiment ID: 20000436 Result: Up-regulated in Transcription
  misc_feature: MA Experiment 20000436 PARAMETER Experiment Name: At_Drought_P Parameter: Age (day) Value: 7
  misc_feature: MA Experiment 20000436 PARAMETER Experiment Name: At_Drought_P Parameter: Organism Value: A. thaliana
  misc_feature: MA Experiment 20000436 PARAMETER Experiment Name: At_Drought_P Parameter: Plant Line Value: WS
  misc_feature: MA Experiment 20000436 PARAMETER Experiment Name: At_Drought_P Parameter: Timepoint (hr) Value: 12
  misc_feature: MA Experiment 20000436 PARAMETER Experiment Name: At_Drought_P Parameter: Tissue Value: Whole Plant
  misc_feature: MA Experiment 20000436 PARAMETER Experiment Name: At_Drought_P Parameter: Treatment Value: Drought vs. No Drought
  misc_feature: MA Experiment ID: 20000439 Result: Up-regulated in Transcription
  misc_feature: MA Experiment 20000439 PARAMETER Experiment Name: At_Roots__P Parameter: Age (day) Value: 14 vs. 21
  misc_feature: MA Experiment 20000439 PARAMETER Experiment Name: At_Roots__P Parameter: Organism Value: A. thaliana
  misc_feature: MA Experiment 20000439 PARAMETER Experiment Name: At_Roots__P Parameter: Tissue Value: Roots vs. Whole Plant
  misc_feature: MA Experiment ID: 20000453 Result: Up-regulated in Transcription
  misc_feature: MA Experiment 20000453 PARAMETER Experiment Name: At_100uM_ABA_P Parameter: Age (day) Value: 15
  misc_feature: MA Experiment 20000453 PARAMETER Experiment Name: At_100uM_ABA_P Parameter: Organism Value: A. thaliana
  misc_feature: MA Experiment 20000453 PARAMETER Experiment Name: At_100uM_ABA_P Parameter: Plant Line Value: WS
  misc_feature: MA Experiment 20000453 PARAMETER Experiment Name: At_100uM_ABA_P Parameter: Timepoint (hr) Value: 24
  misc_feature: MA Experiment 20000453 PARAMETER Experiment Name: At_100uM_ABA_P Parameter: Tissue Value: Aerial
  misc_feature: MA Experiment 20000453 PARAMETER Experiment Name: At_100uM_ABA_P Parameter: Treatment Value: 100uM ABA vs. No Treatment
  misc_feature: MA Experiment ID: 20000794 Result: Down-regulated in Transcription
  misc_feature: MA Experiment 20000794 PARAMETER Experiment Name: At_Petals_P Parameter: Age (day) Value: 23-25 days
  misc_feature: MA Experiment 20000794 PARAMETER Experiment Name: At_Petals_P Parameter: Plant Line Value: WS
  misc_feature: MA Experiment 20000794 PARAMETER Experiment Name: At_Petals_P Parameter: Tissue Value: Petals vs. Whole plant
  misc_feature: MA Experiment ID: 20001248 Result: Down-regulated in Transcription
  misc_feature: MA Experiment 20001248 PARAMETER Experiment Name: At_Far-red-induction_P Parameter: Age (day) Value: 7
  misc_feature: MA Experiment 20001248 PARAMETER Experiment Name: At_Far-red-induction_P Parameter: Light Value: Far-red vs. White
  misc_feature: MA Experiment 20001248 PARAMETER Experiment Name: At_Far-red-induction_P Parameter: Organism Value: A. thaliana
  misc_feature: MA Experiment 20001248 PARAMETER Experiment Name: At_Far-red-induction_P Parameter: Plant Line Value: Columbia
  misc_feature: MA Experiment 20001248 PARAMETER Experiment Name: At_Far-red-induction_P Parameter: Timepoint (hr) Value: 4
  misc_feature: MA Experiment 20001248 PARAMETER Experiment Name: At_Far-red-induction_P Parameter: Tissue Value: Whole Plant
  misc_feature: MA Experiment ID: 20001450 Result: Down-regulated in Transcription
  misc_feature: MA Experiment 20001450 PARAMETER Experiment Name: At_Far-red-induction_P Parameter: Age (day) Value: 7
  misc_feature: MA Experiment 20001450 PARAMETER Experiment Name: At_Far-red-induction_P Parameter: Light Value: Far-red vs. White
  misc_feature: MA Experiment 20001450 PARAMETER Experiment Name: At_Far-red-induction_P Parameter: Organism Value: A. thaliana
  misc_feature: MA Experiment 20001450 PARAMETER Experiment Name: At_Far-red-induction_P Parameter: Plant Line Value: Columbia
  misc_feature: MA Experiment 20001450 PARAMETER Experiment Name: At_Far-red-induction_P Parameter: Timepoint (hr) Value: 8
  misc_feature: MA Experiment 20001450 PARAMETER Experiment Name: At_Far-red-induction_P Parameter: Tissue Value: Whole Plant
  misc_feature: MA Experiment ID: 20001557 Result: Down-regulated in Transcription
  misc_feature: MA Experiment 20001557 PARAMETER Experiment Name: At_Drought_Soil_Dry_P Parameter: Age (day) Value: 27
  misc_feature: MA Experiment 20001557 PARAMETER Experiment Name: At_Drought_Soil_Dry_P Parameter: Organism Value: A. thaliana
  misc_feature: MA Experiment 20001557 PARAMETER Experiment Name: At_Drought_Soil_Dry_P Parameter: Plant Line Value: WS
  misc_feature: MA Experiment 20001557 PARAMETER Experiment Name: At_Drought_Soil_Dry_P Parameter: Post Timepoint (hr) Value: 3
  misc_feature: MA Experiment 20001557 PARAMETER Experiment Name: At_Drought_Soil_Dry_P Parameter: Post-Treatment Value: Re-Water vs. No Drought
  misc_feature: MA Experiment 20001557 PARAMETER Experiment Name: At_Drought_Soil_Dry_P Parameter: Timepoint (day) Value: 13
  misc_feature: MA Experiment 20001557 PARAMETER Experiment Name: At_Drought_Soil_Dry_P Parameter: Treatment Value: Drought vs. No Drought
  misc_feature: MA Experiment ID: 20001558 Result: Down-regulated in Transcription
  misc_feature: MA Experiment 20001558 PARAMETER Experiment Name: At_Drought_Soil_Dry_P Parameter: Age (day) Value: 27
  misc_feature: MA Experiment 20001558 PARAMETER Experiment Name: At_Drought_Soil_Dry_P Parameter: Organism Value: A. thaliana
  misc_feature: MA Experiment 20001558 PARAMETER Experiment Name: At_Drought_Soil_Dry_P Parameter: Plant Line Value: WS
  misc_feature: MA Experiment 20001558 PARAMETER Experiment Name: At_Drought_Soil_Dry_P Parameter: Post Timepoint (hr) Value: 6
  misc_feature: MA Experiment 20001558 PARAMETER Experiment Name: At_Drought_Soil_Dry_P Parameter: Post-Treatment Value: Re-Water vs. No Drought
  misc_feature: MA Experiment 20001558 PARAMETER Experiment Name: At_Drought_Soil_Dry_P Parameter: Timepoint (day) Value: 13
  misc_feature: MA Experiment 20001558 PARAMETER Experiment Name: At_Drought_Soil_Dry_P Parameter: Treatment Value: Drought vs. No Drought

SEQ ID NO: 30466 - protein, 345 aa, Arabidopsis thaliana; identical to SEQ ID NO: 20951
  peptide (1)..(345): Ceres Seq. ID no. 12394451
  misc_feature (65)..(311): Pfam Name: Peroxidase Pfam Description: Peroxidase
  misc_feature (65)..(311): Pfam Name: Peroxidase Pfam Description: Peroxidase
  misc_feature (142)..(345): Homolog of NCBI NO: 1890319 NR Description: peroxidase ATP27a [Arabidopsis thaliana]
  misc_feature (64)..(345): Homolog of NCBI NO: 2956707 NR Description: peroxidase [Spinacia oleracea]
  misc_feature (142)..(345): Homolog of NCBI NO: 1890319 NR Description: peroxidase ATP27a [Arabidopsis thaliana]
  misc_feature (47)..(345): Homolog of NCBI NO: 7484677 NR Description: peroxidase (EC 1.11.1.7) prx11 precursor - spinach
  misc_feature (24)..(345): Homolog of NCBI NO: 15242213 NR Description: peroxidase, putative
  misc_feature (64)..(345): Homolog of NCBI NO: 2956707 NR Description: peroxidase [Spinacia oleracea]
  misc_feature (47)..(345): Homolog of NCBI NO: 7484677 NR Description: peroxidase (EC 1.11.1.7) prx11 precursor - spinach
  misc_feature (24)..(345): Homolog of NCBI NO: 15242213 NR Description: peroxidase, putative

SEQ ID NO: 30467 - protein, 322 aa, Arabidopsis thaliana; identical to SEQ ID NO: 20952
  peptide (1)..(322): Ceres Seq. ID no. 12394452
  misc_feature (42)..(288): Pfam Name: Peroxidase Pfam Description: Peroxidase
  misc_feature (42)..(288): Pfam Name: Peroxidase Pfam Description: Peroxidase
  misc_feature (119)..(322): Homolog of NCBI NO: 1890319 NR Description: peroxidase ATP27a [Arabidopsis thaliana]
  misc_feature (41)..(322): Homolog of NCBI NO: 2956707 NR Description: peroxidase [Spinacia oleracea]
  misc_feature (119)..(322): Homolog of NCBI NO: 1890319 NR Description: peroxidase ATP27a [Arabidopsis thaliana]
  misc_feature (24)..(322): Homolog of NCBI NO: 7484677 NR Description: peroxidase (EC 1.11.1.7) prx11 precursor - spinach
  misc_feature (1)..(322): Homolog of NCBI NO: 15242213 NR Description: peroxidase, putative
  misc_feature (41)..(322): Homolog of NCBI NO: 2956707 NR Description: peroxidase [Spinacia oleracea]
  misc_feature (24)..(322): Homolog of NCBI NO: 7484677 NR Description: peroxidase (EC 1.11.1.7) prx11 precursor - spinach
  misc_feature (1)..(322): Homolog of NCBI NO: 15242213 NR Description: peroxidase, putative

SEQ ID NO: 30468 - protein, 312 aa, Arabidopsis thaliana; identical to SEQ ID NO: 20953
  peptide (1)..(312): Ceres Seq. ID no. 12394453
  misc_feature (32)..(278): Pfam Name: Peroxidase Pfam Description: Peroxidase
  misc_feature (32)..(278): Pfam Name: Peroxidase Pfam Description: Peroxidase
  misc_feature (109)..(312): Homolog of NCBI NO: 1890319 NR Description: peroxidase ATP27a [Arabidopsis thaliana]
  misc_feature (31)..(312): Homolog of NCBI NO: 2956707 NR Description: peroxidase [Spinacia oleracea]
  misc_feature (31)..(312): Homolog of NCBI NO: 2956707 NR Description: peroxidase [Spinacia oleracea]
  misc_feature (1)..(312): Homolog of NCBI NO: 15242213 NR Description: peroxidase, putative
  misc_feature (14)..(312): Homolog of NCBI NO: 7484677 NR Description: peroxidase (EC 1.11.1.7) prx11 precursor - spinach
  misc_feature (109)..(312): Homolog of NCBI NO: 1890319 NR Description: peroxidase ATP27a [Arabidopsis thaliana]
  misc_feature (14)..(312): Homolog of NCBI NO: 7484677 NR Description: peroxidase (EC 1.11.1.7) prx11 precursor - spinach
  misc_feature (1)..(312): Homolog of NCBI NO: 15242213 NR Description: peroxidase, putative

SEQ ID NO: 30469 - DNA, 950 bp, Arabidopsis thaliana
  misc_feature (1)..(950): Ceres Seq. ID no. 13499517
  misc_feature: MA Experiment ID: 108434 Result: Down-regulated in Transcription
  misc_feature: MA Experiment 108434 PARAMETER Experiment Name: At_Root_Tips_cDNA_P Parameter: Tissue Value: Root Tips
  misc_feature: MA Experiment ID: 108473 Result: Up-regulated in Transcription
  misc_feature: MA Experiment 108473 PARAMETER Experiment Name: At_Drought_Flowers_cDNA_P Parameter: Timepoint (hr) Value: 7 d
  misc_feature: MA Experiment 108473 PARAMETER Experiment Name: At_Drought_Flowers_cDNA_P Parameter: Tissue Value: Flower
  misc_feature: MA Experiment 108473 PARAMETER Experiment Name: At_Drought_Flowers_cDNA_P Parameter: Treatment Value: Drought vs. No Drought
  misc_feature: MA Experiment ID: 108474 Result: Up-regulated in Transcription
  misc_feature: MA Experiment 108474 PARAMETER Experiment Name: At_Drought_Flowers_cDNA_P Parameter: Timepoint (hr) Value: null
  misc_feature: MA Experiment 108474 PARAMETER Experiment Name: At_Drought_Flowers_cDNA_P Parameter: Treatment Value: Drought vs. No Drought
  misc_feature: MA Experiment ID: 108489 Result: Up-regulated in Transcription
  misc_feature: MA Experiment ID: 108501 Result: Down-regulated in Transcription
  misc_feature: MA Experiment 108501 PARAMETER Experiment Name: At_ap2_floral_buds_cDNA_P Parameter: Plant Line Value: ap2 (Ler.)
  misc_feature: MA Experiment 108501 PARAMETER Experiment Name: At_ap2_floral_buds_cDNA_P Parameter: Tissue Value: Closed Flower
  misc_feature: MA Experiment ID: 108595 Result: Up-regulated in Transcription
  misc_feature: MA Experiment 108595 PARAMETER Experiment Name: At_Ler-pi_Ovule_cDNA_P Parameter: Plant Line Value: null
  misc_feature: MA Experiment ID: 108609 Result: Up-regulated in Transcription
  misc_feature: MA Experiment 108609 PARAMETER Experiment Name: At_100uM_ABA_cDNA_P Parameter: Timepoint (hr) Value: 24
  misc_feature: MA Experiment 108609 PARAMETER Experiment Name: At_100uM_ABA_cDNA_P Parameter: Tissue Value: Aerial
  misc_feature: MA Experiment 108609 PARAMETER Experiment Name: At_100uM_ABA_cDNA_P Parameter: Treatment Value: 100uM ABA vs. No Treatment
  misc_feature: MA Experiment ID: 20000069 Result: Up-regulated in Transcription
  misc_feature: MA Experiment 20000069 PARAMETER Experiment Name: At_100uM_ABA_Mutants_cDNA_P Parameter: Plant Line Value: CS23
  misc_feature: MA Experiment 20000069 PARAMETER Experiment Name: At_100uM_ABA_Mutants_cDNA_P Parameter: Timepoint (hr) Value: 6
  misc_feature: MA Experiment 20000069 PARAMETER Experiment Name: At_100uM_ABA_Mutants_cDNA_P Parameter: Tissue Value: Aerial
  misc_feature: MA Experiment 20000069 PARAMETER Experiment Name: At_100uM_ABA_Mutants_cDNA_P Parameter: Treatment Value: 100uM ABA vs. No Treatment
  misc_feature: MA Experiment ID: 20000070 Result: Up-regulated in Transcription
  misc_feature: MA Experiment 20000070 PARAMETER Experiment Name: At_100uM_ABA_Mutants_cDNA_P Parameter: Plant Line Value: CS24
  misc_feature: MA Experiment 20000070 PARAMETER Experiment Name: At_100uM_ABA_Mutants_cDNA_P Parameter: Timepoint (hr) Value: 6
  misc_feature: MA Experiment 20000070 PARAMETER Experiment Name: At_100uM_ABA_Mutants_cDNA_P Parameter: Tissue Value: Aerial
  misc_feature: MA Experiment 20000070 PARAMETER Experiment Name: At_100uM_ABA_Mutants_cDNA_P Parameter: Treatment Value: 100uM ABA vs. No Treatment
  misc_feature: MA Experiment ID: 20000071 Result: Up-regulated in Transcription
  misc_feature: MA Experiment 20000071 PARAMETER Experiment Name: At_100uM_ABA_Mutants_cDNA_P Parameter: Plant Line Value: CS8104
  misc_feature: MA Experiment 20000071 PARAMETER Experiment Name: At_100uM_ABA_Mutants_cDNA_P Parameter: Timepoint (hr) Value: 6
  misc_feature: MA Experiment 20000071 PARAMETER Experiment Name: At_100uM_ABA_Mutants_cDNA_P Parameter: Tissue Value: Aerial
  misc_feature: MA Experiment 20000071 PARAMETER Experiment Name: At_100uM_ABA_Mutants_cDNA_P Parameter: Treatment Value: 100uM ABA vs. No Treatment
  misc_feature: MA Experiment ID: 20000072 Result: Up-regulated in Transcription
  misc_feature: MA Experiment 20000072 PARAMETER Experiment Name: At_100uM_ABA_Mutants_cDNA_P Parameter: Plant Line Value: CS8105
  misc_feature: MA Experiment 20000072 PARAMETER Experiment Name: At_100uM_ABA_Mutants_cDNA_P Parameter: Timepoint (hr) Value: 6
  misc_feature: MA Experiment 20000072 PARAMETER Experiment Name: At_100uM_ABA_Mutants_cDNA_P Parameter: Tissue Value: Aerial
  misc_feature: MA Experiment 20000072 PARAMETER Experiment Name: At_100uM_ABA_Mutants_cDNA_P Parameter: Treatment Value: 100uM ABA vs. No Treatment
  misc_feature: MA Experiment ID: 20000117 Result: Up-regulated in Transcription
  misc_feature: MA Experiment 20000117 PARAMETER Experiment Name: At_100uM_ABA_Mutants_cDNA_P Parameter: Plant Line Value: Columbia
  misc_feature: MA Experiment 20000117 PARAMETER Experiment Name: At_100uM_ABA_Mutants_cDNA_P Parameter: Timepoint (hr) Value: 6
  misc_feature: MA Experiment 20000117 PARAMETER Experiment Name: At_100uM_ABA_Mutants_cDNA_P Parameter: Tissue Value: Aerial
  misc_feature: MA Experiment 20000117 PARAMETER Experiment Name: At_100uM_ABA_Mutants_cDNA_P Parameter: Treatment Value: 100uM ABA vs. No Treatment
  misc_feature: MA Experiment ID: 20000185 Result: Down-regulated in Transcription
  misc_feature: MA Experiment 20000185 PARAMETER Experiment Name: At_Roots__P Parameter: Age (day) Value: 7 vs. 21
  misc_feature: MA Experiment 20000185 PARAMETER Experiment Name: At_Roots__P Parameter: Organism Value: A. thaliana
  misc_feature: MA Experiment 20000185 PARAMETER Experiment Name: At_Roots__P Parameter: Tissue Value: Roots vs. Whole Plant
  misc_feature: MA Experiment ID: 20000227 Result: Down-regulated in Transcription
  misc_feature: MA Experiment 20000227 PARAMETER Experiment Name: At_Root-Tips-vs-Tops_P Parameter: Tissue Value: Root Tips vs. Root Tops
  misc_feature: MA Experiment ID: 20000234 Result: Up-regulated in Transcription
  misc_feature: MA Experiment 20000234 PARAMETER Experiment Name: At_Siliques_P Parameter: Age (day) Value: 21
  misc_feature: MA Experiment 20000234 PARAMETER Experiment Name: At_Siliques_P Parameter: Organism Value: A. thaliana
  misc_feature: MA Experiment 20000234 PARAMETER Experiment Name: At_Siliques_P Parameter: Plant Line Value: WS
  misc_feature: MA Experiment 20000234 PARAMETER Experiment Name: At_Siliques_P Parameter: Tissue Value: Less Than 5mm Siliques vs. Whole Plant
  misc_feature: MA Experiment ID: 20000265 Result: Up-regulated in Transcription
  misc_feature: MA Experiment 20000265 PARAMETER Experiment Name: At_Open_Flower_P Parameter: Age (day) Value: 21
  misc_feature: MA Experiment 20000265 PARAMETER Experiment Name: At_Open_Flower_P Parameter: Plant Line Value: WS
  misc_feature: MA Experiment 20000265 PARAMETER Experiment Name: At_Open_Flower_P Parameter: Tissue Value: Closed Flower vs. Whole Plant
  misc_feature: MA Experiment ID: 20000267 Result: Up-regulated in Transcription
  misc_feature: MA Experiment 20000267 PARAMETER Experiment Name: At_Drought_P Parameter: Age (day) Value: 7
  misc_feature: MA Experiment 20000267 PARAMETER Experiment Name: At_Drought_P Parameter: Organism Value: A. thaliana
  misc_feature: MA Experiment 20000267 PARAMETER Experiment Name: At_Drought_P Parameter: Plant Line Value: WS
  misc_feature: MA Experiment 20000267 PARAMETER Experiment Name: At_Drought_P Parameter: Timepoint (hr) Value: 6
  misc_feature: MA Experiment 20000267 PARAMETER Experiment Name: At_Drought_P Parameter: Tissue Value: Whole Plant
  misc_feature: MA Experiment 20000267 PARAMETER Experiment Name: At_Drought_P Parameter: Treatment Value: Drought vs. No Drought
  misc_feature: MA Experiment ID: 20000268 Result: Up-regulated in Transcription
  misc_feature: MA Experiment 20000268 PARAMETER Experiment Name: At_100mM_NaCl__P Parameter: Age (day) Value: 14
  misc_feature: MA Experiment 20000268 PARAMETER Experiment Name: At_100mM_NaCl__P Parameter: Organism Value: A. thaliana
  misc_feature: MA Experiment 20000268 PARAMETER Experiment Name: At_100mM_NaCl__P Parameter: Plant Line Value: WS
  misc_feature: MA Experiment 20000268 PARAMETER Experiment Name: At_100mM_NaCl__P Parameter: Timepoint (hr) Value: 6
  misc_feature: MA Experiment 20000268 PARAMETER Experiment Name: At_100mM_NaCl__P Parameter: Tissue Value: Whole Plant
  misc_feature: MA Experiment 20000268 PARAMETER Experiment Name: At_100mM_NaCl__P Parameter: Treatment Value: 100mM NaCl vs. No Treatment
  misc_feature: MA Experiment ID: 20000436 Result: Up-regulated in Transcription
  misc_feature: MA Experiment 20000436 PARAMETER Experiment Name: At_Drought_P Parameter: Age (day) Value: 7
  misc_feature: MA Experiment 20000436 PARAMETER Experiment Name: At_Drought_P Parameter: Organism Value: A. thaliana
  misc_feature: MA Experiment 20000436 PARAMETER Experiment Name: At_Drought_P Parameter: Plant Line Value: WS
  misc_feature: MA Experiment 20000436 PARAMETER Experiment Name: At_Drought_P Parameter: Timepoint (hr) Value: 12
  misc_feature: MA Experiment 20000436 PARAMETER Experiment Name: At_Drought_P Parameter: Tissue Value: Whole Plant
  misc_feature: MA Experiment 20000436 PARAMETER Experiment Name: At_Drought_P Parameter: Treatment Value: Drought vs. No Drought
  misc_feature: MA Experiment ID: 20000437 Result: Up-regulated in Transcription
  misc_feature: MA Experiment 20000437 PARAMETER Experiment Name: At_Drought_P Parameter: Age (day) Value: 8
  misc_feature: MA Experiment 20000437 PARAMETER Experiment Name: At_Drought_P Parameter: Organism Value: A. thaliana
  misc_feature: MA Experiment 20000437 PARAMETER Experiment Name: At_Drought_P Parameter: Plant Line Value: WS
  misc_feature: MA Experiment 20000437 PARAMETER Experiment Name: At_Drought_P Parameter: Timepoint (hr) Value: 24
  misc_feature: MA Experiment 20000437 PARAMETER Experiment Name: At_Drought_P Parameter: Tissue Value: Whole Plant
  misc_feature: MA Experiment 20000437 PARAMETER Experiment Name: At_Drought_P Parameter: Treatment Value: Drought vs. No Drought
  misc_feature: MA Experiment ID: 20000441 Result: Down-regulated in Transcription
  misc_feature: MA Experiment 20000441 PARAMETER Experiment Name: At_1uM_BR-BRZ__P Parameter: Tissue Value: Shoot Apices
  misc_feature: MA Experiment 20000441 PARAMETER Experiment Name: At_1uM_BR-BRZ__P Parameter: Treatment Value: 1uM BR vs. No Treatment
  misc_feature: MA Experiment ID: 20000443 Result: Down-regulated in Transcription
  misc_feature: MA Experiment 20000443 PARAMETER Experiment Name: At_1uM_BR-BRZ__P Parameter: Tissue Value: Shoot Apices
  misc_feature: MA Experiment 20000443 PARAMETER Experiment Name: At_1uM_BR-BRZ__P Parameter: Treatment Value: 1uM BRZ vs. No Treatment
  misc_feature: MA Experiment ID: 20000453 Result: Up-regulated in Transcription
  misc_feature: MA Experiment 20000453 PARAMETER Experiment Name: At_100uM_ABA_P Parameter: Age (day) Value: 15
  misc_feature: MA Experiment 20000453 PARAMETER Experiment Name: At_100uM_ABA_P Parameter: Organism Value: A. thaliana
  misc_feature: MA Experiment 20000453 PARAMETER Experiment Name: At_100uM_ABA_P Parameter: Plant Line Value: WS
  misc_feature: MA Experiment 20000453 PARAMETER Experiment Name: At_100uM_ABA_P Parameter: Timepoint (hr) Value: 24
  misc_feature: MA Experiment 20000453 PARAMETER Experiment Name: At_100uM_ABA_P Parameter: Tissue Value: Aerial
  misc_feature: MA Experiment 20000453 PARAMETER Experiment Name: At_100uM_ABA_P Parameter: Treatment Value: 100uM ABA vs. No Treatment
  misc_feature: MA Experiment ID: 20000709 Result: Down-regulated in Transcription
  misc_feature: MA Experiment 20000709 PARAMETER Experiment Name: At_15mM_NH4NO3_L-to-H_P Parameter: Age (hr) Value: 14
  misc_feature: MA Experiment 20000709 PARAMETER Experiment Name: At_15mM_NH4NO3_L-to-H_P Parameter: Organism Value: A. thaliana
  misc_feature: MA Experiment 20000709 PARAMETER Experiment Name: At_15mM_NH4NO3_L-to-H_P Parameter: Plant Line Value: WS
  misc_feature: MA Experiment 20000709 PARAMETER Experiment Name: At_15mM_NH4NO3_L-to-H_P Parameter: Timepoint (hr) Value: 4
  misc_feature: MA Experiment 20000709 PARAMETER Experiment Name: At_15mM_NH4NO3_L-to-H_P Parameter: Tissue Value: Aerial
  misc_feature: MA Experiment 20000709 PARAMETER Experiment Name: At_15mM_NH4NO3_L-to-H_P Parameter: Treatment Value: 15mM NH4NO3 vs. 30mM Mannitol
  misc_feature: MA Experiment ID: 20001554 Result: Up-regulated in Transcription
  misc_feature: MA Experiment 20001554 PARAMETER Experiment Name: At_Drought_Soil_Dry_P Parameter: Age (day) Value: 21
  misc_feature: MA Experiment 20001554 PARAMETER Experiment Name: At_Drought_Soil_Dry_P Parameter: Organism Value: A. thaliana
  misc_feature: MA Experiment 20001554 PARAMETER Experiment Name: At_Drought_Soil_Dry_P Parameter: Plant Line Value: WS
  misc_feature: MA Experiment 20001554 PARAMETER Experiment Name: At_Drought_Soil_Dry_P Parameter: Post Timepoint (hr) Value: None
  misc_feature: MA Experiment 20001554 PARAMETER Experiment Name: At_Drought_Soil_Dry_P Parameter: Post-Treatment Value: None
  misc_feature: MA Experiment 20001554 PARAMETER Experiment Name: At_Drought_Soil_Dry_P Parameter: Timepoint (day) Value: 7
  misc_feature: MA Experiment 20001554 PARAMETER Experiment Name: At_Drought_Soil_Dry_P Parameter: Treatment Value: Drought vs. No Drought
  misc_feature: MA Experiment ID: 20001555 Result: Up-regulated in Transcription
  misc_feature: MA Experiment 20001555 PARAMETER Experiment Name: At_Drought_Soil_Dry_P Parameter: Age (day) Value: 24
  misc_feature: MA Experiment 20001555 PARAMETER Experiment Name: At_Drought_Soil_Dry_P Parameter: Organism Value: A. thaliana
  misc_feature: MA Experiment 20001555 PARAMETER Experiment Name: At_Drought_Soil_Dry_P Parameter: Plant Line Value: WS
  misc_feature: MA Experiment 20001555 PARAMETER Experiment Name: At_Drought_Soil_Dry_P Parameter: Post Timepoint (hr) Value: None
  misc_feature: MA Experiment 20001555 PARAMETER Experiment Name: At_Drought_Soil_Dry_P Parameter: Post-Treatment Value: None
  misc_feature: MA Experiment 20001555 PARAMETER Experiment Name: At_Drought_Soil_Dry_P Parameter: Timepoint (day) Value: 10
  misc_feature: MA Experiment 20001555 PARAMETER Experiment Name: At_Drought_Soil_Dry_P Parameter: Treatment Value: Drought vs. No Drought
  misc_feature: MA Experiment ID: 20001556 Result: Up-regulated in Transcription
  misc_feature: MA Experiment 20001556 PARAMETER Experiment Name: At_Drought_Soil_Dry_P Parameter: Age (day) Value: 26
  misc_feature: MA Experiment 20001556 PARAMETER Experiment Name: At_Drought_Soil_Dry_P Parameter: Organism Value: A. thaliana
  misc_feature: MA Experiment 20001556 PARAMETER Experiment Name: At_Drought_Soil_Dry_P Parameter: Plant Line Value: WS
  misc_feature: MA Experiment 20001556 PARAMETER Experiment Name: At_Drought_Soil_Dry_P Parameter: Post Timepoint (hr) Value: None
  misc_feature: MA Experiment 20001556 PARAMETER Experiment Name: At_Drought_Soil_Dry_P Parameter: Post-Treatment Value: None
  misc_feature: MA Experiment 20001556 PARAMETER Experiment Name: At_Drought_Soil_Dry_P Parameter: Timepoint (day) Value: 12
  misc_feature: MA Experiment 20001556 PARAMETER Experiment Name: At_Drought_Soil_Dry_P Parameter: Treatment Value: Drought vs. No Drought
  misc_feature: MA Experiment ID: 20001905 Result: Up-regulated in Transcription
  misc_feature: MA Experiment 20001905 PARAMETER Experiment Name: At_Drought_Reproduction_P Parameter: Age (day) Value: 40
  misc_feature: MA Experiment 20001905 PARAMETER Experiment Name: At_Drought_Reproduction_P Parameter: Organism Value: A. thaliana
  misc_feature: MA Experiment 20001905 PARAMETER Experiment Name: At_Drought_Reproduction_P Parameter: Plant Line Value: WS
  misc_feature: MA Experiment 20001905 PARAMETER Experiment Name: At_Drought_Reproduction_P Parameter: Timepoint (day) Value: 10
  misc_feature: MA Experiment 20001905 PARAMETER Experiment Name: At_Drought_Reproduction_P Parameter: Tissue Value: Rosettes
  misc_feature: MA Experiment 20001905 PARAMETER Experiment Name: At_Drought_Reproduction_P Parameter: Treatment Value: Drought vs. No Drought
  misc_feature: MA Experiment ID: 20001906 Result: Up-regulated in Transcription
  misc_feature: MA Experiment 20001906 PARAMETER Experiment Name: At_Drought_Reproduction_P Parameter: Age (day) Value: 35
  misc_feature: MA Experiment 20001906 PARAMETER Experiment Name: At_Drought_Reproduction_P Parameter: Organism Value: A. thaliana
  misc_feature: MA Experiment 20001906 PARAMETER Experiment Name: At_Drought_Reproduction_P Parameter: Plant Line Value: WS
  misc_feature: MA Experiment 20001906 PARAMETER Experiment Name: At_Drought_Reproduction_P Parameter: Timepoint (day) Value: 5
  misc_feature: MA Experiment 20001906 PARAMETER Experiment Name: At_Drought_Reproduction_P Parameter: Tissue Value: Siliques
  misc_feature: MA Experiment 20001906 PARAMETER Experiment Name: At_Drought_Reproduction_P Parameter: Treatment Value: Drought vs. No Drought
  misc_feature: MA Experiment ID: 20001910 Result: Up-regulated in Transcription
  misc_feature: MA Experiment 20001910 PARAMETER Experiment Name: At_Drought_Reproduction_P Parameter: Age (day) Value: 37
  misc_feature: MA Experiment 20001910 PARAMETER Experiment Name: At_Drought_Reproduction_P Parameter: Organism Value: A. thaliana
  misc_feature: MA Experiment 20001910 PARAMETER Experiment Name: At_Drought_Reproduction_P Parameter: Plant Line Value: WS
  misc_feature: MA Experiment 20001910 PARAMETER Experiment Name: At_Drought_Reproduction_P Parameter: Timepoint (day) Value: 7
  misc_feature: MA Experiment 20001910 PARAMETER Experiment Name: At_Drought_Reproduction_P Parameter: Tissue Value: Flowers
  misc_feature: MA Experiment 20001910 PARAMETER Experiment Name: At_Drought_Reproduction_P Parameter: Treatment Value: Drought vs. No Drought
  misc_feature: MA Experiment ID: 20001911 Result: Up-regulated in Transcription
  misc_feature: MA Experiment 20001911 PARAMETER Experiment Name: At_Drought_Reproduction_P Parameter: Age (day) Value: 40
  misc_feature: MA Experiment 20001911 PARAMETER Experiment Name: At_Drought_Reproduction_P Parameter: Organism Value: A. thaliana
  misc_feature: MA Experiment 20001911 PARAMETER Experiment Name: At_Drought_Reproduction_P Parameter: Plant Line Value: WS
  misc_feature: MA Experiment 20001911 PARAMETER Experiment Name: At_Drought_Reproduction_P Parameter: Timepoint (day) Value: 10
  misc_feature: MA Experiment 20001911 PARAMETER Experiment Name: At_Drought_Reproduction_P Parameter: Tissue Value: Flowers
  misc_feature: MA Experiment 20001911 PARAMETER Experiment Name: At_Drought_Reproduction_P Parameter: Treatment Value: Drought vs. No Drought
actacacccaaaagaacatctttccttcgaattttctttcaattaacatttcttttacttgtctccttgtgtcttcacttcacatcacaacatggctttgaagacagttttcgtagcttttatgattctccttgccatctattcgcaaacgacgtttggggacgatgtgaagtgcgagaatctggatgaaaacacgtgtgccttcgcggtctcgtccactggaaaacgttgcgttttggagaagagcatgaagaggagcgggatcgaggtgtacacatgtcgatcatcggagatagaagctaacaaggtcacaaacattattgaatcggacgagtgcattaaagcgtgtggtctagaccggaaagctttaggtatatcttcggacgcattgttggaatctcagttcacacataaactctgctcggttaaatgcttaaaccaatgtcctaacgtagtcgatctctacttcaaccttgctgctggtgaaggagtgtatttaccaaagctatgtgaatcacaagaagggaagtcaagaagagcaatgtcggaaattaggagctcgggaattgcaatggacactcttgcaccggttggaccagtcatgttgggcgagatagcacctgagccggctacttcaatggacaacatgccttacgtgccggcaccttcaccgtattaattaaggcaagggaaaatggagaggacacgtatgatatcatgagttttcgacgagaataattaagagatttatgtttagttcgacggttttagtattacatcgtttattgcgtccttatatatatgtacttcataaaaacacaccacgacacattaagagatggtgaaagtaggctgcgttctggtgtaacttttacacaagtaacgtcttataatatatatgattcgaataaaatgttgagttttggtgaaaatatataatatgtttctgc

SEQ ID NO: 30470 - protein, 195 aa, Arabidopsis thaliana
  peptide (1)..(195): Ceres Seq. ID no. 13499518
  misc_feature (3)..(165): Homolog of NCBI NO: 10798750 NR Description: Elicitor inducible gene product Nt-SubE80
  misc_feature (1)..(193): Homolog of NCBI NO: 15232407 NR Description: photoassimilate-responsive protein PAR-1b
  misc_feature (1)..(194): Homolog of NCBI NO: 1362109 NR Description: PAR-1a protein - common tobacco
  misc_feature (1)..(194): Homolog of NCBI NO: 2129957 NR Description: photoassimilate-responsive protein precursor
  misc_feature (1)..(194): Homolog of NCBI NO: 2129955 NR Description: photoassimilate-responsive protein PAR-1b
  misc_feature (2)..(169): Homolog of NCBI NO: 2129956 NR Description: photoassimilate-responsive protein PAR-1c
  misc_feature (1)..(195): Homolog of NCBI NO: 21553901 NR Description: photoassimilate-responsive protein PAR-like
  misc_feature (1)..(195): Homolog of NCBI NO: 15237149 NR Description: photoassimilate-responsive protein PAR-related
MALKTVFVAFMILLAIYSQTTFGDDVKCENLDENTCAFAVSSTGKRCVLEKSMKRSGIEVYTCRSSEIEANKVTNIIESDECIKACGLDRKALGISSDALLESQFTHKLCSVKCLNQCPNVVDLYFNLAAGEGVYLPKLCESQEGKSRRAMSEIRSSGIAMDTLAPVGPVMLGEIAPEPATSMDNMPYVPAPSPY

SEQ ID NO: 30471 - protein, 185 aa, Arabidopsis thaliana
  peptide (1)..(185): Ceres Seq. ID no. 13499519
  misc_feature (1)..(155): Homolog of NCBI NO: 10798750 NR Description: Elicitor inducible gene product Nt-SubE80
  misc_feature (1)..(183): Homolog of NCBI NO: 15232407 NR Description: photoassimilate-responsive protein PAR-1b
  misc_feature (1)..(184): Homolog of NCBI NO: 1362109 NR Description: PAR-1a protein - common tobacco
  misc_feature (1)..(184): Homolog of NCBI NO: 2129957 NR Description: photoassimilate-responsive protein precursor
  misc_feature (1)..(184): Homolog of NCBI NO: 2129955 NR Description: photoassimilate-responsive protein PAR-1b
  misc_feature (1)..(159): Homolog of NCBI NO: 2129956 NR Description: photoassimilate-responsive protein PAR-1c
  misc_feature (1)..(185): Homolog of NCBI NO: 21553901 NR Description: photoassimilate-responsive protein PAR-like
  misc_feature (1)..(185): Homolog of NCBI NO: 15237149 NR Description: photoassimilate-responsive protein PAR-related
MILLAIYSQTTFGDDVKCENLDENTCAFAVSSTGKRCVLEKSMKRSGIEVYTCRSSEIEANKVTNIIESDECIKACGLDRKALGISSDALLESQFTHKLCSVKCLNQCPNVVDLYFNLAAGEGVYLPKLCESQEGKSRRAMSEIRSSGIAMDTLAPVGPVMLGEIAPEPATSMDNMPYVPAPSPY

SEQ ID NO: 30472 - protein, 143 aa, Arabidopsis thaliana
  peptide (1)..(143): Ceres Seq. ID no. 13499520
  misc_feature (1)..(113): Homolog of NCBI NO: 10798750 NR Description: Elicitor inducible gene product Nt-SubE80
  misc_feature (1)..(141): Homolog of NCBI NO: 15232407 NR Description: photoassimilate-responsive protein PAR-1b
  misc_feature (1)..(142): Homolog of NCBI NO: 1362109 NR Description: PAR-1a protein - common tobacco
  misc_feature (1)..(142): Homolog of NCBI NO: 2129957 NR Description: photoassimilate-responsive protein precursor
  misc_feature (1)..(142): Homolog of NCBI NO: 2129955 NR Description: photoassimilate-responsive protein PAR-1b
  misc_feature (1)..(117): Homolog of NCBI NO: 2129956 NR Description: photoassimilate-responsive protein PAR-1c
  misc_feature (1)..(143): Homolog of NCBI NO: 21553901 NR Description: photoassimilate-responsive protein PAR-like
  misc_feature (1)..(143): Homolog of NCBI NO: 15237149 NR Description: photoassimilate-responsive protein PAR-related
MKRSGIEVYTCRSSEIEANKVTNIIESDECIKACGLDRKALGISSDALLESQFTHKLCSVKCLNQCPNVVDLYFNLAAGEGVYLPKLCESQEGKSRRAMSEIRSSGIAMDTLAPVGPVMLGEIAPEPATSMDNMPYVPAPSPY

SEQ ID NO: 30473 - DNA, 687 bp, Arabidopsis thaliana
  misc_feature (1)..(687): Ceres Seq. ID no. 12580320
  misc_feature: MA Experiment ID: 108473 Result: Down-regulated in Transcription
  misc_feature: MA Experiment 108473 PARAMETER Experiment Name: At_Drought_Flowers_cDNA_P Parameter: Timepoint (hr) Value: 7 d
  misc_feature: MA Experiment 108473 PARAMETER Experiment Name: At_Drought_Flowers_cDNA_P Parameter: Tissue Value: Flower
  misc_feature: MA Experiment 108473 PARAMETER Experiment Name: At_Drought_Flowers_cDNA_P Parameter: Treatment Value: Drought vs. No Drought
  misc_feature: MA Experiment ID: 108501 Result: Down-regulated in Transcription
  misc_feature: MA Experiment 108501 PARAMETER Experiment Name: At_ap2_floral_buds_cDNA_P Parameter: Plant Line Value: ap2 (Ler.)
  misc_feature: MA Experiment 108501 PARAMETER Experiment Name: At_ap2_floral_buds_cDNA_P Parameter: Tissue Value: Closed Flower
  misc_feature: MA Experiment ID: 108569 Result: Down-regulated in Transcription
  misc_feature: MA Experiment 108569 PARAMETER Experiment Name: At_0.001%_MeJA__cDNA_P Parameter: Timepoint (hr) Value: 6
  misc_feature: MA Experiment 108569 PARAMETER Experiment Name: At_0.001%_MeJA__cDNA_P Parameter: Tissue Value: Aerial
  misc_feature: MA Experiment 108569 PARAMETER Experiment Name: At_0.001%_MeJA__cDNA_P Parameter: Treatment Value: 0.001% MeJA vs. No Treatment
  misc_feature: MA Experiment ID: 108595 Result: Up-regulated in Transcription
  misc_feature: MA Experiment 108595 PARAMETER Experiment Name: At_Ler-pi_Ovule_cDNA_P Parameter: Plant Line Value: null
  misc_feature: MA Experiment ID: 20000265 Result: Up-regulated in Transcription
  misc_feature: MA Experiment 20000265 PARAMETER Experiment Name: At_Open_Flower_P Parameter: Age (day) Value: 21
  misc_feature: MA Experiment 20000265 PARAMETER Experiment Name: At_Open_Flower_P Parameter: Plant Line Value: WS
  misc_feature: MA Experiment 20000265 PARAMETER Experiment Name: At_Open_Flower_P Parameter: Tissue Value: Closed Flower vs. Whole Plant
  misc_feature: MA Experiment ID: 20000286 Result: Up-regulated in Transcription
  misc_feature: MA Experiment 20000286 PARAMETER Experiment Name: At_Open_Flower_P Parameter: Age (day) Value: 21
  misc_feature: MA Experiment 20000286 PARAMETER Experiment Name: At_Open_Flower_P Parameter: Plant Line Value: WS
  misc_feature: MA Experiment 20000286 PARAMETER Experiment Name: At_Open_Flower_P Parameter: Tissue Value: Half Open vs. Whole Plant
  misc_feature: MA Experiment ID: 20001910 Result: Down-regulated in Transcription
  misc_feature: MA Experiment 20001910 PARAMETER Experiment Name: At_Drought_Reproduction_P Parameter: Age (day) Value: 37
  misc_feature: MA Experiment 20001910 PARAMETER Experiment Name: At_Drought_Reproduction_P Parameter: Organism Value: A. thaliana
  misc_feature: MA Experiment 20001910 PARAMETER Experiment Name: At_Drought_Reproduction_P Parameter: Plant Line Value: WS
  misc_feature: MA Experiment 20001910 PARAMETER Experiment Name: At_Drought_Reproduction_P Parameter: Timepoint (day) Value: 7
  misc_feature: MA Experiment 20001910 PARAMETER Experiment Name: At_Drought_Reproduction_P Parameter: Tissue Value: Flowers
  misc_feature: MA Experiment 20001910 PARAMETER Experiment Name: At_Drought_Reproduction_P Parameter: Treatment Value: Drought vs. No Drought
aacaataaaacaaagtgattttattatggcgttaagagagatgataatagatgagagtgatgacatagagagctacagtgatcaatctctttgtcttgataaagccaaggagcttcttgctctcatcaaactacccacgggattgttgccattgaaggatatgacggaagttgggtacaacaaaacaaaagggtttgtgtggatgaggctgagaagcaagattgagcatacattccgtgagataggtcgcagagttttatatgacacggcagataactgcgtttgttgaggaccgccgtatgaggagacttaccggagtcaaaagcaaagagctcatgatctgggttcctgtgaatgatatcttcatcaaagagaaagatcctgagaagatcacctttgctaataccaccggcctgtcacgaacatttaaagtttcagcatttcaatgtgaaggttgataaataaaaagaaaagaggagtaaccagacttccttgatgaaagcaaccaataaagaacagaagttgttccatactcaataagagatagtttaattaaatatcaaggacacgcctttcttacaatgaattgcttatggatcatcacagtaaataaacaggttctgcaattgatgccttgatgtataacagtgagtttccaatcaacatattagaatcgattcattggtt

SEQ ID NO: 30474 - protein, 95 aa, Arabidopsis thaliana
  peptide (1)..(95): Ceres Seq. ID no. 12580321
  misc_feature (13)..(89): Pfam Name: Protein of unknown function, DUF538 Pfam Description: Protein of unknown function, DUF538
  misc_feature (13)..(89): Pfam Name: Protein of unknown function, DUF538 Pfam Description: Protein of unknown function, DUF538
  misc_feature (13)..(89): Pfam Name: Protein of unknown function, DUF538 Pfam Description: Protein of unknown function, DUF538
  misc_feature (48)..(88): Homolog of NCBI NO: 37536100 NR Description: hypothetical protein [Oryza sativa (japonica
  misc_feature (23)..(87): Homolog of NCBI NO: 33146557 NR Description: unknown protein [Oryza sativa (japonica
  misc_feature (23)..(89): Homolog of NCBI NO: 18405887 NR Description: expressed protein
  misc_feature (23)..(87): Homolog of NCBI NO: 34915422 NR Description: hypothetical protein~similar to Arabidopsis
  misc_feature (23)..(87): Homolog of NCBI NO: 34915426 NR Description: hypothetical protein~similar to Arabidopsis
  misc_feature (48)..(88): Homolog of NCBI NO: 37536100 NR Description: hypothetical protein [Oryza sativa (japonica
  misc_feature (23)..(89): Homolog of NCBI NO: 18405887 NR Description: expressed protein
  misc_feature (23)..(87): Homolog of NCBI NO: 34915426 NR Description: hypothetical protein~similar to Arabidopsis
  misc_feature (23)..(87): Homolog of NCBI NO: 34915422 NR Description: hypothetical protein~similar to Arabidopsis
  misc_feature (23)..(89): Homolog of NCBI NO: 18405887 NR Description: expressed protein
  misc_feature (23)..(87): Homolog of NCBI NO: 33146557 NR Description: unknown protein [Oryza sativa (japonica
  misc_feature (48)..(88): Homolog of NCBI NO: 37536100 NR Description: hypothetical protein [Oryza sativa (japonica
  misc_feature (9)..(89): Homolog of NCBI NO: 15220641 NR Description: unknown protein; protein id: At1g30020.1
  misc_feature (9)..(89): Homolog of NCBI NO: 18422648 NR Description: expressed protein
  misc_feature (23)..(87): Homolog of NCBI NO: 34903866 NR Description: unnamed protein product [Oryza sativa (japonica
  misc_feature (23)..(89): Homolog of NCBI NO: 18391006 NR Description: expressed protein
  misc_feature (23)..(87): Homolog of NCBI NO: 34915376 NR Description: hypothetical protein~similar to Oryza sativa
  misc_feature (9)..(89): Homolog of NCBI NO: 15220641 NR Description: unknown protein; protein id: At1g30020.1
  misc_feature (9)..(89): Homolog of NCBI NO: 18422648 NR Description: expressed protein
  misc_feature (23)..(87): Homolog of NCBI NO: 34903866 NR Description: unnamed protein product [Oryza sativa (japonica
  misc_feature (23)..(89): Homolog of NCBI NO: 18391006 NR Description: expressed protein
  misc_feature (23)..(87): Homolog of NCBI NO: 34915376 NR Description: hypothetical protein~similar to Oryza sativa
  misc_feature (23)..(87): Homolog of NCBI NO: 34915426 NR Description: hypothetical protein~similar to Arabidopsis
  misc_feature (23)..(87): Homolog of NCBI NO: 34915422 NR Description: hypothetical protein~similar to Arabidopsis
  misc_feature (23)..(87): Homolog of NCBI NO: 33146557 NR Description: unknown protein [Oryza sativa (japonica
  misc_feature (23)..(87): Homolog of NCBI NO: 34915376 NR Description: hypothetical protein~similar to Oryza sativa
  misc_feature (23)..(89): Homolog of NCBI NO: 18391006 NR Description: expressed protein
  misc_feature (23)..(87): Homolog of NCBI NO: 34903866 NR Description: unnamed protein product [Oryza sativa (japonica
  misc_feature (9)..(89): Homolog of NCBI NO: 18422648 NR Description: expressed protein
  misc_feature (9)..(89): Homolog of NCBI NO: 15220641 NR Description: unknown protein; protein id: At1g30020.1
TIKQSDFIMALREMIIDESDDIESYSDQSLCLDKAKELLALIKLPTGLLPLKDMTEVGYNKTKGFVWMRLRSKIEHTFREIGRRVLYDTADNCVC

SEQ ID NO: 30475 - protein, 87 aa, Arabidopsis thaliana
  peptide (1)..(87): Ceres Seq. ID no. 12580322
  misc_feature (5)..(81): Pfam Name: Protein of unknown function, DUF538 Pfam Description: Protein of unknown function, DUF538
  misc_feature (5)..(81): Pfam Name: Protein of unknown function, DUF538 Pfam Description: Protein of unknown function, DUF538
  misc_feature (5)..(81): Pfam Name: Protein of unknown function, DUF538 Pfam Description: Protein of unknown function, DUF538
  misc_feature (40)..(80): Homolog of NCBI NO: 37536100 NR Description: hypothetical protein [Oryza sativa (japonica
  misc_feature (15)..(79): Homolog of NCBI NO: 33146557 NR Description: unknown protein [Oryza sativa (japonica
  misc_feature (15)..(81): Homolog of NCBI NO: 18405887 NR Description: expressed protein
  misc_feature (15)..(79): Homolog of NCBI NO: 34915422 NR Description: hypothetical protein~similar to Arabidopsis
  misc_feature (15)..(79): Homolog of NCBI NO: 34915426 NR Description: hypothetical protein~similar to Arabidopsis
  misc_feature (40)..(80): Homolog of NCBI NO: 37536100 NR Description: hypothetical protein [Oryza sativa (japonica
  misc_feature (15)..(81): Homolog of NCBI NO: 18405887 NR Description: expressed protein
  misc_feature (15)..(79): Homolog of NCBI NO: 34915426 NR Description: hypothetical protein~similar to Arabidopsis
  misc_feature (15)..(79): Homolog of NCBI NO: 34915422 NR Description: hypothetical protein~similar to Arabidopsis
  misc_feature (15)..(81): Homolog of NCBI NO: 18405887 NR Description: expressed protein
  misc_feature (15)..(79): Homolog of NCBI NO: 33146557 NR Description: unknown protein [Oryza sativa (japonica
  misc_feature (40)..(80): Homolog of NCBI NO: 37536100 NR Description: hypothetical protein [Oryza sativa (japonica
  misc_feature (1)..(81): Homolog of NCBI NO: 15220641 NR Description: unknown protein; protein id: At1g30020.1
  misc_feature (1)..(81): Homolog of NCBI NO: 18422648 NR Description: expressed protein
  misc_feature (15)..(79): Homolog of NCBI NO: 34903866 NR Description: unnamed protein product [Oryza sativa (japonica
  misc_feature (15)..(81): Homolog of NCBI NO: 18391006 NR Description: expressed protein
  misc_feature (15)..(79): Homolog of NCBI NO: 34915376 NR Description: hypothetical protein~similar to Oryza sativa
  misc_feature (1)..(81): Homolog of NCBI NO: 15220641 NR Description: unknown protein; protein id: At1g30020.1
  misc_feature (1)..(81): Homolog of NCBI NO: 18422648 NR Description: expressed protein
  misc_feature (15)..(79): Homolog of NCBI NO: 34903866 NR Description: unnamed protein product [Oryza sativa (japonica
  misc_feature (15)..(81): Homolog of NCBI NO: 18391006 NR Description: expressed protein
  misc_feature (15)..(79): Homolog of NCBI NO: 34915376 NR Description: hypothetical protein~similar to Oryza sativa
  misc_feature (15)..(79): Homolog of NCBI NO: 34915426 NR Description: hypothetical protein~similar to Arabidopsis
  misc_feature (15)..(79): Homolog of NCBI NO: 34915422 NR Description: hypothetical protein~similar to Arabidopsis
  misc_feature (15)..(79): Homolog of NCBI NO: 33146557 NR Description: unknown protein [Oryza sativa (japonica
  misc_feature (15)..(79): Homolog of NCBI NO: 34915376 NR Description: hypothetical protein~similar to Oryza sativa
  misc_feature (15)..(81): Homolog of NCBI NO: 18391006 NR Description: expressed protein
  misc_feature (15)..(79): Homolog of NCBI NO: 34903866 NR Description: unnamed protein product [Oryza sativa (japonica
  misc_feature (1)..(81): Homolog of NCBI NO: 18422648 NR Description: expressed protein
  misc_feature (1)..(81): Homolog of NCBI NO: 15220641 NR Description: unknown protein; protein id: At1g30020.1
MALREMIIDESDDIESYSDQSLCLDKAKELLALIKLPTGLLPLKDMTEVGYNKTKGFVWMRLRSKIEHTFREIGRRVLYDTADNCVC

SEQ ID NO: 30476 - protein, 82 aa, Arabidopsis thaliana
  peptide (1)..(82): Ceres Seq. ID no. 12580323
  misc_feature (1)..(76): Pfam Name: Protein of unknown function, DUF538 Pfam Description: Protein of unknown function, DUF538
  misc_feature (1)..(76): Pfam Name: Protein of unknown function, DUF538 Pfam Description: Protein of unknown function, DUF538
  misc_feature (1)..(76): Pfam Name: Protein of unknown function, DUF538 Pfam Description: Protein of unknown function, DUF538
  misc_feature (35)..(75): Homolog of NCBI NO: 37536100 NR Description: hypothetical protein [Oryza sativa (japonica
  misc_feature (10)..(74): Homolog of NCBI NO: 33146557 NR Description: unknown protein [Oryza sativa (japonica
  misc_feature (10)..(76): Homolog of NCBI NO: 18405887 NR Description: expressed protein
  misc_feature (10)..(74): Homolog of NCBI NO: 34915422 NR Description: hypothetical protein~similar to Arabidopsis
  misc_feature (10)..(74): Homolog of NCBI NO: 34915426 NR Description: hypothetical protein~similar to Arabidopsis
  misc_feature (35)..(75): Homolog of NCBI NO: 37536100 NR Description: hypothetical protein [Oryza sativa (japonica
  misc_feature (10)..(76): Homolog of NCBI NO: 18405887 NR Description: expressed protein
  misc_feature (10)..(74): Homolog of NCBI NO: 34915426 NR Description: hypothetical protein~similar to Arabidopsis
  misc_feature (10)..(74): Homolog of NCBI NO: 34915422 NR Description: hypothetical protein~similar to Arabidopsis
  misc_feature (10)..(76): Homolog of NCBI NO: 18405887 NR Description: expressed protein
  misc_feature (10)..(74): Homolog of NCBI NO: 33146557 NR Description: unknown protein [Oryza sativa (japonica
  misc_feature (35)..(75): Homolog of NCBI NO: 37536100 NR Description: hypothetical protein [Oryza sativa (japonica
  misc_feature (1)..(76): Homolog of NCBI NO: 15220641 NR Description: unknown protein; protein id: At1g30020.1
  misc_feature (1)..(76): Homolog of NCBI NO: 18422648 NR Description: expressed protein
  misc_feature (10)..(74): Homolog of NCBI NO: 34903866 NR Description: unnamed protein product [Oryza sativa (japonica
  misc_feature (10)..(76): Homolog of NCBI NO: 18391006 NR Description: expressed protein
  misc_feature (10)..(74): Homolog of NCBI NO: 34915376 NR Description: hypothetical protein~similar to Oryza sativa
  misc_feature (1)..(76): Homolog of NCBI NO: 15220641 NR Description: unknown protein; protein id: At1g30020.1
  misc_feature (1)..(76): Homolog of NCBI NO: 18422648 NR Description: expressed protein
  misc_feature (10)..(74): Homolog of NCBI NO: 34903866 NR Description: unnamed protein product [Oryza sativa (japonica
  misc_feature (10)..(76): Homolog of NCBI NO: 18391006 NR Description: expressed protein
  misc_feature (10)..(74): Homolog of NCBI NO: 34915376 NR Description: hypothetical protein~similar to Oryza sativa
  misc_feature (10)..(74): Homolog of NCBI NO: 34915426 NR Description: hypothetical protein~similar to Arabidopsis
  misc_feature (10)..(74): Homolog of NCBI NO: 34915422 NR Description: hypothetical protein~similar to Arabidopsis
  misc_feature (10)..(74): Homolog of NCBI NO: 33146557 NR Description: unknown protein [Oryza sativa (japonica
  misc_feature (10)..(74): Homolog of NCBI NO: 34915376 NR Description: hypothetical protein~similar to Oryza sativa
  misc_feature (10)..(76): Homolog of NCBI NO: 18391006 NR Description: expressed protein
  misc_feature (10)..(74): Homolog of NCBI NO: 34903866 NR Description: unnamed protein product [Oryza sativa (japonica
  misc_feature (1)..(76): Homolog of NCBI NO: 18422648 NR Description: expressed protein
  misc_feature (1)..(76): Homolog of NCBI NO: 15220641 NR Description: unknown protein; protein id: At1g30020.1
MIIDESDDIESYSDQSLCLDKAKELLALIKLPTGLLPLKDMTEVGYNKTKGFVWMRLRSKIEHTFREIGRRVLYDTADNCVC

SEQ ID NO: 30477 - DNA, 2852 bp, Arabidopsis thaliana
  misc_feature (1)..(2852): Ceres Seq. ID no. 12422999
  misc_feature: MA Experiment ID: 108573 Result: Up-regulated in Transcription
  misc_feature: MA Experiment 108573 PARAMETER Experiment Name: At_Drought_cDNA_P Parameter: Timepoint (hr) Value: 6
  misc_feature: MA Experiment 108573 PARAMETER Experiment Name: At_Drought_cDNA_P Parameter: Tissue Value: Aerial
  misc_feature: MA Experiment 108573 PARAMETER Experiment Name: At_Drought_cDNA_P Parameter: Treatment Value: Drought vs. No Drought
  misc_feature: MA Experiment ID: 20000111 Result: Down-regulated in Transcription
  misc_feature: MA Experiment 20000111 PARAMETER Experiment Name: At_42deg_Heat_cDNA_P Parameter: Temperature (deg C) Value: 42 vs. 22
  misc_feature: MA Experiment 20000111 PARAMETER Experiment Name: At_42deg_Heat_cDNA_P Parameter: Timepoint (hr) Value: 6
  misc_feature: MA Experiment 20000111 PARAMETER Experiment Name: At_42deg_Heat_cDNA_P Parameter: Tissue Value: Aerial
  misc_feature: MA Experiment ID: 20000113 Result: Down-regulated in Transcription
  misc_feature: MA Experiment 20000113 PARAMETER Experiment Name: At_42deg_Heat_cDNA_P Parameter: Temperature (deg C) Value: 42 vs. 22
  misc_feature: MA Experiment 20000113 PARAMETER Experiment Name: At_42deg_Heat_cDNA_P Parameter: Timepoint (hr) Value: 8
  misc_feature: MA Experiment 20000113 PARAMETER Experiment Name: At_42deg_Heat_cDNA_P Parameter: Tissue Value: Aerial
  misc_feature: MA Experiment ID: 20000173 Result: Down-regulated in Transcription
  misc_feature: MA Experiment 20000173 PARAMETER Experiment Name: At_42deg_Heat_P Parameter: Age (day) Value: 14
  misc_feature: MA Experiment 20000173 PARAMETER Experiment Name: At_42deg_Heat_P Parameter: Organism Value: A. thaliana
  misc_feature: MA Experiment 20000173 PARAMETER Experiment Name: At_42deg_Heat_P Parameter: Plant Line Value: WS
  misc_feature: MA Experiment 20000173 PARAMETER Experiment Name: At_42deg_Heat_P Parameter: Temperature (deg C) Value: 42 vs. 22
  misc_feature: MA Experiment 20000173 PARAMETER Experiment Name: At_42deg_Heat_P Parameter: Timepoint (hr) Value: 6
  misc_feature: MA Experiment 20000173 PARAMETER Experiment Name: At_42deg_Heat_P Parameter: Tissue Value: Aerial
  misc_feature: MA Experiment ID: 20000184 Result: Down-regulated in Transcription
  misc_feature: MA Experiment 20000184 PARAMETER Experiment Name: At_Shoots__P Parameter: Age (day) Value: 7
  misc_feature: MA Experiment 20000184 PARAMETER Experiment Name: At_Shoots__P Parameter: Tissue Value: Shoots vs. Whole Plant
aaaaaccggcgagacggaaaatttcagcgtttccgaactttccattagagtcgcgagacgatagatgagactcgttccagaaatttaatcgttgcttctcttcccagctgatctgcgtccaacatcactgtttccaggatcttcagaatcagcgaaggaagaagataagaggacgacgaagtaattgaagttggagaatcgcacatttggctctcgatatttgctcaatgacttcttattcgaggtagccttcaatttaggatcggagttcgtaaataaggtgatttagcgaagatgatggtcgaagatcttggtgtggaagcgaaggaagcggctgtgcgagaagtggcgaagctcttacccttacctgaacttttgcagtctatttcttcaatcaaggccgattacatcgctcgtcaacaggcaaatgatgcacagctcagtactatggttgctgagcaggttgaacaagctcaagctgggttagagtcactttcatcatctgagaaaaccatttatgaactgcgggataatttcatttctatcgacaagctttgtcaggaatgtcaaactttgattgacaatcatgaccaaataaagctgctgagtaacgccaggaataatctaaacaaaactctaaaggatgtagaaggtatgatgtcaatttctgttgaagctgctgcggctagggattctttgagtgatgataaagaaatcgttaacacttatgagagattaacagcacttgatggtaaacgaagatttgcattagcagctgctggagaggaggttgggaggctgagggagtattttgaagatgttgatagaacatgggaaacattcgagaagacactatggggtcatgtttccaactattacaaactttctaaagaaagtccgcaaacactggttcgtgctttgagggttgttgagatgcaagaaattctagaccaacagcttgctgaagaagcagcagaggctgagggagaaggtgcgatggcatctgtagcaaatcctcgaaggcctggcaagaaatctactacaacgtcagcgtcgtcaaagggtcttgctcaacagaaattaaaagtccaagggaaaggctacaaggacaaatgctacgagcaaattcggaaggcggttgaagatcgattcaacaggcttttgacgcttgtctttgaagatctaaaagcagctttggaagaagctagaatgattggagaggaacttggagatatttatgactatgtggctccttgttttcctccaagatacgagatatttcagcttatggtgaacctgtataccgagagattcatacaaatgctcagattgctcagtgacagagcaaacgatctgacaaatatagagattttaaaggtgactggttgggtggtagagtaccaagaaaacttgattgcacttggtgttgatgattcactagctcaagtgtgttctgagagcggttcaatggatcctctaatgaatgcatatgttgaaagaatgcaagctacaacgaagaaatggtacatgaatatcctagaggcggataaggtgcaaccacctaaaaaaactgaggaaggaaaattatatacaccggctgctgtagatttattcagaatacttggagagcaagtgcaaattgtcagagataacagcacggatgttatgttgtacaggattgctttagctattattcaggttatgattgatttccaagcagctgaaaagaagagagttgatgaacctgcatctgatattggtctggaacctctatgcgctatgataaacaacaaccttcgctgctacgaccttgccatggagttaagtaatagcactttagaagctcttccacaaaattatgcagagcaggtgaattttgaagacacttgcaaaggtttcttggaggtggctaaggaagcagtgcatcaaacagttcgcgttatctttgaggatccaggagttcaggaattacttgtcaagctttaccagaaagaatggtgcgagggacaggttaccgagtacctcgtggcaactttcggtgattatttcacagatgtgaaaatgtatgtcgaagaaagatcatttagaagatttgtcgaagcatgtttggaagaaacagtcgttgtctatgttgaccatctcctaactcagaaaaactacatcaaggaagaaactattgaacggatgaggctagatgaagaggttctcatggatttctttagggagtatataagtgcatctaaagtggagagcagaatcagaataatgagcgatctgagagaacttgcatctgcagagagtctagatgcatttacactcgtgtactcgaatattctagagcaccagcctgactgcccggccgaggtcgtagagaagcttgttagtctgcgtgaaggcataccacggaaggacacaaaagaggtggtacaagagtgcaaagagatatatgagaacacactggtagatggtaatcctccaaagacaggatttgtattcccgagagtcaagtgcttaactgcttccaaaggatctatgtggcgaaaactcacttaatctgtaaaacagcgttcagcgtttgcgtccgtaactgcttttctagttgagatgatgttctttctccaaattatggcgtttgcgtccatgtcttctttttctttgcatggtatctttcctctgtaaattctgtgttttctcttgttttgttctttttcttacctttattcctggatttgaaagttgaaacgctcggtggccacttgcactaggatattatcccgttgtatttaggaggcgtatttttttgtcgcaaattttaattctactgtttcatttaattttgataaaatcttctt

SEQ ID NO: 30478 - protein, 752 aa, Arabidopsis thaliana
  peptide (1)..(752): Ceres Seq. ID no. 12423000
  misc_feature (1)..(220): Homolog of NCBI NO: 19922552 NR Description: CG5341-PA [Drosophila melanogaster]
  misc_feature (6)..(447): Homolog of NCBI NO: 7498734 NR Description: hypothetical protein F09E5.6 - Caenorhabditis
  misc_feature (6)..(466): Homolog of NCBI NO: 39596858 NR Description: Hypothetical protein CBG02377 [Caenorhabditis
  misc_feature (6)..(466): Homolog of NCBI NO: 25149395 NR Description: Putative cytoplasmic protein, with a coiled coil
  misc_feature (268)..(718): Homolog of NCBI NO: 19074839 NR Description: hypothetical protein [Encephalitozoon cuniculi]
  misc_feature (18)..(492): Homolog of NCBI NO: 25466279 NR Description: related to protein transport protein SEC6
  misc_feature (11)..(483): Homolog of NCBI NO: 40744733 NR Description: hypothetical protein AN1988.2 [Aspergillus
MMVEDLGVEAKEAAVREVAKLLPLPELLQSISSIKADYIARQQANDAQLSTMVAEQVEQAQAGLESLSSSEKTIYELRDNFISIDKLCQECQTLIDNHDQIKLLSNARNNLNKTLKDVEGMMSISVEAAAARDSLSDDKEIVNTYERLTALDGKRRFALAAAGEEVGRLREYFEDVDRTWETFEKTLWGHVSNYYKLSKESPQTLVRALRVVEMQEILDQQLAEEAAEAEGEGAMASVANPRRPGKKSTTTSASSKGLAQQKLKVQGKGYKDKCYEQIRKAVEDRFNRLLTLVFEDLKAALEEARMIGEELGDIYDYVAPCFPPRYEIFQLMVNLYTERFIQMLRLLSDRANDLTNIEILKVTGWVVEYQENLIALGVDDSLAQVCSESGSMDPLMNAYVERMQATTKKWYMNILEADKVQPPKKTEEGKLYTPAAVDLFRILGEQVQIVRDNSTDVMLYRIALAIIQVMIDFQAAEKKRVDEPASDIGLEPLCAMINNNLRCYDLAMELSNSTLEALPQNYAEQVNFEDTCKGFLEVAKEAVHQTVRVIFEDPGVQELLVKLYQKEWCEGQVTEYLVATFGDYFTDVKMYVEERSFRRFVEACLEETVVVYVDHLLTQKNYIKEETIERMRLDEEVLMDFFREYISASKVESRIRIMSDLRELASAESLDAFTLVYSNILEHQPDCPAEVVEKLVSLREGIPRKDTKEVVQECKEIYENTLVDGNPPKTGFVFPRVKCLTASKGSMWRKLT

SEQ ID NO: 30479 - protein, 751 aa, Arabidopsis thaliana
  peptide (1)..(751): Ceres Seq. ID no. 12423001
  misc_feature (1)..(219): Homolog of NCBI NO: 19922552 NR Description: CG5341-PA [Drosophila melanogaster]
  misc_feature (5)..(446): Homolog of NCBI NO: 7498734 NR Description: hypothetical protein F09E5.6 - Caenorhabditis
  misc_feature (5)..(465): Homolog of NCBI NO: 39596858 NR Description: Hypothetical protein CBG02377 [Caenorhabditis
  misc_feature (5)..(465): Homolog of NCBI NO: 25149395 NR Description: Putative cytoplasmic protein, with a coiled coil
  misc_feature (267)..(717): Homolog of NCBI NO: 19074839 NR Description: hypothetical protein [Encephalitozoon cuniculi]
  misc_feature (17)..(491): Homolog of NCBI NO: 25466279 NR Description: related to protein transport protein SEC6
  misc_feature (10)..(482): Homolog of NCBI NO: 40744733 NR Description: hypothetical protein AN1988.2 [Aspergillus
MVEDLGVEAKEAAVREVAKLLPLPELLQSISSIKADYIARQQANDAQLSTMVAEQVEQAQAGLESLSSSEKTIYELRDNFISIDKLCQECQTLIDNHDQIKLLSNARNNLNKTLKDVEGMMSISVEAAAARDSLSDDKEIVNTYERLTALDGKRRFALAAAGEEVGRLREYFEDVDRTWETFEKTLWGHVSNYYKLSKESPQTLVRALRVVEMQEILDQQLAEEAAEAEGEGAMASVANPRRPGKKSTTTSASSKGLAQQKLKVQGKGYKDKCYEQIRKAVEDRFNRLLTLVFEDLKAALEEARMIGEELGDIYDYVAPCFPPRYEIFQLMVNLYTERFIQMLRLLSDRANDLTNIEILKVTGWVVEYQENLIALGVDDSLAQVCSESGSMDPLMNAYVERMQATTKKWYMNILEADKVQPPKKTEEGKLYTPAAVDLFRILGEQVQIVRDNSTDVMLYRIALAIIQVMIDFQAAEKKRVDEPASDIGLEPLCAMINNNLRCYDLAMELSNSTLEALPQNYAEQVNFEDTCKGFLEVAKEAVHQTVRVIFEDPGVQELLVKLYQKEWCEGQVTEYLVATFGDYFTDVKMYVEERSFRRFVEACLEETVVVYVDHLLTQKNYIKEETIERMRLDEEVLMDFFREYISASKVESRIRIMSDLRELASAESLDAFTLVYSNILEHQPDCPAEVVEKLVSLREGIPRKDTKEVVQECKEIYENTLVDGNPPKTGFVFPRVKCLTASKGSMWRKLT

SEQ ID NO: 30480 - protein, 701 aa, Arabidopsis thaliana
  peptide (1)..(701): Ceres Seq. ID no. 12423002
  misc_feature (1)..(169): Homolog of NCBI NO: 19922552 NR Description: CG5341-PA [Drosophila melanogaster]
  misc_feature (1)..(396): Homolog of NCBI NO: 7498734 NR Description: hypothetical protein F09E5.6 - Caenorhabditis
  misc_feature (1)..(415): Homolog of NCBI NO: 39596858 NR Description: Hypothetical protein CBG02377 [Caenorhabditis
  misc_feature (1)..(415): Homolog of NCBI NO: 25149395 NR Description: Putative cytoplasmic protein, with a coiled coil
  misc_feature (217)..(667): Homolog of NCBI NO: 19074839 NR Description: hypothetical protein [Encephalitozoon cuniculi]
  misc_feature (1)..(441): Homolog of NCBI NO: 25466279 NR Description: related to protein transport protein SEC6
  misc_feature (1)..(432): Homolog of NCBI NO: 40744733 NR Description: hypothetical protein AN1988.2 [Aspergillus
MVAEQVEQAQAGLESLSSSEKTIYELRDNFISIDKLCQECQTLIDNHDQIKLLSNARNNLNKTLKDVEGMMSISVEAAAARDSLSDDKEIVNTYERLTALDGKRRFALAAAGEEVGRLREYFEDVDRTWETFEKTLWGHVSNYYKLSKESPQTLVRALRVVEMQEILDQQLAEEAAEAEGEGAMASVANPRRPGKKSTTTSASSKGLAQQKLKVQGKGYKDKCYEQIRKAVEDRFNRLLTLVFEDLKAALEEARMIGEELGDIYDYVAPCFPPRYEIFQLMVNLYTERFIQMLRLLSDRANDLTNIEILKVTGWVVEYQENLIALGVDDSLAQVCSESGSMDPLMNAYVERMQATTKKWYMNILEADKVQPPKKTEEGKLYTPAAVDLFRILGEQVQIVRDNSTDVMLYRIALAIIQVMIDFQAAEKKRVDEPASDIGLEPLCAMINNNLRCYDLAMELSNSTLEALPQNYAEQVNFEDTCKGFLEVAKEAVHQTVRVIFEDPGVQELLVKLYQKEWCEGQVTEYLVATFGDYFTDVKMYVEERSFRRFVEACLEETVVVYVDHLLTQKNYIKEETIERMRLDEEVLMDFFREYISASKVESRIRIMSDLRELASAESLDAFTLVYSNILEHQPDCPAEVVEKLVSLREGIPRKDTKEVVQECKEIYENTLVDGNPPKTGFVFPRVKCLTASKGSMWRKLT

SEQ ID NO: 30481 - DNA, 2330 bp, Arabidopsis thaliana
  misc_feature (1)..(2330): Ceres Seq. ID no. 13494306
  misc_feature: MA Experiment ID: 108434 Result: Down-regulated in Transcription
  misc_feature: MA Experiment 108434 PARAMETER Experiment Name: At_Root_Tips_cDNA_P Parameter: Tissue Value: Root Tips
  misc_feature: MA Experiment ID: 108488 Result: Down-regulated in Transcription
  misc_feature: MA Experiment ID: 20000495 Result: Down-regulated in Transcription
  misc_feature: MA Experiment 20000495 PARAMETER Experiment Name: At_Guard_Cells_P Parameter: Harvest Date Value: 8/2/2002
  misc_feature: MA Experiment 20000495 PARAMETER Experiment Name: At_Guard_Cells_P Parameter: Organism Value: A. thaliana
  misc_feature: MA Experiment 20000495 PARAMETER Experiment Name: At_Guard_Cells_P Parameter: Tissue Value: Guard Cells vs. Leaves
tcagatcactcctcctctctcttctcctacctttttcacattctcttcttcttcttctcgtgagaaaaagaaagagagattctttattcattagatcgaagcaaaaatgtccacagcgccgtctccaggcactactccatcaccatctccaccgtctcctcccacaaactcgacaaccaccactcctcctccagcagcctcttctcctcctcccaccacaactccttcttctcctcctccgtcgccgtcaactaattcaacctctcctcctccttcttctcctttacctccttctcttcctcctccatctcctcctggatctttaactcctcctcttcctcaaccttccccctccgctcccatcactccttctccaccgtctcccaccacaccctcaaaccctcgaagccctccatctcctaaccaaggaccaccaaacactccctcaggatctactcctagaactccatcaaacactaaaccgtcgccgccgtctgattcttccgatggattgtctaccggagttgtggtaggaatcgccattggaggagtcgctattcttgttatactgactctgatttgtcttctctgtaagaagaaacgaagaagaagacacgacgatgaagctgcttactatgttcctcctcctcctccatctggtcccaaagctggaggaccttacggtggtcaacaacagtattggcaacaacaaaacgcgtcacggccgtcagataatcatgtagtgacgtcattgccaccacctaagcctccatctccaccacgaaaacctcctccgccacctccaccaccagcattcatgagtagcagtggtggttctgactattcggatcttccggttcttcctccaccatctccagggcttgtgttaggcttttctaaaagcactttcacttatgaggagttgtcgagagctactaatggcttctctgaggctaatttgttaggacaaggagggtttggttatgtgcataaaggtatattgcctagtgggaaagaagttgctgtgaaacagttgaaagctggtagtggtcagggagagagagagtttcaggctgaggttgagatcattagcagagttcatcacaggcatttggtttctcttattggttattgtatggccggtgttcaaagattacttgtctatgagtttgttccaaacaacaatcttgagtttcacctccatggtaagggacggcctacgatggaatggagtactagattgaagattgctcttggatctgctaaaggactttcatatcttcatgaagattgcaatccgaaaatcattcaccgtgatattaaggcgtcaaacatattgattgatttcaaatttgaagctaaggttgctgactttggtcttgccaagattgcttctgatacaaacactcatgtatctacacgcgtgatgggaacctttgggtatttggctccggaatatgctgcaagtggaaagctcacagaaaagtctgacgttttctcatttggcgttgtacttttggaacttattactgggaggcgccctgttgatgcgaacaatgtctatgtagatgacagcttagttgactgggcacgaccattgcttaaccgagcatctgaggaaggagattttgagggtttggctgattcaaagatgggtaatgagtatgacagagaggagatggctcgcatggttgcttgcgctgcggcttgtgttcgccattcagctcgccgcagacctcgcatgagccagatagtacgggcgttagaaggaaatgtatcgctgtctgatcttaacgaagggatgagaccgggtcacagcaacgtatacagctcatatggaggaagcacagactatgacacgagccaatacaacgacgacatgataaagtttaggaaaatggctcttggaactcaagaatacggcacaaccggcgagtacagtaatccaaccagtgactacggactgtacccgtctggttcaagcagtgaaggtcaagccacacgagaaatggagatgggaaagattaagaaaaccggtcaaggttatagtggaccctctctttaaaccataagagtggagaaattgcaggttttttttggattctttttcttattaactgtaaagatttgaggaaattgccttactctctaattgatttactacgatatatgatacgtttaaaattgttttgctttggtttcttctttagatgttgtgatgttgattgattctggtttgaatattattctttcattcttttttctatttttcttctgaagaatttgtttgttatgtcttttgagcttttggcctagtttggttaagttcc

SEQ ID NO: 30482 - protein, 652 aa, Arabidopsis thaliana
  peptide (1)..(652): Ceres Seq. ID no. 13494307
  misc_feature (280)..(479): Pfam Name: Protein kinase domain Pfam Description: Protein kinase domain
  misc_feature (179)..(259): Homolog of NCBI NO: 15230108 NR Description: protein kinase -related [Arabidopsis thaliana]
  misc_feature (5)..(147): Homolog of NCBI NO: 15230108 NR Description: protein kinase -related [Arabidopsis thaliana]
  misc_feature (17)..(133): Homolog of NCBI NO: 15230108 NR Description: protein kinase -related [Arabidopsis thaliana]
  misc_feature (5)..(129): Homolog of NCBI NO: 15230108 NR Description: protein kinase -related [Arabidopsis thaliana]
  misc_feature (5)..(133): Homolog of NCBI NO: 15230108 NR Description: protein kinase -related [Arabidopsis thaliana]
  misc_feature (4)..(137): Homolog of NCBI NO: 15230108 NR Description: protein kinase -related [Arabidopsis thaliana]
  misc_feature (1)..(132): Homolog of NCBI NO: 15230108 NR Description: protein kinase -related [Arabidopsis thaliana]
  misc_feature (3)..(221): Homolog of NCBI NO: 15230108 NR Description: protein kinase -related [Arabidopsis thaliana]
  misc_feature (218)..(647): Homolog of NCBI NO: 15230108 NR Description: protein kinase -related [Arabidopsis thaliana]
  misc_feature (1)..(652): Homolog of NCBI NO: 13447449 NR Description: receptor protein kinase PERK1 [Brassica napus]
MSTAPSPGTTPSPSPPSPPTNSTTTTPPPAASSPPPTTTPSSPPPSPSTNSTSPPPSSPLPPSLPPPSPPGSLTPPLPQPSPSAPITPSPPSPTTPSNPRSPPSPNQGPPNTPSGSTPRTPSNTKPSPPSDSSDGLSTGVVVGIAIGGVAILVILTLICLLCKKKRRRRHDDEAAYYVPPPPPSGPKAGGPYGGQQQYWQQQNASRPSDNHVVTSLPPPKPPSPPRKPPPPPPPPAFMSSSGGSDYSDLPVLPPPSPGLVLGFSKSTFTYEELSRATNGFSEANLLGQGGFGYVHKGILPSGKEVAVKQLKAGSGQGEREFQAEVEIISRVHHRHLVSLIGYCMAGVQRLLVYEFVPNNNLEFHLHGKGRPTMEWSTRLKIALGSAKGLSYLHEDCNPKIIHRDIKASNILIDFKFEAKVADFGLAKIASDTNTHVSTRVMGTFGYLAPEYAASGKLTEKSDVFSFGVVLLELITGRRPVDANNVYVDDSLVDWARPLLNRASEEGDFEGLADSKMGNEYDREEMARMVACAAACVRHSARRRPRMSQIVRALEGNVSLSDLNEGMRPGHSNVYSSYGGSTDYDTSQYNDDMIKFRKMALGTQEYGTTGEYSNPTSDYGLYPSGSSSEGQATREMEMGKIKKTGQGYSGPSL

SEQ ID NO: 30483 - protein, 415 aa, Arabidopsis thaliana
  peptide (1)..(415): Ceres Seq. ID no. 13494308
  misc_feature (43)..(242): Pfam Name: Protein kinase domain Pfam Description: Protein kinase domain
  misc_feature (1)..(408): Homolog of NCBI NO: 30690042 NR Description: serine threonine protein kinase -related
  misc_feature (1)..(391): Homolog of NCBI NO: 9293906 NR Description: somatic embryogenesis receptor kinase-like
  misc_feature (1)..(391): Homolog of NCBI NO: 15222081 NR Description: hypothetical protein [Arabidopsis thaliana]
  misc_feature (1)..(382): Homolog of NCBI NO: 15224182 NR Description: protein kinase -related [Arabidopsis thaliana]
  misc_feature (1)..(391): Homolog of NCBI NO: 15230209 NR Description: protein kinase -related [Arabidopsis thaliana]
  misc_feature (1)..(410): Homolog of NCBI NO: 11994703 NR Description: somatic embryogenesis receptor kinase-like
  misc_feature (1)..(22): Homolog of NCBI NO: 15230108 NR Description: protein kinase -related [Arabidopsis thaliana]
  misc_feature (1)..(22): Homolog of NCBI NO: 15230108 NR Description: protein kinase -related [Arabidopsis thaliana]
  misc_feature (1)..(410): Homolog of NCBI NO: 15230108 NR Description: protein kinase -related [Arabidopsis thaliana]
  misc_feature (1)..(415): Homolog of NCBI NO: 13447449 NR Description: receptor protein kinase PERK1 [Brassica napus]
MSSSGGSDYSDLPVLPPPSPGLVLGFSKSTFTYEELSRATNGFSEANLLGQGGFGYVHKGILPSGKEVAVKQLKAGSGQGEREFQAEVEIISRVHHRHLVSLIGYCMAGVQRLLVYEFVPNNNLEFHLHGKGRPTMEWSTRLKIALGSAKGLSYLHEDCNPKIIHRDIKASNILIDFKFEAKVADFGLAKIASDTNTHVSTRVMGTFGYLAPEYAASGKLTEKSDVFSFGVVLLELITGRRPVDANNVYVDDSLVDWARPLLNRASEEGDFEGLADSKMGNEYDREEMARMVACAAACVRHSARRRPRMSQIVRALEGNVSLSDLNEGMRPGHSNVYSSYGGSTDYDTSQYNDDMIKFRKMALGTQEYGTTGEYSNPTSDYGLYPSGSSSEGQATREMEMGKIKKTGQGYSGPSL

SEQ ID NO: 30484 - DNA, 750 bp, Arabidopsis thaliana
  misc_feature (1)..(750): Ceres Seq. ID no. 13497622
  misc_feature: MA Experiment ID: 108434 Result: Up-regulated in Transcription
  misc_feature: MA Experiment 108434 PARAMETER Experiment Name: At_Root_Tips_cDNA_P Parameter: Tissue Value: Root Tips
  misc_feature: MA Experiment ID: 108462 Result: Down-regulated in Transcription
  misc_feature: MA Experiment 108462 PARAMETER Experiment Name: At_Germinating_Seeds_cDNA_P Parameter: Age (day) Value: 2 vs. 0
  misc_feature: MA Experiment 108462 PARAMETER Experiment Name: At_Germinating_Seeds_cDNA_P Parameter: Tissue Value: Germinating Seeds
  misc_feature: MA Experiment ID: 108463 Result: Down-regulated in Transcription
  misc_feature: MA Experiment 108463 PARAMETER Experiment Name: At_Germinating_Seeds_cDNA_P Parameter: Age (day) Value: 3 vs. 0
  misc_feature: MA Experiment 108463 PARAMETER Experiment Name: At_Germinating_Seeds_cDNA_P Parameter: Tissue Value: Germinating Seeds
  misc_feature: MA Experiment ID: 108464 Result: Down-regulated in Transcription
  misc_feature: MA Experiment 108464 PARAMETER Experiment Name: At_Germinating_Seeds_cDNA_P Parameter: Age (day) Value: 4 vs. 0
  misc_feature: MA Experiment 108464 PARAMETER Experiment Name: At_Germinating_Seeds_cDNA_P Parameter: Tissue Value: Germinating Seeds
  misc_feature: MA Experiment ID: 108488 Result: Up-regulated in Transcription
  misc_feature: MA Experiment ID: 108561 Result: Down-regulated in Transcription
  misc_feature: MA Experiment 108561 PARAMETER Experiment Name: At_100uM_ABA_cDNA_P Parameter: Timepoint (hr) Value: 6
  misc_feature: MA Experiment 108561 PARAMETER Experiment Name: At_100uM_ABA_cDNA_P Parameter: Tissue Value: Aerial
  misc_feature: MA Experiment 108561 PARAMETER Experiment Name: At_100uM_ABA_cDNA_P Parameter: Treatment Value: 100uM ABA vs. No Treatment
  misc_feature: MA Experiment ID: 108579 Result: Up-regulated in Transcription
  misc_feature: MA Experiment 108579 PARAMETER Experiment Name: At_4deg_Cold_cDNA_P Parameter: Temperature (deg C) Value: 4 vs. 22
  misc_feature: MA Experiment 108579 PARAMETER Experiment Name: At_4deg_Cold_cDNA_P Parameter: Timepoint (hr) Value: 6
  misc_feature: MA Experiment 108579 PARAMETER Experiment Name: At_4deg_Cold_cDNA_P Parameter: Tissue Value: Aerial
  misc_feature: MA Experiment ID: 108585 Result: Down-regulated in Transcription
  misc_feature: MA Experiment 108585 PARAMETER Experiment Name: At_5mM_NaNP_cDNA_P Parameter: Timepoint (hr) Value: 6
  misc_feature: MA Experiment 108585 PARAMETER Experiment Name: At_5mM_NaNP_cDNA_P Parameter: Tissue Value: Aerial
  misc_feature: MA Experiment 108585 PARAMETER Experiment Name: At_5mM_NaNP_cDNA_P Parameter: Treatment Value: null
  misc_feature: MA Experiment ID: 108595 Result: Down-regulated in Transcription
  misc_feature: MA Experiment 108595 PARAMETER Experiment Name: At_Ler-pi_Ovule_cDNA_P Parameter: Plant Line Value: null
  misc_feature: MA Experiment ID: 108605 Result: Down-regulated in Transcription
  misc_feature: MA Experiment 108605 PARAMETER Experiment Name: At_100uM_ABA_cDNA_P Parameter: Timepoint (hr) Value: 6
  misc_feature: MA Experiment 108605 PARAMETER Experiment Name: At_100uM_ABA_cDNA_P Parameter: Tissue Value: Aerial
  misc_feature: MA Experiment 108605 PARAMETER Experiment Name: At_100uM_ABA_cDNA_P Parameter: Treatment Value: 100uM ABA vs. No Treatment
  misc_feature: MA Experiment ID: 108607 Result: Down-regulated in Transcription
  misc_feature: MA Experiment 108607 PARAMETER Experiment Name: At_100uM_ABA_cDNA_P Parameter: Timepoint (hr) Value: 4
  misc_feature: MA Experiment 108607 PARAMETER Experiment Name: At_100uM_ABA_cDNA_P Parameter: Tissue Value: Aerial
  misc_feature: MA Experiment 108607 PARAMETER Experiment Name: At_100uM_ABA_cDNA_P Parameter: Treatment Value: 100uM ABA vs. No Treatment
  misc_feature: MA Experiment ID: 108668 Result: Down-regulated in Transcription
  misc_feature: MA Experiment 108668 PARAMETER Experiment Name: At_2mM_SA_cDNA_P Parameter: Plant Line Value: WS
  misc_feature: MA Experiment 108668 PARAMETER Experiment Name: At_2mM_SA_cDNA_P Parameter: Timepoint (hr) Value: 6
  misc_feature: MA Experiment 108668 PARAMETER Experiment Name: At_2mM_SA_cDNA_P Parameter: Treatment Value: 2mM SA vs. No Treatment
  misc_feature: MA Experiment ID: 20000069 Result: Down-regulated in Transcription
  misc_feature: MA Experiment 20000069 PARAMETER Experiment Name: At_100uM_ABA_Mutants_cDNA_P Parameter: Plant Line Value: CS23
  misc_feature: MA Experiment 20000069 PARAMETER Experiment Name: At_100uM_ABA_Mutants_cDNA_P Parameter: Timepoint (hr) Value: 6
  misc_feature: MA Experiment 20000069 PARAMETER Experiment Name: At_100uM_ABA_Mutants_cDNA_P Parameter: Tissue Value: Aerial
  misc_feature: MA Experiment 20000069 PARAMETER Experiment Name: At_100uM_ABA_Mutants_cDNA_P Parameter: Treatment Value: 100uM ABA vs. No Treatment
  misc_feature: MA Experiment ID: 20000070 Result: Down-regulated in Transcription
  misc_feature: MA Experiment 20000070 PARAMETER Experiment Name: At_100uM_ABA_Mutants_cDNA_P Parameter: Plant Line Value: CS24
  misc_feature: MA Experiment 20000070 PARAMETER Experiment Name: At_100uM_ABA_Mutants_cDNA_P Parameter: Timepoint (hr) Value: 6
  misc_feature: MA Experiment 20000070 PARAMETER Experiment Name: At_100uM_ABA_Mutants_cDNA_P Parameter: Tissue Value: Aerial
  misc_feature: MA Experiment 20000070 PARAMETER Experiment Name: At_100uM_ABA_Mutants_cDNA_P Parameter: Treatment Value: 100uM ABA vs. No Treatment
  misc_feature: MA Experiment ID: 20000071 Result: Down-regulated in Transcription
  misc_feature: MA Experiment 20000071 PARAMETER Experiment Name: At_100uM_ABA_Mutants_cDNA_P Parameter: Plant Line Value: CS8104
  misc_feature: MA Experiment 20000071 PARAMETER Experiment Name: At_100uM_ABA_Mutants_cDNA_P Parameter: Timepoint (hr) Value: 6
  misc_feature: MA Experiment 20000071 PARAMETER Experiment Name: At_100uM_ABA_Mutants_cDNA_P Parameter: Tissue Value: Aerial
  misc_feature: MA Experiment 20000071 PARAMETER Experiment Name: At_100uM_ABA_Mutants_cDNA_P Parameter: Treatment Value: 100uM ABA vs. No Treatment
  misc_feature: MA Experiment ID: 20000072 Result: Down-regulated in Transcription
  misc_feature: MA Experiment 20000072 PARAMETER Experiment Name: At_100uM_ABA_Mutants_cDNA_P Parameter: Plant Line Value: CS8105
  misc_feature: MA Experiment 20000072 PARAMETER Experiment Name: At_100uM_ABA_Mutants_cDNA_P Parameter: Timepoint (hr) Value: 6
  misc_feature: MA Experiment 20000072 PARAMETER Experiment Name: At_100uM_ABA_Mutants_cDNA_P Parameter: Tissue Value: Aerial
  misc_feature: MA Experiment 20000072 PARAMETER Experiment Name: At_100uM_ABA_Mutants_cDNA_P Parameter: Treatment Value: 100uM ABA vs. No Treatment
  misc_feature: MA Experiment ID: 20000087 Result: Down-regulated in Transcription
  misc_feature: MA Experiment 20000087 PARAMETER Experiment Name: At_100uM_ABA_Mutants_cDNA_P Parameter: Plant Line Value: WS
  misc_feature: MA Experiment 20000087 PARAMETER Experiment Name: At_100uM_ABA_Mutants_cDNA_P Parameter: Timepoint (hr) Value: 6
  misc_feature: MA Experiment 20000087 PARAMETER Experiment Name: At_100uM_ABA_Mutants_cDNA_P Parameter: Tissue Value: Aerial
  misc_feature: MA Experiment 20000087 PARAMETER Experiment Name: At_100uM_ABA_Mutants_cDNA_P Parameter: Treatment Value: 100uM ABA vs. No Treatment
  misc_feature: MA Experiment ID: 20000113 Result: Up-regulated in Transcription
  misc_feature: MA Experiment 20000113 PARAMETER Experiment Name: At_42deg_Heat_cDNA_P Parameter: Temperature (deg C) Value: 42 vs. 22
  misc_feature: MA Experiment 20000113 PARAMETER Experiment Name: At_42deg_Heat_cDNA_P Parameter: Timepoint (hr) Value: 8
  misc_feature: MA Experiment 20000113 PARAMETER Experiment Name: At_42deg_Heat_cDNA_P Parameter: Tissue Value: Aerial
  misc_feature: MA Experiment ID: 20000117 Result: Down-regulated in Transcription
  misc_feature: MA Experiment 20000117 PARAMETER Experiment Name: At_100uM_ABA_Mutants_cDNA_P Parameter: Plant Line Value: Columbia
  misc_feature: MA Experiment 20000117 PARAMETER Experiment Name: At_100uM_ABA_Mutants_cDNA_P Parameter: Timepoint (hr) Value: 6
  misc_feature: MA Experiment 20000117 PARAMETER Experiment Name: At_100uM_ABA_Mutants_cDNA_P Parameter: Tissue Value: Aerial
  misc_feature: MA Experiment 20000117 PARAMETER Experiment Name: At_100uM_ABA_Mutants_cDNA_P Parameter: Treatment Value: 100uM ABA vs. No Treatment
  misc_feature: MA Experiment ID: 20000179 Result: Down-regulated in Transcription
  misc_feature: MA Experiment 20000179 PARAMETER Experiment Name: At_Germinating_Seeds_P Parameter: Age (hr) Value: 6 vs. 0
  misc_feature: MA Experiment 20000179 PARAMETER Experiment Name: At_Germinating_Seeds_P Parameter: Tissue Value: Germinating Seeds
  misc_feature: MA Experiment ID: 20000182 Result: Down-regulated in Transcription
  misc_feature: MA Experiment 20000182 PARAMETER Experiment Name: At_2mM_SA_P Parameter: Age (day) Value: 14
  misc_feature: MA Experiment 20000182 PARAMETER Experiment Name: At_2mM_SA_P Parameter: Organism Value: A. thaliana
  misc_feature: MA Experiment 20000182 PARAMETER Experiment Name: At_2mM_SA_P Parameter: Plant Line Value: WS
  misc_feature: MA Experiment 20000182 PARAMETER Experiment Name: At_2mM_SA_P Parameter: Timepoint (hr) Value: 6
  misc_feature: MA Experiment 20000182 PARAMETER Experiment Name: At_2mM_SA_P Parameter: Tissue Value: Aerial
  misc_feature: MA Experiment 20000182 PARAMETER Experiment Name: At_2mM_SA_P Parameter: Treatment Value: 2mM SA vs. No Treatment
  misc_feature: MA Experiment ID: 20000184 Result: Up-regulated in Transcription
  misc_feature: MA Experiment 20000184 PARAMETER Experiment Name: At_Shoots__P Parameter: Age (day) Value: 7
  misc_feature: MA Experiment 20000184 PARAMETER Experiment Name: At_Shoots__P Parameter: Tissue Value: Shoots vs. Whole Plant
  misc_feature: MA Experiment ID: 20000185 Result: Down-regulated in Transcription
  misc_feature: MA Experiment 20000185 PARAMETER Experiment Name: At_Roots__P Parameter: Age (day) Value: 7 vs. 21
  misc_feature: MA Experiment 20000185 PARAMETER Experiment Name: At_Roots__P Parameter: Organism Value: A. thaliana
  misc_feature: MA Experiment 20000185 PARAMETER Experiment Name: At_Roots__P Parameter: Tissue Value: Roots vs. Whole Plant
  misc_feature: MA Experiment ID: 20000234 Result: Up-regulated in Transcription
  misc_feature: MA Experiment 20000234 PARAMETER Experiment Name: At_Siliques_P Parameter: Age (day) Value: 21
  misc_feature: MA Experiment 20000234 PARAMETER Experiment Name: At_Siliques_P Parameter: Organism Value: A. thaliana
  misc_feature: MA Experiment 20000234 PARAMETER Experiment Name: At_Siliques_P Parameter: Plant Line Value: WS
  misc_feature: MA Experiment 20000234 PARAMETER Experiment Name: At_Siliques_P Parameter: Tissue Value: Less Than 5mm Siliques vs. Whole Plant
  misc_feature: MA Experiment ID: 20000264 Result: Up-regulated in Transcription
  misc_feature: MA Experiment 20000264 PARAMETER Experiment Name: At_Open_Flower_P Parameter: Age (day) Value: 21
  misc_feature: MA Experiment 20000264 PARAMETER Experiment Name: At_Open_Flower_P Parameter: Plant Line Value: WS
  misc_feature: MA Experiment 20000264 PARAMETER Experiment Name: At_Open_Flower_P Parameter: Tissue Value: Open Flower vs. Whole Plant
  misc_feature: MA Experiment ID: 20000436 Result: Down-regulated in Transcription
  misc_feature: MA Experiment 20000436 PARAMETER Experiment Name: At_Drought_P Parameter: Age (day) Value: 7
  misc_feature: MA Experiment 20000436 PARAMETER Experiment Name: At_Drought_P Parameter: Organism Value: A. thaliana
  misc_feature: MA Experiment 20000436 PARAMETER Experiment Name: At_Drought_P Parameter: Plant Line Value: WS
  misc_feature: MA Experiment 20000436 PARAMETER Experiment Name: At_Drought_P Parameter: Timepoint (hr) Value: 12
  misc_feature: MA Experiment 20000436 PARAMETER Experiment Name: At_Drought_P Parameter: Tissue Value: Whole Plant
  misc_feature: MA Experiment 20000436 PARAMETER Experiment Name: At_Drought_P Parameter: Treatment Value: Drought vs. No Drought
  misc_feature: MA Experiment ID: 20000437 Result: Down-regulated in Transcription
  misc_feature: MA Experiment 20000437 PARAMETER Experiment Name: At_Drought_P Parameter: Age (day) Value: 8
  misc_feature: MA Experiment 20000437 PARAMETER Experiment Name: At_Drought_P Parameter: Organism Value: A. thaliana
  misc_feature: MA Experiment 20000437 PARAMETER Experiment Name: At_Drought_P Parameter: Plant Line Value: WS
  misc_feature: MA Experiment 20000437 PARAMETER Experiment Name: At_Drought_P Parameter: Timepoint (hr) Value: 24
  misc_feature: MA Experiment 20000437 PARAMETER Experiment Name: At_Drought_P Parameter: Tissue Value: Whole Plant
  misc_feature: MA Experiment 20000437 PARAMETER Experiment Name: At_Drought_P Parameter: Treatment Value: Drought vs. No Drought
  misc_feature: MA Experiment ID: 20000439 Result: Down-regulated in Transcription
  misc_feature: MA Experiment 20000439 PARAMETER Experiment Name: At_Roots__P Parameter: Age (day) Value: 14 vs. 21
  misc_feature: MA Experiment 20000439 PARAMETER Experiment Name: At_Roots__P Parameter: Organism Value: A. thaliana
  misc_feature: MA Experiment 20000439 PARAMETER Experiment Name: At_Roots__P Parameter: Tissue Value: Roots vs. Whole Plant
  misc_feature: MA Experiment ID: 20000445 Result: Down-regulated in Transcription
  misc_feature: MA Experiment 20000445 PARAMETER Experiment Name: At_100uM_NAA__P Parameter: Age (day) Value: 14
  misc_feature: MA Experiment 20000445 PARAMETER Experiment Name: At_100uM_NAA__P Parameter: Organism Value: A. thaliana
  misc_feature: MA Experiment 20000445 PARAMETER Experiment Name: At_100uM_NAA__P Parameter: Plant Line Value: WS
  misc_feature: MA Experiment 20000445 PARAMETER Experiment Name: At_100uM_NAA__P Parameter: Timepoint (hr) Value: 6
  misc_feature: MA Experiment 20000445 PARAMETER Experiment Name: At_100uM_NAA__P Parameter: Tissue Value: Aerial
  misc_feature: MA Experiment 20000445 PARAMETER Experiment Name: At_100uM_NAA__P Parameter: Treatment Value: 100uM NAA vs. No Treatment
  misc_feature: MA Experiment ID: 20000453 Result: Down-regulated in Transcription
  misc_feature: MA Experiment 20000453 PARAMETER Experiment Name: At_100uM_ABA_P Parameter: Age (day) Value: 15
  misc_feature: MA Experiment 20000453 PARAMETER Experiment Name: At_100uM_ABA_P Parameter: Organism Value: A. thaliana
  misc_feature: MA Experiment 20000453 PARAMETER Experiment Name: At_100uM_ABA_P Parameter: Plant Line Value: WS
  misc_feature: MA Experiment 20000453 PARAMETER Experiment Name: At_100uM_ABA_P Parameter: Timepoint (hr) Value: 24
  misc_feature: MA Experiment 20000453 PARAMETER Experiment Name: At_100uM_ABA_P Parameter: Tissue Value: Aerial
  misc_feature: MA Experiment 20000453 PARAMETER Experiment Name: At_100uM_ABA_P Parameter: Treatment Value: 100uM ABA vs. No Treatment
  misc_feature: MA Experiment ID: 20000794 Result: Down-regulated in Transcription
  misc_feature: MA Experiment 20000794 PARAMETER Experiment Name: At_Petals_P Parameter: Age (day) Value: 23-25 days
  misc_feature: MA Experiment 20000794 PARAMETER Experiment Name: At_Petals_P Parameter: Plant Line Value: WS
  misc_feature: MA Experiment 20000794 PARAMETER Experiment Name: At_Petals_P Parameter: Tissue Value: Petals vs. Whole plant
  misc_feature: MA Experiment ID: 20001248 Result: Down-regulated in Transcription
  misc_feature: MA Experiment 20001248 PARAMETER Experiment Name: At_Far-red-induction_P Parameter: Age (day) Value: 7
  misc_feature: MA Experiment 20001248 PARAMETER Experiment Name: At_Far-red-induction_P Parameter: Light Value: Far-red vs. White
  misc_feature: MA Experiment 20001248 PARAMETER Experiment Name: At_Far-red-induction_P Parameter: Organism Value: A. thaliana
  misc_feature: MA Experiment 20001248 PARAMETER Experiment Name: At_Far-red-induction_P Parameter: Plant Line Value: Columbia
  misc_feature: MA Experiment 20001248 PARAMETER Experiment Name: At_Far-red-induction_P Parameter: Timepoint (hr) Value: 4
  misc_feature: MA Experiment 20001248 PARAMETER Experiment Name: At_Far-red-induction_P Parameter: Tissue Value: Whole Plant
  misc_feature: MA Experiment ID: 20001450 Result: Down-regulated in Transcription
  misc_feature: MA Experiment 20001450 PARAMETER Experiment Name: At_Far-red-induction_P Parameter: Age (day) Value: 7
  misc_feature: MA Experiment 20001450 PARAMETER Experiment Name: At_Far-red-induction_P Parameter: Light Value: Far-red vs. White
  misc_feature: MA Experiment 20001450 PARAMETER Experiment Name: At_Far-red-induction_P Parameter: Organism Value: A. thaliana
  misc_feature: MA Experiment 20001450 PARAMETER Experiment Name: At_Far-red-induction_P Parameter: Plant Line Value: Columbia
  misc_feature: MA Experiment 20001450 PARAMETER Experiment Name: At_Far-red-induction_P Parameter: Timepoint (hr) Value: 8
  misc_feature: MA Experiment 20001450 PARAMETER Experiment Name: At_Far-red-induction_P Parameter: Tissue Value: Whole Plant
  misc_feature: MA Experiment ID: 20001556 Result: Up-regulated in Transcription
  misc_feature: MA Experiment 20001556 PARAMETER Experiment Name: At_Drought_Soil_Dry_P Parameter: Age (day) Value: 26
  misc_feature: MA Experiment 20001556 PARAMETER Experiment Name: At_Drought_Soil_Dry_P Parameter: Organism Value: A. thaliana
  misc_feature: MA Experiment 20001556 PARAMETER Experiment Name: At_Drought_Soil_Dry_P Parameter: Plant Line Value: WS
  misc_feature: MA Experiment 20001556 PARAMETER Experiment Name: At_Drought_Soil_Dry_P Parameter: Post Timepoint (hr) Value: None
  misc_feature: MA Experiment 20001556 PARAMETER Experiment Name: At_Drought_Soil_Dry_P Parameter: Post-Treatment Value: None
  misc_feature: MA Experiment 20001556 PARAMETER Experiment Name: At_Drought_Soil_Dry_P Parameter: Timepoint (day) Value: 12
  misc_feature: MA Experiment 20001556 PARAMETER Experiment Name: At_Drought_Soil_Dry_P Parameter: Treatment Value: Drought vs. No Drought
  misc_feature: MA Experiment ID: 20001558 Result: Up-regulated in Transcription
  misc_feature: MA Experiment 20001558 PARAMETER Experiment Name: At_Drought_Soil_Dry_P Parameter: Age (day) Value: 27
  misc_feature: MA Experiment 20001558 PARAMETER Experiment Name: At_Drought_Soil_Dry_P Parameter: Organism Value: A. thaliana
  misc_feature: MA Experiment 20001558 PARAMETER Experiment Name: At_Drought_Soil_Dry_P Parameter: Plant Line Value: WS
  misc_feature: MA Experiment 20001558 PARAMETER Experiment Name: At_Drought_Soil_Dry_P Parameter: Post Timepoint (hr) Value: 6
  misc_feature: MA Experiment 20001558 PARAMETER Experiment Name: At_Drought_Soil_Dry_P Parameter: Post-Treatment Value: Re-Water vs. No Drought
  misc_feature: MA Experiment 20001558 PARAMETER Experiment Name: At_Drought_Soil_Dry_P Parameter: Timepoint (day) Value: 13
  misc_feature: MA Experiment 20001558 PARAMETER Experiment Name: At_Drought_Soil_Dry_P Parameter: Treatment Value: Drought vs. No Drought
  misc_feature: MA Experiment ID: 20001757 Result: Up-regulated in Transcription
  misc_feature: MA Experiment 20001757 PARAMETER Experiment Name: At_50mM_NH4NO3_L-to-H_P Parameter: Timepoint (hr) Value: 6
  misc_feature: MA Experiment 20001757 PARAMETER Experiment Name: At_50mM_NH4NO3_L-to-H_P Parameter: Tissue Value: Leaf
  misc_feature: MA Experiment 20001757 PARAMETER Experiment Name: At_50mM_NH4NO3_L-to-H_P Parameter: Treatment Value: 50mM NH4NO3 vs 100mM Mannitol
aaacacaaaacctctcgtcttctcaaatccactctcatacacagtcacaacaatggctctttcttctggaatcttctctactacttttctctgcgtcgatacggcgccgttgcgcagctcaatgttgtctccatcttcgctccgtttgtcccctaatcatccgactaacctgcgcatggttcgagctgtaacttccgcggcggcggcttcctccgacccgacaaccacgaccaagactcgggagccacgtggcatcatgaagcctcgtccagtgtcccaggcgatgcaggatgtcgttggcgttcctgaaatccctcgtactcaagctctcaaacgcatttgggcttacatcaaggaacatgaccttcaagacccacaaaacaagagggatatactctgcgacgagaagctgaagaagatatttgaaggcaaagaacgtgttgggttcttggagattgcaaaactcattggtcctcactttctctgaatgaattttggctgagagaagacaatcattggcctatgttttcctgagctactaaaggccatgaaagatcagattacatattagtaaatttagggtttaagaagtttttatgcaaccaagtagtttataagcctttggaggatatcttatgtcggttatgtgctcatttgctttcccaatgcagttaaaatattcctctctttttttttttttttttgtcttaggacttgaaatctctctaatgcatgaagtaatgcttttat

SEQ ID NO: 30485 - protein, 161 aa, Arabidopsis thaliana
  peptide (1)..(161): Ceres Seq. ID no. 13497623
  misc_feature (85)..(161): Pfam Name: SWIB/MDM2 domain Pfam Description: SWIB/MDM2 domain
  misc_feature (85)..(161): Pfam Name: SWIB/MDM2 domain Pfam Description: SWIB/MDM2 domain
  misc_feature (39)..(161): Homolog of NCBI NO: 18396594 NR Description: expressed protein [Arabidopsis thaliana]
  misc_feature (35)..(161): Homolog of NCBI NO: 21593643 NR Description: unknown [Arabidopsis thaliana]
  misc_feature (45)..(160): Homolog of NCBI NO: 33667910 NR Description: SWIb domain-containing protein [Solanum chacoense]
  misc_feature (39)..(161): Homolog of NCBI NO: 14488372 NR Description: hypothetical protein [Oryza sativa (japonica
  misc_feature (18)..(161): Homolog of NCBI NO: 21593713 NR Description: unknown [Arabidopsis thaliana]
  misc_feature (39)..(161): Homolog of NCBI NO: 18396594 NR Description: expressed protein [Arabidopsis thaliana]
  misc_feature (45)..(160): Homolog of NCBI NO: 33667910 NR Description: SWIb domain-containing protein [Solanum chacoense]
  misc_feature (18)..(161): Homolog of NCBI NO: 21593713 NR Description: unknown [Arabidopsis thaliana]
  misc_feature (18)..(161): Homolog of NCBI NO: 15235320 NR Description: expressed protein [Arabidopsis thaliana]
  misc_feature (18)..(161): Homolog of NCBI NO: 14423526 NR Description: putative protein [Arabidopsis thaliana]
  misc_feature (18)..(161): Homolog of NCBI NO: 21553903 NR Description: unknown [Arabidopsis thaliana]
  misc_feature (18)..(161): Homolog of NCBI NO: 18397658 NR Description: expressed protein [Arabidopsis thaliana]
  misc_feature (18)..(161): Homolog of NCBI NO: 19698859 NR Description: unknown protein [Arabidopsis thaliana]
  misc_feature (39)..(161): Homolog of NCBI NO: 14488372 NR Description: hypothetical protein [Oryza sativa (japonica
  misc_feature (35)..(161): Homolog of NCBI NO: 21593643 NR Description: unknown [Arabidopsis thaliana]
  misc_feature (18)..(161): Homolog of NCBI NO: 19698859 NR Description: unknown protein [Arabidopsis thaliana]
  misc_feature (18)..(161): Homolog of NCBI NO: 18397658 NR Description: expressed protein [Arabidopsis thaliana]
  misc_feature (18)..(161): Homolog of NCBI NO: 21553903 NR Description: unknown [Arabidopsis thaliana]
  misc_feature (18)..(161): Homolog of NCBI NO: 14423526 NR Description: putative protein [Arabidopsis thaliana]
  misc_feature (18)..(161): Homolog of NCBI NO: 15235320 NR Description: expressed protein [Arabidopsis thaliana]
NTKPLVFSNPLSYTVTTMALSSGIFSTTFLCVDTAPLRSSMLSPSSLRLSPNHPTNLRMVRAVTSAAAASSDPTTTTKTREPRGIMKPRPVSQAMQDVVGVPEIPRTQALKRIWAYIKEHDLQDPQNKRDILCDEKLKKIFEGKERVGFLEIAKLIGPHFL

SEQ ID NO: 30486 - protein, 144 aa, Arabidopsis thaliana
  peptide (1)..(144): Ceres Seq. ID no. 13497624
  misc_feature (68)..(144): Pfam Name: SWIB/MDM2 domain Pfam Description: SWIB/MDM2 domain
  misc_feature (68)..(144): Pfam Name: SWIB/MDM2 domain Pfam Description: SWIB/MDM2 domain
  misc_feature (22)..(144): Homolog of NCBI NO: 18396594 NR Description: expressed protein [Arabidopsis thaliana]
  misc_feature (18)..(144): Homolog of NCBI NO: 21593643 NR Description: unknown [Arabidopsis thaliana]
  misc_feature (28)..(143): Homolog of NCBI NO: 33667910 NR Description: SWIb domain-containing protein [Solanum chacoense]
  misc_feature (22)..(144): Homolog of NCBI NO: 14488372 NR Description: hypothetical protein [Oryza sativa (japonica
  misc_feature (1)..(144): Homolog of NCBI NO: 21593713 NR Description: unknown [Arabidopsis thaliana]
  misc_feature (22)..(144): Homolog of NCBI NO: 18396594 NR Description: expressed protein [Arabidopsis thaliana]
  misc_feature (28)..(143): Homolog of NCBI NO: 33667910 NR Description: SWIb domain-containing protein [Solanum chacoense]
  misc_feature (1)..(144): Homolog of NCBI NO: 21593713 NR Description: unknown [Arabidopsis thaliana]
  misc_feature (1)..(144): Homolog of NCBI NO: 15235320 NR Description: expressed protein [Arabidopsis thaliana]
  misc_feature (1)..(144): Homolog of NCBI NO: 14423526 NR Description: putative protein [Arabidopsis thaliana]
  misc_feature (1)..(144): Homolog of NCBI NO: 21553903 NR Description: unknown [Arabidopsis thaliana]
  misc_feature (1)..(144): Homolog of NCBI NO: 18397658 NR Description: expressed protein [Arabidopsis thaliana]
  misc_feature (1)..(144): Homolog of NCBI NO: 19698859 NR Description: unknown protein [Arabidopsis thaliana]
  misc_feature (22)..(144): Homolog of NCBI NO: 14488372 NR Description: hypothetical protein [Oryza sativa (japonica
  misc_feature (18)..(144): Homolog of NCBI NO: 21593643 NR Description: unknown [Arabidopsis thaliana]
  misc_feature (1)..(144): Homolog of NCBI NO: 19698859 NR Description: unknown protein [Arabidopsis thaliana]
  misc_feature (1)..(144): Homolog of NCBI NO: 18397658 NR Description: expressed protein [Arabidopsis thaliana]
  misc_feature (1)..(144): Homolog of NCBI NO: 21553903 NR Description: unknown [Arabidopsis thaliana]
  misc_feature (1)..(144): Homolog of NCBI NO: 14423526 NR Description: putative protein [Arabidopsis thaliana]
  misc_feature (1)..(144): Homolog of NCBI NO: 15235320 NR Description: expressed protein [Arabidopsis thaliana]
MALSSGIFSTTFLCVDTAPLRSSMLSPSSLRLSPNHPTNLRMVRAVTSAAAASSDPTTTTKTREPRGIMKPRPVSQAMQDVVGVPEIPRTQALKRIWAYIKEHDLQDPQNKRDILCDEKLKKIFEGKERVGFLEIAKLIGPHFL

SEQ ID NO: 30487 - protein, 121 aa, Arabidopsis thaliana
  peptide (1)..(121): Ceres Seq. ID no. 13497625
  misc_feature (45)..(121): Pfam Name: SWIB/MDM2 domain Pfam Description: SWIB/MDM2 domain
  misc_feature (45)..(121): Pfam Name: SWIB/MDM2 domain Pfam Description: SWIB/MDM2 domain
  misc_feature (1)..(121): Homolog of NCBI NO: 18396594 NR Description: expressed protein [Arabidopsis thaliana]
  misc_feature (1)..(121): Homolog of NCBI NO: 21593643 NR Description: unknown [Arabidopsis thaliana]
  misc_feature (5)..(120): Homolog of NCBI NO: 33667910 NR Description: SWIb domain-containing protein [Solanum chacoense]
  misc_feature (1)..(121): Homolog of NCBI NO: 14488372 NR Description: hypothetical protein [Oryza sativa (japonica
  misc_feature (1)..(121): Homolog of NCBI NO: 21593713 NR Description: unknown [Arabidopsis thaliana]
  misc_feature (1)..(121): Homolog of NCBI NO: 18396594 NR Description: expressed protein [Arabidopsis thaliana]
  misc_feature (5)..(120): Homolog of NCBI NO: 33667910 NR Description: SWIb domain-containing protein [Solanum chacoense]
  misc_feature (1)..(121): Homolog of NCBI NO: 21593713 NR Description: unknown [Arabidopsis thaliana]
  misc_feature (1)..(121): Homolog of NCBI NO: 15235320 NR Description: expressed protein [Arabidopsis thaliana]
  misc_feature (1)..(121): Homolog of NCBI NO: 14423526 NR Description: putative protein [Arabidopsis thaliana]
  misc_feature (1)..(121): Homolog of NCBI NO: 21553903 NR Description: unknown [Arabidopsis thaliana]
  misc_feature (1)..(121): Homolog of NCBI NO: 18397658 NR Description: expressed protein [Arabidopsis thaliana]
  misc_feature (1)..(121): Homolog of NCBI NO: 19698859 NR Description: unknown protein [Arabidopsis thaliana]
  misc_feature (1)..(121): Homolog of NCBI NO: 14488372 NR Description: hypothetical protein [Oryza sativa (japonica
  misc_feature (1)..(121): Homolog of NCBI NO: 21593643 NR Description: unknown [Arabidopsis thaliana]
  misc_feature (1)..(121): Homolog of NCBI NO: 19698859 NR Description: unknown protein [Arabidopsis thaliana]
  misc_feature (1)..(121): Homolog of NCBI NO: 18397658 NR Description: expressed protein [Arabidopsis thaliana]
  misc_feature (1)..(121): Homolog of NCBI NO: 21553903 NR Description: unknown [Arabidopsis thaliana]
  misc_feature (1)..(121): Homolog of NCBI NO: 14423526 NR Description: putative protein [Arabidopsis thaliana]
  misc_feature (1)..(121): Homolog of NCBI NO: 15235320 NR Description: expressed protein [Arabidopsis thaliana]
MLSPSSLRLSPNHPTNLRMVRAVTSAAAASSDPTTTTKTREPRGIMKPRPVSQAMQDVVGVPEIPRTQALKRIWAYIKEHDLQDPQNKRDILCDEKLKKIFEGKERVGFLEIAKLIGPHFL

SEQ ID NO: 30488 - DNA, 1386 bp, Arabidopsis thaliana
  misc_feature (1)..(1386): Ceres Seq. ID no. 12337305
  misc_feature: MA Experiment ID: 108434 Result: Up-regulated in Transcription
  misc_feature: MA Experiment 108434 PARAMETER Experiment Name: At_Root_Tips_cDNA_P Parameter: Tissue Value: Root Tips
  misc_feature: MA Experiment ID: 108462 Result: Up-regulated in Transcription
  misc_feature: MA Experiment 108462 PARAMETER Experiment Name: At_Germinating_Seeds_cDNA_P Parameter: Age (day) Value: 2 vs. 0
  misc_feature: MA Experiment 108462 PARAMETER Experiment Name: At_Germinating_Seeds_cDNA_P Parameter: Tissue Value: Germinating Seeds
  misc_feature: MA Experiment ID: 108464 Result: Up-regulated in Transcription
  misc_feature: MA Experiment 108464 PARAMETER Experiment Name: At_Germinating_Seeds_cDNA_P Parameter: Age (day) Value: 4 vs. 0
  misc_feature: MA Experiment 108464 PARAMETER Experiment Name: At_Germinating_Seeds_cDNA_P Parameter: Tissue Value: Germinating Seeds
  misc_feature: MA Experiment ID: 108473 Result: Down-regulated in Transcription
  misc_feature: MA Experiment 108473 PARAMETER Experiment Name: At_Drought_Flowers_cDNA_P Parameter: Timepoint (hr) Value: 7 d
  misc_feature: MA Experiment 108473 PARAMETER Experiment Name: At_Drought_Flowers_cDNA_P Parameter: Tissue Value: Flower
  misc_feature: MA Experiment 108473 PARAMETER Experiment Name: At_Drought_Flowers_cDNA_P Parameter: Treatment Value: Drought vs. No Drought
  misc_feature: MA Experiment ID: 108561 Result: Down-regulated in Transcription
  misc_feature: MA Experiment 108561 PARAMETER Experiment Name: At_100uM_ABA_cDNA_P Parameter: Timepoint (hr) Value: 6
  misc_feature: MA Experiment 108561 PARAMETER Experiment Name: At_100uM_ABA_cDNA_P Parameter: Tissue Value: Aerial
  misc_feature: MA Experiment 108561 PARAMETER Experiment Name: At_100uM_ABA_cDNA_P Parameter: Treatment Value: 100uM ABA vs. No Treatment
  misc_feature: MA Experiment ID: 20000171 Result: Down-regulated in Transcription
  misc_feature: MA Experiment 20000171 PARAMETER Experiment Name: At_42deg_Heat_P Parameter: Age (day) Value: 14
  misc_feature: MA Experiment 20000171 PARAMETER Experiment Name: At_42deg_Heat_P Parameter: Organism Value: A. thaliana
  misc_feature: MA Experiment 20000171 PARAMETER Experiment Name: At_42deg_Heat_P Parameter: Plant Line Value: WS
  misc_feature: MA Experiment 20000171 PARAMETER Experiment Name: At_42deg_Heat_P Parameter: Temperature (deg C) Value: 42 vs. 22
  misc_feature: MA Experiment 20000171 PARAMETER Experiment Name: At_42deg_Heat_P Parameter: Timepoint (hr) Value: 1
  misc_feature: MA Experiment 20000171 PARAMETER Experiment Name: At_42deg_Heat_P Parameter: Tissue Value: Aerial
  misc_feature: MA Experiment ID: 20000173 Result: Down-regulated in Transcription
  misc_feature: MA Experiment 20000173 PARAMETER Experiment Name: At_42deg_Heat_P Parameter: Age (day) Value: 14
  misc_feature: MA Experiment 20000173 PARAMETER Experiment Name: At_42deg_Heat_P Parameter: Organism Value: A. thaliana
  misc_feature: MA Experiment 20000173 PARAMETER Experiment Name: At_42deg_Heat_P Parameter: Plant Line Value: WS
  misc_feature: MA Experiment 20000173 PARAMETER Experiment Name: At_42deg_Heat_P Parameter: Temperature (deg C) Value: 42 vs. 22
  misc_feature: MA Experiment 20000173 PARAMETER Experiment Name: At_42deg_Heat_P Parameter: Timepoint (hr) Value: 6
  misc_feature: MA Experiment 20000173 PARAMETER Experiment Name: At_42deg_Heat_P Parameter: Tissue Value: Aerial
  misc_feature: MA Experiment ID: 20000179 Result: Up-regulated in Transcription
  misc_feature: MA Experiment 20000179 PARAMETER Experiment Name: At_Germinating_Seeds_P Parameter: Age (hr) Value: 6 vs. 0
  misc_feature: MA Experiment 20000179 PARAMETER Experiment Name: At_Germinating_Seeds_P Parameter: Tissue Value: Germinating Seeds
  misc_feature: MA Experiment ID: 20000180 Result: Up-regulated in Transcription
  misc_feature: MA Experiment 20000180 PARAMETER Experiment Name: At_Germinating_Seeds_P Parameter: Age (hr) Value: 24 vs. 0
  misc_feature: MA Experiment 20000180 PARAMETER Experiment Name: At_Germinating_Seeds_P Parameter: Tissue Value: Germinating Seeds
  misc_feature: MA Experiment ID: 20000182 Result: Down-regulated in Transcription
  misc_feature: MA Experiment 20000182 PARAMETER Experiment Name: At_2mM_SA_P Parameter: Age (day) Value: 14
  misc_feature: MA Experiment 20000182 PARAMETER Experiment Name: At_2mM_SA_P Parameter: Organism Value: A. thaliana
  misc_feature: MA Experiment 20000182 PARAMETER Experiment Name: At_2mM_SA_P Parameter: Plant Line Value: WS
  misc_feature: MA Experiment 20000182 PARAMETER Experiment Name: At_2mM_SA_P Parameter: Timepoint (hr) Value: 6
  misc_feature: MA Experiment 20000182 PARAMETER Experiment Name: At_2mM_SA_P Parameter: Tissue Value: Aerial
  misc_feature: MA Experiment 20000182 PARAMETER Experiment Name: At_2mM_SA_P Parameter: Treatment Value: 2mM SA vs. No Treatment
  misc_feature: MA Experiment ID: 20000184 Result: Up-regulated in Transcription
  misc_feature: MA Experiment 20000184 PARAMETER Experiment Name: At_Shoots__P Parameter: Age (day) Value: 7
  misc_feature: MA Experiment 20000184 PARAMETER Experiment Name: At_Shoots__P Parameter: Tissue Value: Shoots vs. Whole Plant
  misc_feature: MA Experiment ID: 20000185 Result: Down-regulated in Transcription
  misc_feature: MA Experiment 20000185 PARAMETER Experiment Name: At_Roots__P Parameter: Age (day) Value: 7 vs. 21
  misc_feature: MA Experiment 20000185 PARAMETER Experiment Name: At_Roots__P Parameter: Organism Value: A. thaliana
  misc_feature: MA Experiment 20000185 PARAMETER Experiment Name: At_Roots__P Parameter: Tissue Value: Roots vs. Whole Plant
  misc_feature: MA Experiment ID: 20000227 Result: Down-regulated in Transcription
  misc_feature: MA Experiment 20000227 PARAMETER Experiment Name: At_Root-Tips-vs-Tops_P Parameter: Tissue Value: Root Tips vs. Root Tops
  misc_feature: MA Experiment ID: 20000234 Result: Up-regulated in Transcription
  misc_feature: MA Experiment 20000234 PARAMETER Experiment Name: At_Siliques_P Parameter: Age (day) Value: 21
  misc_feature: MA Experiment 20000234 PARAMETER Experiment Name: At_Siliques_P Parameter: Organism Value: A. thaliana
  misc_feature: MA Experiment 20000234 PARAMETER Experiment Name: At_Siliques_P Parameter: Plant Line Value: WS
  misc_feature: MA Experiment 20000234 PARAMETER Experiment Name: At_Siliques_P Parameter: Tissue Value: Less Than 5mm Siliques vs. Whole Plant
  misc_feature: MA Experiment ID: 20000235 Result: Up-regulated in Transcription
  misc_feature: MA Experiment 20000235 PARAMETER Experiment Name: At_Siliques_P Parameter: Age (day) Value: 21
  misc_feature: MA Experiment 20000235 PARAMETER Experiment Name: At_Siliques_P Parameter: Organism Value: A. thaliana
  misc_feature: MA Experiment 20000235 PARAMETER Experiment Name: At_Siliques_P Parameter: Plant Line Value: WS
  misc_feature: MA Experiment 20000235 PARAMETER Experiment Name: At_Siliques_P Parameter: Tissue Value: 5-10mm Siliques vs. Whole Plant
  misc_feature: MA Experiment ID: 20000265 Result: Up-regulated in Transcription
  misc_feature: MA Experiment 20000265 PARAMETER Experiment Name: At_Open_Flower_P Parameter: Age (day) Value: 21
  misc_feature: MA Experiment 20000265 PARAMETER Experiment Name: At_Open_Flower_P Parameter: Plant Line Value: WS
  misc_feature: MA Experiment 20000265 PARAMETER Experiment Name: At_Open_Flower_P Parameter: Tissue Value: Closed Flower vs. Whole Plant
  misc_feature: MA Experiment ID: 20000286 Result: Up-regulated in Transcription
  misc_feature: MA Experiment 20000286 PARAMETER Experiment Name: At_Open_Flower_P Parameter: Age (day) Value: 21
  misc_feature: MA Experiment 20000286 PARAMETER Experiment Name: At_Open_Flower_P Parameter: Plant Line Value: WS
  misc_feature: MA Experiment 20000286 PARAMETER Experiment Name: At_Open_Flower_P Parameter: Tissue Value: Half Open vs. Whole Plant
  misc_feature: MA Experiment ID: 20000436 Result: Down-regulated in Transcription
  misc_feature: MA Experiment 20000436 PARAMETER Experiment Name: At_Drought_P Parameter: Age (day) Value: 7
  misc_feature: MA Experiment 20000436 PARAMETER Experiment Name: At_Drought_P Parameter: Organism Value: A. thaliana
  misc_feature: MA Experiment 20000436 PARAMETER Experiment Name: At_Drought_P Parameter: Plant Line Value: WS
  misc_feature: MA Experiment 20000436 PARAMETER Experiment Name: At_Drought_P Parameter: Timepoint (hr) Value: 12
  misc_feature: MA Experiment 20000436 PARAMETER Experiment Name: At_Drought_P Parameter: Tissue Value: Whole Plant
  misc_feature: MA Experiment 20000436 PARAMETER Experiment Name: At_Drought_P Parameter: Treatment Value: Drought vs. No Drought
  misc_feature: MA Experiment ID: 20000437 Result: Down-regulated in Transcription
  misc_feature: MA Experiment 20000437 PARAMETER Experiment Name: At_Drought_P Parameter: Age (day) Value: 8
  misc_feature: MA Experiment 20000437 PARAMETER Experiment Name: At_Drought_P Parameter: Organism Value: A. thaliana
  misc_feature: MA Experiment 20000437 PARAMETER Experiment Name: At_Drought_P Parameter: Plant Line Value: WS
  misc_feature: MA Experiment 20000437 PARAMETER Experiment Name: At_Drought_P Parameter: Timepoint (hr) Value: 24
  misc_feature: MA Experiment 20000437 PARAMETER Experiment Name: At_Drought_P Parameter: Tissue Value: Whole Plant
  misc_feature: MA Experiment 20000437 PARAMETER Experiment Name: At_Drought_P Parameter: Treatment Value: Drought vs. No Drought
  misc_feature: MA Experiment ID: 20000438 Result: Up-regulated in Transcription
  misc_feature: MA Experiment 20000438 PARAMETER Experiment Name: At_Shoots__P Parameter: Age (day) Value: 14
  misc_feature: MA Experiment 20000438 PARAMETER Experiment Name: At_Shoots__P Parameter: Tissue Value: Shoots vs. Whole Plant
  misc_feature: MA Experiment ID: 20000439 Result: Down-regulated in Transcription
  misc_feature: MA Experiment 20000439 PARAMETER Experiment Name: At_Roots__P Parameter: Age (day) Value: 14 vs. 21
  misc_feature: MA Experiment 20000439 PARAMETER Experiment Name: At_Roots__P Parameter: Organism Value: A. thaliana
  misc_feature: MA Experiment 20000439 PARAMETER Experiment Name: At_Roots__P Parameter: Tissue Value: Roots vs. Whole Plant
  misc_feature: MA Experiment ID: 20000451 Result: Up-regulated in Transcription
  misc_feature: MA Experiment 20000451 PARAMETER Experiment Name: At_CS6879_Shoots-Roots_P Parameter: Age (day) Value: 14
  misc_feature: MA Experiment 20000451 PARAMETER Experiment Name: At_CS6879_Shoots-Roots_P Parameter: Organism Value: A. thaliana
  misc_feature: MA Experiment 20000451 PARAMETER Experiment Name: At_CS6879_Shoots-Roots_P Parameter: Plant Line Value: CS6879 vs. WS
  misc_feature: MA Experiment 20000451 PARAMETER Experiment Name: At_CS6879_Shoots-Roots_P Parameter: Tissue Value: Roots
  misc_feature: MA Experiment ID: 20000573 Result: Down-regulated in Transcription
  misc_feature: MA Experiment 20000573 PARAMETER Experiment Name: At_100uM_ABA_Mutants__P Parameter: Organism Value: A. thaliana
  misc_feature: MA Experiment 20000573 PARAMETER Experiment Name: At_100uM_ABA_Mutants__P Parameter: Plant Line Value: CS22 vs. Ler wt
  misc_feature: MA Experiment 20000573 PARAMETER Experiment Name: At_100uM_ABA_Mutants__P Parameter: Timepoint (hr) Value: N/A
  misc_feature: MA Experiment 20000573 PARAMETER Experiment Name: At_100uM_ABA_Mutants__P Parameter: Tissue Value: Whole Plant
  misc_feature: MA Experiment 20000573 PARAMETER Experiment Name: At_100uM_ABA_Mutants__P Parameter: Treatment Value: None
  misc_feature: MA Experiment ID: 20000574 Result: Down-regulated in Transcription
  misc_feature: MA Experiment 20000574 PARAMETER Experiment Name: At_100uM_ABA_Mutants__P Parameter: Organism Value: A. thaliana
  misc_feature: MA Experiment 20000574 PARAMETER Experiment Name: At_100uM_ABA_Mutants__P Parameter: Plant Line Value: CS23 vs. Ler wt
  misc_feature: MA Experiment 20000574 PARAMETER Experiment Name: At_100uM_ABA_Mutants__P Parameter: Timepoint (hr) Value: N/A
  misc_feature: MA Experiment 20000574 PARAMETER Experiment Name: At_100uM_ABA_Mutants__P Parameter: Tissue Value: Whole Plant
  misc_feature: MA Experiment 20000574 PARAMETER Experiment Name: At_100uM_ABA_Mutants__P Parameter: Treatment Value: None
  misc_feature: MA Experiment ID: 20000794 Result: Down-regulated in Transcription
  misc_feature: MA Experiment 20000794 PARAMETER Experiment Name: At_Petals_P Parameter: Age (day) Value: 23-25 days
  misc_feature: MA Experiment 20000794 PARAMETER Experiment Name: At_Petals_P Parameter: Plant Line Value: WS
  misc_feature: MA Experiment 20000794 PARAMETER Experiment Name: At_Petals_P Parameter: Tissue Value: Petals vs. Whole plant
  misc_feature: MA Experiment ID: 20001248 Result: Down-regulated in Transcription
  misc_feature: MA Experiment 20001248 PARAMETER Experiment Name: At_Far-red-induction_P Parameter: Age (day) Value: 7
  misc_feature: MA Experiment 20001248 PARAMETER Experiment Name: At_Far-red-induction_P Parameter: Light Value: Far-red vs. White
  misc_feature: MA Experiment 20001248 PARAMETER Experiment Name: At_Far-red-induction_P Parameter: Organism Value: A. thaliana
  misc_feature: MA Experiment 20001248 PARAMETER Experiment Name: At_Far-red-induction_P Parameter: Plant Line Value: Columbia
  misc_feature: MA Experiment 20001248 PARAMETER Experiment Name: At_Far-red-induction_P Parameter: Timepoint (hr) Value: 4
  misc_feature: MA Experiment 20001248 PARAMETER Experiment Name: At_Far-red-induction_P Parameter: Tissue Value: Whole Plant
  misc_feature: MA Experiment ID: 20001451 Result: Down-regulated in Transcription
  misc_feature: MA Experiment 20001451 PARAMETER Experiment Name: At_Far-red-induction_P Parameter: Age (day) Value: 7
  misc_feature: MA Experiment 20001451 PARAMETER Experiment Name: At_Far-red-induction_P Parameter: Light Value: Far-red vs. White
  misc_feature: MA Experiment 20001451 PARAMETER Experiment Name: At_Far-red-induction_P Parameter: Organism Value: A. thaliana
  misc_feature: MA Experiment 20001451 PARAMETER Experiment Name: At_Far-red-induction_P Parameter: Plant Line Value: Columbia
  misc_feature: MA Experiment 20001451 PARAMETER Experiment Name: At_Far-red-induction_P Parameter: Timepoint (hr) Value: 24
  misc_feature: MA Experiment 20001451 PARAMETER Experiment Name: At_Far-red-induction_P Parameter: Tissue Value: Whole Plant
  misc_feature: MA Experiment ID: 20001459 Result: Up-regulated in Transcription
  misc_feature: MA Experiment 20001459 PARAMETER Experiment Name: At_50mM_NH4NO3_L-to-H_P Parameter: Age (day) Value: Undefined
  misc_feature: MA Experiment 20001459 PARAMETER Experiment Name: At_50mM_NH4NO3_L-to-H_P Parameter: Organism Value: Undefined
  misc_feature: MA Experiment 20001459 PARAMETER Experiment Name: At_50mM_NH4NO3_L-to-H_P Parameter: Plant Line Value: Undefined
  misc_feature: MA Experiment 20001459 PARAMETER Experiment Name: At_50mM_NH4NO3_L-to-H_P Parameter: Timepoint (hr) Value: 4
  misc_feature: MA Experiment 20001459 PARAMETER Experiment Name: At_50mM_NH4NO3_L-to-H_P Parameter: Tissue Value: Siliques
  misc_feature: MA Experiment 20001459 PARAMETER Experiment Name: At_50mM_NH4NO3_L-to-H_P Parameter: Treatment Value: 50mM NH4NO3 vs. 100mM Manitol
  misc_feature: MA Experiment ID: 20001554 Result: Down-regulated in Transcription
  misc_feature: MA Experiment 20001554 PARAMETER Experiment Name: At_Drought_Soil_Dry_P Parameter: Age (day) Value: 21
  misc_feature: MA Experiment 20001554 PARAMETER Experiment Name: At_Drought_Soil_Dry_P Parameter: Organism Value: A. thaliana
  misc_feature: MA Experiment 20001554 PARAMETER Experiment Name: At_Drought_Soil_Dry_P Parameter: Plant Line Value: WS
  misc_feature: MA Experiment 20001554 PARAMETER Experiment Name: At_Drought_Soil_Dry_P Parameter: Post Timepoint (hr) Value: None
  misc_feature: MA Experiment 20001554 PARAMETER Experiment Name: At_Drought_Soil_Dry_P Parameter: Post-Treatment Value: None
  misc_feature: MA Experiment 20001554 PARAMETER Experiment Name: At_Drought_Soil_Dry_P Parameter: Timepoint (day) Value: 7
  misc_feature: MA Experiment 20001554 PARAMETER Experiment Name: At_Drought_Soil_Dry_P Parameter: Treatment Value: Drought vs. No Drought
  misc_feature: MA Experiment ID: 20001555 Result: Down-regulated in Transcription
  misc_feature: MA Experiment 20001555 PARAMETER Experiment Name: At_Drought_Soil_Dry_P Parameter: Age (day) Value: 24
  misc_feature: MA Experiment 20001555 PARAMETER Experiment Name: At_Drought_Soil_Dry_P Parameter: Organism Value: A. thaliana
  misc_feature: MA Experiment 20001555 PARAMETER Experiment Name: At_Drought_Soil_Dry_P Parameter: Plant Line Value: WS
  misc_feature: MA Experiment 20001555 PARAMETER Experiment Name: At_Drought_Soil_Dry_P Parameter: Post Timepoint (hr) Value: None
  misc_feature: MA Experiment 20001555 PARAMETER Experiment Name: At_Drought_Soil_Dry_P Parameter: Post-Treatment Value: None
  misc_feature: MA Experiment 20001555 PARAMETER Experiment Name: At_Drought_Soil_Dry_P Parameter: Timepoint (day) Value: 10
  misc_feature: MA Experiment 20001555 PARAMETER Experiment Name: At_Drought_Soil_Dry_P Parameter: Treatment Value: Drought vs. No Drought
  misc_feature: MA Experiment ID: 20001556 Result: Down-regulated in Transcription
  misc_feature: MA Experiment 20001556 PARAMETER Experiment Name: At_Drought_Soil_Dry_P Parameter: Age (day) Value: 26
  misc_feature: MA Experiment 20001556 PARAMETER Experiment Name: At_Drought_Soil_Dry_P Parameter: Organism Value: A. thaliana
  misc_feature: MA Experiment 20001556 PARAMETER Experiment Name: At_Drought_Soil_Dry_P Parameter: Plant Line Value: WS
  misc_feature: MA Experiment 20001556 PARAMETER Experiment Name: At_Drought_Soil_Dry_P Parameter: Post Timepoint (hr) Value: None
  misc_feature: MA Experiment 20001556 PARAMETER Experiment Name: At_Drought_Soil_Dry_P Parameter: Post-Treatment Value: None
  misc_feature: MA Experiment 20001556 PARAMETER Experiment Name: At_Drought_Soil_Dry_P Parameter: Timepoint (day) Value: 12
  misc_feature: MA Experiment 20001556 PARAMETER Experiment Name: At_Drought_Soil_Dry_P Parameter: Treatment Value: Drought vs. No Drought
  misc_feature: MA Experiment ID: 20001558 Result: Up-regulated in Transcription
  misc_feature: MA Experiment 20001558 PARAMETER Experiment Name: At_Drought_Soil_Dry_P Parameter: Age (day) Value: 27
  misc_feature: MA Experiment 20001558 PARAMETER Experiment Name: At_Drought_Soil_Dry_P Parameter: Organism Value: A. thaliana
  misc_feature: MA Experiment 20001558 PARAMETER Experiment Name: At_Drought_Soil_Dry_P Parameter: Plant Line Value: WS
  misc_feature: MA Experiment 20001558 PARAMETER Experiment Name: At_Drought_Soil_Dry_P Parameter: Post Timepoint (hr) Value: 6
  misc_feature: MA Experiment 20001558 PARAMETER Experiment Name: At_Drought_Soil_Dry_P Parameter: Post-Treatment Value: Re-Water vs. No Drought
  misc_feature: MA Experiment 20001558 PARAMETER Experiment Name: At_Drought_Soil_Dry_P Parameter: Timepoint (day) Value: 13
  misc_feature: MA Experiment 20001558 PARAMETER Experiment Name: At_Drought_Soil_Dry_P Parameter: Treatment Value: Drought vs. No Drought
  misc_feature: MA Experiment ID: 20001559 Result: Down-regulated in Transcription
  misc_feature: MA Experiment 20001559 PARAMETER Experiment Name: At_Drought_Soil_Dry_P Parameter: Age (day) Value: 28
  misc_feature: MA Experiment 20001559 PARAMETER Experiment Name: At_Drought_Soil_Dry_P Parameter: Organism Value: A. thaliana
  misc_feature: MA Experiment 20001559 PARAMETER Experiment Name: At_Drought_Soil_Dry_P Parameter: Plant Line Value: WS
  misc_feature: MA Experiment 20001559 PARAMETER Experiment Name: At_Drought_Soil_Dry_P Parameter: Post Timepoint (hr) Value: 29
  misc_feature: MA Experiment 20001559 PARAMETER Experiment Name: At_Drought_Soil_Dry_P Parameter: Post-Treatment Value: Re-Water vs. No Drought
  misc_feature: MA Experiment 20001559 PARAMETER Experiment Name: At_Drought_Soil_Dry_P Parameter: Timepoint (day) Value: 14
  misc_feature: MA Experiment 20001559 PARAMETER Experiment Name: At_Drought_Soil_Dry_P Parameter: Treatment Value: Drought vs. No Drought
  misc_feature: MA Experiment ID: 20001757 Result: Up-regulated in Transcription
  misc_feature: MA Experiment 20001757 PARAMETER Experiment Name: At_50mM_NH4NO3_L-to-H_P Parameter: Timepoint (hr) Value: 6
  misc_feature: MA Experiment 20001757 PARAMETER Experiment Name: At_50mM_NH4NO3_L-to-H_P Parameter: Tissue Value: Leaf
  misc_feature: MA Experiment 20001757 PARAMETER Experiment Name: At_50mM_NH4NO3_L-to-H_P Parameter: Treatment Value: 50mM NH4NO3 vs 100mM Mannitol
  misc_feature: MA Experiment ID: 20001906 Result: Down-regulated in Transcription
  misc_feature: MA Experiment 20001906 PARAMETER Experiment Name: At_Drought_Reproduction_P Parameter: Age (day) Value: 35
  misc_feature: MA Experiment 20001906 PARAMETER Experiment Name: At_Drought_Reproduction_P Parameter: Organism Value: A. thaliana
  misc_feature: MA Experiment 20001906 PARAMETER Experiment Name: At_Drought_Reproduction_P Parameter: Plant Line Value: WS
  misc_feature: MA Experiment 20001906 PARAMETER Experiment Name: At_Drought_Reproduction_P Parameter: Timepoint (day) Value: 5
  misc_feature: MA Experiment 20001906 PARAMETER Experiment Name: At_Drought_Reproduction_P Parameter: Tissue Value: Siliques
  misc_feature: MA Experiment 20001906 PARAMETER Experiment Name: At_Drought_Reproduction_P Parameter: Treatment Value: Drought vs. No Drought
  misc_feature: MA Experiment ID: 20001911 Result: Down-regulated in Transcription
  misc_feature: MA Experiment 20001911 PARAMETER Experiment Name: At_Drought_Reproduction_P Parameter: Age (day) Value: 40
  misc_feature: MA Experiment 20001911 PARAMETER Experiment Name: At_Drought_Reproduction_P Parameter: Organism Value: A. thaliana
  misc_feature: MA Experiment 20001911 PARAMETER Experiment Name: At_Drought_Reproduction_P Parameter: Plant Line Value: WS
  misc_feature: MA Experiment 20001911 PARAMETER Experiment Name: At_Drought_Reproduction_P Parameter: Timepoint (day) Value: 10
  misc_feature: MA Experiment 20001911 PARAMETER Experiment Name: At_Drought_Reproduction_P Parameter: Tissue Value: Flowers
  misc_feature: MA Experiment 20001911 PARAMETER Experiment Name: At_Drought_Reproduction_P Parameter: Treatment Value: Drought vs. No Drought
acctctctatacccttccctacacacatggagacactccaataaactcttcttctgcctcctctgcccatttctcccaatctctctctattttctcagtctctctctcagataatggcaatgttgggcttggttttatctgttcttactacaattcttgcattgtctgaagcaagaatcccaggagtttacaatggtggtggttgggaaactgctcacgccactttctacggtggctctgatgcttctggaacaatgggaggagcttgtggttatggtaacttatacagccaaggctatggtgtgaacacggcggctttaagcacggctctgttcaacaatggttttagctgtggtgcttgttttgagctcaaatgtgctagtgatccaaaatggtgccattctggtagtccttcaatcttcatcactgcgactaatttctgtcctccgaactttgctcagcctagtgacaatggtggttggtgtaaccctcctagacctcactttgatcttgctatgcctatgtttctcaagatcgctgagtatcgtgccggaatcgtccccgtctctttccgccgagtgccatgccggaagagaggaggaataaggttcacaatcaacggtttccgttattttaacttggttctagtcactaacgtcgctggcgccggaaacatagtgcggctaggtgtgaaaggaacacatacttcgtggatgaccatgagtcgtaactggggacaaaactggcaatctaactcagttttggttggtcagtcactttcttttagagtcacaagcagtgaccgtagaagctcgacgtcgtggaacattgctccggcgaattggaagtttggtcagactttcatgggaaagaacttcagagtctgagggcattatcggaaactcatctatcaatattagtattttcattattactattaaaatttccagccgaaggcattagtaatttgagaaattttaatatatatatttatgttttttaagagaccactaaaattccaaattttcttacctctcatgggtttgtgtttttttactgatgtgttcgttggagagtgtgaaacgtgggacagtggtgtctttttttagttcttcaatgttaaatgtgtaatctttaggggtgaaattagaagtttgtttaaagtagaaggagctgtgaagcagatgtgaagagtacttctggtttcagcgtattatagtaaaagaagcagtaatagttgtgtttgtaatgcttcttgtagaactccatattgtaatttatatataaatgtgtgtatgtttatggtttattatcttctttttttctgaaaagtaaacatcattttgttacaaaccaaattttgatattaaatggaaaaaacttctg

SEQ ID NO: 30489 - protein, 257 aa, Arabidopsis thaliana
  peptide (1)..(257): Ceres Seq. ID no. 12337306
  misc_feature (164)..(241): Pfam Name: Pollen allergen Pfam Description: Pollen allergen
  misc_feature (164)..(241): Pfam Name: Pollen allergen Pfam Description: Pollen allergen
  misc_feature (1)..(257): Homolog of NCBI NO: 38046726 NR Description: alpha-expansin 1 [Populus tremula x Populus
  misc_feature (1)..(257): Homolog of NCBI NO: 20502782 NR Description: expansin 10 precursor [Rumex palustris]
  misc_feature (1)..(257): Homolog of NCBI NO: 20502786 NR Description: expansin 12 precursor [Rumex palustris]
  misc_feature (1)..(257): Homolog of NCBI NO: 20502784 NR Description: expansin 11 precursor [Rumex palustris]
  misc_feature (1)..(257): Homolog of NCBI NO: 13898655 NR Description: expansin [Prunus cerasus]
  misc_feature (1)..(257): Homolog of NCBI NO: 38046726 NR Description: alpha-expansin 1 [Populus tremula x Populus
  misc_feature (1)..(257): Homolog of NCBI NO: 20502786 NR Description: expansin 12 precursor [Rumex palustris]
  misc_feature (1)..(257): Homolog of NCBI NO: 13898655 NR Description: expansin [Prunus cerasus]
  misc_feature (1)..(257): Homolog of NCBI NO: 15227005 NR Description: expansin, putative
  misc_feature (1)..(257): Homolog of NCBI NO: 21553904 NR Description: expansin AtEx6 [Arabidopsis thaliana]
  misc_feature (1)..(257): Homolog of NCBI NO: 20138197 NR Description: Alpha-expansin 6 precursor (At-EXP6) (AtEx6)
  misc_feature (1)..(257): Homolog of NCBI NO: 7488487 NR Description: probable expansin precursor - rape
  misc_feature (1)..(257): Homolog of NCBI NO: 29466643 NR Description: expansin [Prunus persica]
  misc_feature (1)..(257): Homolog of NCBI NO: 20502784 NR Description: expansin 11 precursor [Rumex palustris]
  misc_feature (1)..(257): Homolog of NCBI NO: 20502782 NR Description: expansin 10 precursor [Rumex palustris]
  misc_feature (1)..(257): Homolog of NCBI NO: 29466643 NR Description: expansin [Prunus persica]
  misc_feature (1)..(257): Homolog of NCBI NO: 7488487 NR Description: probable expansin precursor - rape
  misc_feature (1)..(257): Homolog of NCBI NO: 20138197 NR Description: Alpha-expansin 6 precursor (At-EXP6) (AtEx6)
  misc_feature (1)..(257): Homolog of NCBI NO: 21553904 NR Description: expansin AtEx6 [Arabidopsis thaliana]
  misc_feature (1)..(257): Homolog of NCBI NO: 15227005 NR Description: expansin, putative
MAMLGLVLSVLTTILALSEARIPGVYNGGGWETAHATFYGGSDASGTMGGACGYGNLYSQGYGVNTAALSTALFNNGFSCGACFELKCASDPKWCHSGSPSIFITATNFCPPNFAQPSDNGGWCNPPRPHFDLAMPMFLKIAEYRAGIVPVSFRRVPCRKRGGIRFTINGFRYFNLVLVTNVAGAGNIVRLGVKGTHTSWMTMSRNWGQNWQSNSVLVGQSLSFRVTSSDRRSSTSWNIAPANWKFGQTFMGKNFRV

SEQ ID NO: 30490 - protein, 255 aa, Arabidopsis thaliana
  peptide (1)..(255): Ceres Seq. ID no. 12337307
  misc_feature (162)..(239): Pfam Name: Pollen allergen Pfam Description: Pollen allergen
  misc_feature (162)..(239): Pfam Name: Pollen allergen Pfam Description: Pollen allergen
  misc_feature (1)..(255): Homolog of NCBI NO: 38046726 NR Description: alpha-expansin 1 [Populus tremula x Populus
  misc_feature (1)..(255): Homolog of NCBI NO: 20502782 NR Description: expansin 10 precursor [Rumex palustris]
  misc_feature (1)..(255): Homolog of NCBI NO: 20502786 NR Description: expansin 12 precursor [Rumex palustris]
  misc_feature (1)..(255): Homolog of NCBI NO: 20502784 NR Description: expansin 11 precursor [Rumex palustris]
  misc_feature (1)..(255): Homolog of NCBI NO: 13898655 NR Description: expansin [Prunus cerasus]
  misc_feature (1)..(255): Homolog of NCBI NO: 38046726 NR Description: alpha-expansin 1 [Populus tremula x Populus
  misc_feature (1)..(255): Homolog of NCBI NO: 20502786 NR Description: expansin 12 precursor [Rumex palustris]
  misc_feature (1)..(255): Homolog of NCBI NO: 13898655 NR Description: expansin [Prunus cerasus]
  misc_feature (1)..(255): Homolog of NCBI NO: 15227005 NR Description: expansin, putative
  misc_feature (1)..(255): Homolog of NCBI NO: 21553904 NR Description: expansin AtEx6 [Arabidopsis thaliana]
  misc_feature (1)..(255): Homolog of NCBI NO: 20138197 NR Description: Alpha-expansin 6 precursor (At-EXP6) (AtEx6)
  misc_feature (1)..(255): Homolog of NCBI NO: 7488487 NR Description: probable expansin precursor - rape
  misc_feature (1)..(255): Homolog of NCBI NO: 29466643 NR Description: expansin [Prunus persica]
  misc_feature (1)..(255): Homolog of NCBI NO: 20502784 NR Description: expansin 11 precursor [Rumex palustris]
  misc_feature (1)..(255): Homolog of NCBI NO: 20502782 NR Description: expansin 10 precursor [Rumex palustris]
  misc_feature (1)..(255): Homolog of NCBI NO: 29466643 NR Description: expansin [Prunus persica]
  misc_feature (1)..(255): Homolog of NCBI NO: 7488487 NR Description: probable expansin precursor - rape
  misc_feature (1)..(255): Homolog of NCBI NO: 20138197 NR Description: Alpha-expansin 6 precursor (At-EXP6) (AtEx6)
  misc_feature (1)..(255): Homolog of NCBI NO: 21553904 NR Description: expansin AtEx6 [Arabidopsis thaliana]
  misc_feature (1)..(255): Homolog of NCBI NO: 15227005 NR Description: expansin, putative
MLGLVLSVLTTILALSEARIPGVYNGGGWETAHATFYGGSDASGTMGGACGYGNLYSQGYGVNTAALSTALFNNGFSCGACFELKCASDPKWCHSGSPSIFITATNFCPPNFAQPSDNGGWCNPPRPHFDLAMPMFLKIAEYRAGIVPVSFRRVPCRKRGGIRFTINGFRYFNLVLVTNVAGAGNIVRLGVKGTHTSWMTMSRNWGQNWQSNSVLVGQSLSFRVTSSDRRSSTSWNIAPANWKFGQTFMGKNFRV

SEQ ID NO: 30491 - protein, 210 aa, Arabidopsis thaliana
  peptide (1)..(210): Ceres Seq. ID no. 12337308
  misc_feature (117)..(194): Pfam Name: Pollen allergen Pfam Description: Pollen allergen
  misc_feature (117)..(194): Pfam Name: Pollen allergen Pfam Description: Pollen allergen
  misc_feature (1)..(210): Homolog of NCBI NO: 38046726 NR Description: alpha-expansin 1 [Populus tremula x Populus
  misc_feature (1)..(210): Homolog of NCBI NO: 20502782 NR Description: expansin 10 precursor [Rumex palustris]
  misc_feature (1)..(210): Homolog of NCBI NO: 20502786 NR Description: expansin 12 precursor [Rumex palustris]
  misc_feature (1)..(210): Homolog of NCBI NO: 20502784 NR Description: expansin 11 precursor [Rumex palustris]
  misc_feature (1)..(210): Homolog of NCBI NO: 13898655 NR Description: expansin [Prunus cerasus]
  misc_feature (1)..(210): Homolog of NCBI NO: 38046726 NR Description: alpha-expansin 1 [Populus tremula x Populus
  misc_feature (1)..(210): Homolog of NCBI NO: 20502786 NR Description: expansin 12 precursor [Rumex palustris]
  misc_feature (1)..(210): Homolog of NCBI NO: 13898655 NR Description: expansin [Prunus cerasus]
  misc_feature (1)..(210): Homolog of NCBI NO: 15227005 NR Description: expansin, putative
  misc_feature (1)..(210): Homolog of NCBI NO: 21553904 NR Description: expansin AtEx6 [Arabidopsis thaliana]
  misc_feature (1)..(210): Homolog of NCBI NO: 20138197 NR Description: Alpha-expansin 6 precursor (At-EXP6) (AtEx6)
  misc_feature (1)..(210): Homolog of NCBI NO: 7488487 NR Description: probable expansin precursor - rape
  misc_feature (1)..(210): Homolog of NCBI NO: 29466643 NR Description: expansin [Prunus persica]
  misc_feature (1)..(210): Homolog of NCBI NO: 20502784 NR Description: expansin 11 precursor [Rumex palustris]
  misc_feature (1)..(210): Homolog of NCBI NO: 20502782 NR Description: expansin 10 precursor [Rumex palustris]
  misc_feature (1)..(210): Homolog of NCBI NO: 29466643 NR Description: expansin [Prunus persica]
  misc_feature (1)..(210): Homolog of NCBI NO: 7488487 NR Description: probable expansin precursor - rape
  misc_feature (1)..(210): Homolog of NCBI NO: 20138197 NR Description: Alpha-expansin 6 precursor (At-EXP6) (AtEx6)
  misc_feature (1)..(210): Homolog of NCBI NO: 21553904 NR Description: expansin AtEx6 [Arabidopsis thaliana]
  misc_feature (1)..(210): Homolog of NCBI NO: 15227005 NR Description: expansin, putative
MGGACGYGNLYSQGYGVNTAALSTALFNNGFSCGACFELKCASDPKWCHSGSPSIFITATNFCPPNFAQPSDNGGWCNPPRPHFDLAMPMFLKIAEYRAGIVPVSFRRVPCRKRGGIRFTINGFRYFNLVLVTNVAGAGNIVRLGVKGTHTSWMTMSRNWGQNWQSNSVLVGQSLSFRVTSSDRRSSTSWNIAPANWKFGQTFMGKNFRV

SEQ ID NO: 30492 - DNA, 669 bp, Arabidopsis thaliana
  misc_feature (1)..(669): Ceres Seq. ID no. 12340323
  misc_feature: MA Experiment ID: 108434 Result: Down-regulated in Transcription
  misc_feature: MA Experiment 108434 PARAMETER Experiment Name: At_Root_Tips_cDNA_P Parameter: Tissue Value: Root Tips
  misc_feature: MA Experiment ID: 108469 Result: Up-regulated in Transcription
  misc_feature: MA Experiment ID: 108488 Result: Down-regulated in Transcription
  misc_feature: MA Experiment ID: 108501 Result: Down-regulated in Transcription
  misc_feature: MA Experiment 108501 PARAMETER Experiment Name: At_ap2_floral_buds_cDNA_P Parameter: Plant Line Value: ap2 (Ler.)
  misc_feature: MA Experiment 108501 PARAMETER Experiment Name: At_ap2_floral_buds_cDNA_P Parameter: Tissue Value: Closed Flower
  misc_feature: MA Experiment ID: 108561 Result: Up-regulated in Transcription
  misc_feature: MA Experiment 108561 PARAMETER Experiment Name: At_100uM_ABA_cDNA_P Parameter: Timepoint (hr) Value: 6
  misc_feature: MA Experiment 108561 PARAMETER Experiment Name: At_100uM_ABA_cDNA_P Parameter: Tissue Value: Aerial
  misc_feature: MA Experiment 108561 PARAMETER Experiment Name: At_100uM_ABA_cDNA_P Parameter: Treatment Value: 100uM ABA vs. No Treatment
  misc_feature: MA Experiment ID: 108573 Result: Up-regulated in Transcription
  misc_feature: MA Experiment 108573 PARAMETER Experiment Name: At_Drought_cDNA_P Parameter: Timepoint (hr) Value: 6
  misc_feature: MA Experiment 108573 PARAMETER Experiment Name: At_Drought_cDNA_P Parameter: Tissue Value: Aerial
  misc_feature: MA Experiment 108573 PARAMETER Experiment Name: At_Drought_cDNA_P Parameter: Treatment Value: Drought vs. No Drought
  misc_feature: MA Experiment ID: 108576 Result: Up-regulated in Transcription
  misc_feature: MA Experiment 108576 PARAMETER Experiment Name: At_42deg_Heat_cDNA_P Parameter: Temperature (deg C) Value: 42 vs. 22
  misc_feature: MA Experiment 108576 PARAMETER Experiment Name: At_42deg_Heat_cDNA_P Parameter: Timepoint (hr) Value: 1
  misc_feature: MA Experiment 108576 PARAMETER Experiment Name: At_42deg_Heat_cDNA_P Parameter: Tissue Value: Aerial
  misc_feature: MA Experiment ID: 108579 Result: Down-regulated in Transcription
  misc_feature: MA Experiment 108579 PARAMETER Experiment Name: At_4deg_Cold_cDNA_P Parameter: Temperature (deg C) Value: 4 vs. 22
  misc_feature: MA Experiment 108579 PARAMETER Experiment Name: At_4deg_Cold_cDNA_P Parameter: Timepoint (hr) Value: 6
  misc_feature: MA Experiment 108579 PARAMETER Experiment Name: At_4deg_Cold_cDNA_P Parameter: Tissue Value: Aerial
  misc_feature: MA Experiment ID: 108585 Result: Up-regulated in Transcription
  misc_feature: MA Experiment 108585 PARAMETER Experiment Name: At_5mM_NaNP_cDNA_P Parameter: Timepoint (hr) Value: 6
  misc_feature: MA Experiment 108585 PARAMETER Experiment Name: At_5mM_NaNP_cDNA_P Parameter: Tissue Value: Aerial
  misc_feature: MA Experiment 108585 PARAMETER Experiment Name: At_5mM_NaNP_cDNA_P Parameter: Treatment Value: null
  misc_feature: MA Experiment ID: 108605 Result: Up-regulated in Transcription
  misc_feature: MA Experiment 108605 PARAMETER Experiment Name: At_100uM_ABA_cDNA_P Parameter: Timepoint (hr) Value: 6
  misc_feature: MA Experiment 108605 PARAMETER Experiment Name: At_100uM_ABA_cDNA_P Parameter: Tissue Value: Aerial
  misc_feature: MA Experiment 108605 PARAMETER Experiment Name: At_100uM_ABA_cDNA_P Parameter: Treatment Value: 100uM ABA vs. No Treatment
  misc_feature: MA Experiment ID: 108607 Result: Up-regulated in Transcription
  misc_feature: MA Experiment 108607 PARAMETER Experiment Name: At_100uM_ABA_cDNA_P Parameter: Timepoint (hr) Value: 4
  misc_feature: MA Experiment 108607 PARAMETER Experiment Name: At_100uM_ABA_cDNA_P Parameter: Tissue Value: Aerial
  misc_feature: MA Experiment 108607 PARAMETER Experiment Name: At_100uM_ABA_cDNA_P Parameter: Treatment Value: 100uM ABA vs. No Treatment
  misc_feature: MA Experiment ID: 108668 Result: Up-regulated in Transcription
  misc_feature: MA Experiment 108668 PARAMETER Experiment Name: At_2mM_SA_cDNA_P Parameter: Plant Line Value: WS
  misc_feature: MA Experiment 108668 PARAMETER Experiment Name: At_2mM_SA_cDNA_P Parameter: Timepoint (hr) Value: 6
  misc_feature: MA Experiment 108668 PARAMETER Experiment Name: At_2mM_SA_cDNA_P Parameter: Treatment Value: 2mM SA vs. No Treatment
  misc_feature: MA Experiment ID: 20000069 Result: Up-regulated in Transcription
  misc_feature: MA Experiment 20000069 PARAMETER Experiment Name: At_100uM_ABA_Mutants_cDNA_P Parameter: Plant Line Value: CS23
  misc_feature: MA Experiment 20000069 PARAMETER Experiment Name: At_100uM_ABA_Mutants_cDNA_P Parameter: Timepoint (hr) Value: 6
  misc_feature: MA Experiment 20000069 PARAMETER Experiment Name: At_100uM_ABA_Mutants_cDNA_P Parameter: Tissue Value: Aerial
  misc_feature: MA Experiment 20000069 PARAMETER Experiment Name: At_100uM_ABA_Mutants_cDNA_P Parameter: Treatment Value: 100uM ABA vs. No Treatment
  misc_feature: MA Experiment ID: 20000070 Result: Up-regulated in Transcription
  misc_feature: MA Experiment 20000070 PARAMETER Experiment Name: At_100uM_ABA_Mutants_cDNA_P Parameter: Plant Line Value: CS24
  misc_feature: MA Experiment 20000070 PARAMETER Experiment Name: At_100uM_ABA_Mutants_cDNA_P Parameter: Timepoint (hr) Value: 6
  misc_feature: MA Experiment 20000070 PARAMETER Experiment Name: At_100uM_ABA_Mutants_cDNA_P Parameter: Tissue Value: Aerial
  misc_feature: MA Experiment 20000070 PARAMETER Experiment Name: At_100uM_ABA_Mutants_cDNA_P Parameter: Treatment Value: 100uM ABA vs. No Treatment
  misc_feature: MA Experiment ID: 20000071 Result: Up-regulated in Transcription
  misc_feature: MA Experiment 20000071 PARAMETER Experiment Name: At_100uM_ABA_Mutants_cDNA_P Parameter: Plant Line Value: CS8104
  misc_feature: MA Experiment 20000071 PARAMETER Experiment Name: At_100uM_ABA_Mutants_cDNA_P Parameter: Timepoint (hr) Value: 6
  misc_feature: MA Experiment 20000071 PARAMETER Experiment Name: At_100uM_ABA_Mutants_cDNA_P Parameter: Tissue Value: Aerial
  misc_feature: MA Experiment 20000071 PARAMETER Experiment Name: At_100uM_ABA_Mutants_cDNA_P Parameter: Treatment Value: 100uM ABA vs. No Treatment
  misc_feature: MA Experiment ID: 20000072 Result: Up-regulated in Transcription
  misc_feature: MA Experiment 20000072 PARAMETER Experiment Name: At_100uM_ABA_Mutants_cDNA_P Parameter: Plant Line Value: CS8105
  misc_feature: MA Experiment 20000072 PARAMETER Experiment Name: At_100uM_ABA_Mutants_cDNA_P Parameter: Timepoint (hr) Value: 6
  misc_feature: MA Experiment 20000072 PARAMETER Experiment Name: At_100uM_ABA_Mutants_cDNA_P Parameter: Tissue Value: Aerial
  misc_feature: MA Experiment 20000072 PARAMETER Experiment Name: At_100uM_ABA_Mutants_cDNA_P Parameter: Treatment Value: 100uM ABA vs. No Treatment
  misc_feature: MA Experiment ID: 20000086 Result: Up-regulated in Transcription
  misc_feature: MA Experiment 20000086 PARAMETER Experiment Name: At_100uM_ABA_Mutants_cDNA_P Parameter: Plant Line Value: CS22
  misc_feature: MA Experiment 20000086 PARAMETER Experiment Name: At_100uM_ABA_Mutants_cDNA_P Parameter: Timepoint (hr) Value: 6
  misc_feature: MA Experiment 20000086 PARAMETER Experiment Name: At_100uM_ABA_Mutants_cDNA_P Parameter: Tissue Value: Aerial
  misc_feature: MA Experiment 20000086 PARAMETER Experiment Name: At_100uM_ABA_Mutants_cDNA_P Parameter: Treatment Value: 100uM ABA vs. No Treatment
  misc_feature: MA Experiment ID: 20000087 Result: Up-regulated in Transcription
  misc_feature: MA Experiment 20000087 PARAMETER Experiment Name: At_100uM_ABA_Mutants_cDNA_P Parameter: Plant Line Value: WS
  misc_feature: MA Experiment 20000087 PARAMETER Experiment Name: At_100uM_ABA_Mutants_cDNA_P Parameter: Timepoint (hr) Value: 6
  misc_feature: MA Experiment 20000087 PARAMETER Experiment Name: At_100uM_ABA_Mutants_cDNA_P Parameter: Tissue Value: Aerial
  misc_feature: MA Experiment 20000087 PARAMETER Experiment Name: At_100uM_ABA_Mutants_cDNA_P Parameter: Treatment Value: 100uM ABA vs. No Treatment
  misc_feature: MA Experiment ID: 20000088 Result: Up-regulated in Transcription
  misc_feature: MA Experiment 20000088 PARAMETER Experiment Name: At_100uM_ABA_Mutants_cDNA_P Parameter: Plant Line Value: Landsberg
  misc_feature: MA Experiment 20000088 PARAMETER Experiment Name: At_100uM_ABA_Mutants_cDNA_P Parameter: Timepoint (hr) Value: 6
  misc_feature: MA Experiment 20000088 PARAMETER Experiment Name: At_100uM_ABA_Mutants_cDNA_P Parameter: Tissue Value: Aerial
  misc_feature: MA Experiment 20000088 PARAMETER Experiment Name: At_100uM_ABA_Mutants_cDNA_P Parameter: Treatment Value: 100uM ABA vs. No Treatment
  misc_feature: MA Experiment ID: 20000111 Result: Up-regulated in Transcription
  misc_feature: MA Experiment 20000111 PARAMETER Experiment Name: At_42deg_Heat_cDNA_P Parameter: Temperature (deg C) Value: 42 vs. 22
  misc_feature: MA Experiment 20000111 PARAMETER Experiment Name: At_42deg_Heat_cDNA_P Parameter: Timepoint (hr) Value: 6
  misc_feature: MA Experiment 20000111 PARAMETER Experiment Name: At_42deg_Heat_cDNA_P Parameter: Tissue Value: Aerial
  misc_feature: MA Experiment ID: 20000112 Result: Up-regulated in Transcription
  misc_feature: MA Experiment 20000112 PARAMETER Experiment Name: At_42deg_Heat_cDNA_P Parameter: Temperature (deg C) Value: 42 vs. 22
  misc_feature: MA Experiment 20000112 PARAMETER Experiment Name: At_42deg_Heat_cDNA_P Parameter: Timepoint (hr) Value: 2
  misc_feature: MA Experiment 20000112 PARAMETER Experiment Name: At_42deg_Heat_cDNA_P Parameter: Tissue Value: Aerial
  misc_feature: MA Experiment ID: 20000117 Result: Up-regulated in Transcription
  misc_feature: MA Experiment 20000117 PARAMETER Experiment Name: At_100uM_ABA_Mutants_cDNA_P Parameter: Plant Line Value: Columbia
  misc_feature: MA Experiment 20000117 PARAMETER Experiment Name: At_100uM_ABA_Mutants_cDNA_P Parameter: Timepoint (hr) Value: 6
  misc_feature: MA Experiment 20000117 PARAMETER Experiment Name: At_100uM_ABA_Mutants_cDNA_P Parameter: Tissue Value: Aerial
  misc_feature: MA Experiment 20000117 PARAMETER Experiment Name: At_100uM_ABA_Mutants_cDNA_P Parameter: Treatment Value: 100uM ABA vs. No Treatment
  misc_feature: MA Experiment ID: 20000144 Result: Up-regulated in Transcription
  misc_feature: MA Experiment 20000144 PARAMETER Experiment Name: At_42deg_Heat_cDNA_P Parameter: Temperature (deg C) Value: 42 vs. 22
  misc_feature: MA Experiment 20000144 PARAMETER Experiment Name: At_42deg_Heat_cDNA_P Parameter: Timepoint (hr) Value: 1
  misc_feature: MA Experiment 20000144 PARAMETER Experiment Name: At_42deg_Heat_cDNA_P Parameter: Tissue Value: Aerial
  misc_feature: MA Experiment ID: 20000169 Result: Up-regulated in Transcription
  misc_feature: MA Experiment 20000169 PARAMETER Experiment Name: At_100uM_ABA_P Parameter: Age (day) Value: 14
  misc_feature: MA Experiment 20000169 PARAMETER Experiment Name: At_100uM_ABA_P Parameter: Organism Value: A. thaliana
  misc_feature: MA Experiment 20000169 PARAMETER Experiment Name: At_100uM_ABA_P Parameter: Plant Line Value: WS
  misc_feature: MA Experiment 20000169 PARAMETER Experiment Name: At_100uM_ABA_P Parameter: Timepoint (hr) Value: 6
  misc_feature: MA Experiment 20000169 PARAMETER Experiment Name: At_100uM_ABA_P Parameter: Tissue Value: Aerial
  misc_feature: MA Experiment 20000169 PARAMETER Experiment Name: At_100uM_ABA_P Parameter: Treatment Value: 100uM ABA vs. No Treatment
  misc_feature: MA Experiment ID: 20000171 Result: Up-regulated in Transcription
  misc_feature: MA Experiment 20000171 PARAMETER Experiment Name: At_42deg_Heat_P Parameter: Age (day) Value: 14
  misc_feature: MA Experiment 20000171 PARAMETER Experiment Name: At_42deg_Heat_P Parameter: Organism Value: A. thaliana
  misc_feature: MA Experiment 20000171 PARAMETER Experiment Name: At_42deg_Heat_P Parameter: Plant Line Value: WS
  misc_feature: MA Experiment 20000171 PARAMETER Experiment Name: At_42deg_Heat_P Parameter: Temperature (deg C) Value: 42 vs. 22
  misc_feature: MA Experiment 20000171 PARAMETER Experiment Name: At_42deg_Heat_P Parameter: Timepoint (hr) Value: 1
  misc_feature: MA Experiment 20000171 PARAMETER Experiment Name: At_42deg_Heat_P Parameter: Tissue Value: Aerial
  misc_feature: MA Experiment ID: 20000182 Result: Up-regulated in Transcription
  misc_feature: MA Experiment 20000182 PARAMETER Experiment Name: At_2mM_SA_P Parameter: Age (day) Value: 14
  misc_feature: MA Experiment 20000182 PARAMETER Experiment Name: At_2mM_SA_P Parameter: Organism Value: A. thaliana
  misc_feature: MA Experiment 20000182 PARAMETER Experiment Name: At_2mM_SA_P Parameter: Plant Line Value: WS
  misc_feature: MA Experiment 20000182 PARAMETER Experiment Name: At_2mM_SA_P Parameter: Timepoint (hr) Value: 6
  misc_feature: MA Experiment 20000182 PARAMETER Experiment Name: At_2mM_SA_P Parameter: Tissue Value: Aerial
  misc_feature: MA Experiment 20000182 PARAMETER Experiment Name: At_2mM_SA_P Parameter: Treatment Value: 2mM SA vs. No Treatment
  misc_feature: MA Experiment ID: 20000224 Result: Down-regulated in Transcription
  misc_feature: MA Experiment ID: 20000234 Result: Down-regulated in Transcription
  misc_feature: MA Experiment 20000234 PARAMETER Experiment Name: At_Siliques_P Parameter: Age (day) Value: 21
  misc_feature: MA Experiment 20000234 PARAMETER Experiment Name: At_Siliques_P Parameter: Organism Value: A. thaliana
  misc_feature: MA Experiment 20000234 PARAMETER Experiment Name: At_Siliques_P Parameter: Plant Line Value: WS
  misc_feature: MA Experiment 20000234 PARAMETER Experiment Name: At_Siliques_P Parameter: Tissue Value: Less Than 5mm Siliques vs. Whole Plant
  misc_feature: MA Experiment ID: 20000235 Result: Down-regulated in Transcription
  misc_feature: MA Experiment 20000235 PARAMETER Experiment Name: At_Siliques_P Parameter: Age (day) Value: 21
  misc_feature: MA Experiment 20000235 PARAMETER Experiment Name: At_Siliques_P Parameter: Organism Value: A. thaliana
  misc_feature: MA Experiment 20000235 PARAMETER Experiment Name: At_Siliques_P Parameter: Plant Line Value: WS
  misc_feature: MA Experiment 20000235 PARAMETER Experiment Name: At_Siliques_P Parameter: Tissue Value: 5-10mm Siliques vs. Whole Plant
  misc_feature: MA Experiment ID: 20000437 Result: Up-regulated in Transcription
  misc_feature: MA Experiment 20000437 PARAMETER Experiment Name: At_Drought_P Parameter: Age (day) Value: 8
  misc_feature: MA Experiment 20000437 PARAMETER Experiment Name: At_Drought_P Parameter: Organism Value: A. thaliana
  misc_feature: MA Experiment 20000437 PARAMETER Experiment Name: At_Drought_P Parameter: Plant Line Value: WS
  misc_feature: MA Experiment 20000437 PARAMETER Experiment Name: At_Drought_P Parameter: Timepoint (hr) Value: 24
  misc_feature: MA Experiment 20000437 PARAMETER Experiment Name: At_Drought_P Parameter: Tissue Value: Whole Plant
  misc_feature: MA Experiment 20000437 PARAMETER Experiment Name: At_Drought_P Parameter: Treatment Value: Drought vs. No Drought
  misc_feature: MA Experiment ID: 20000453 Result: Up-regulated in Transcription
  misc_feature: MA Experiment 20000453 PARAMETER Experiment Name: At_100uM_ABA_P Parameter: Age (day) Value: 15
  misc_feature: MA Experiment 20000453 PARAMETER Experiment Name: At_100uM_ABA_P Parameter: Organism Value: A. thaliana
  misc_feature: MA Experiment 20000453 PARAMETER Experiment Name: At_100uM_ABA_P Parameter: Plant Line Value: WS
  misc_feature: MA Experiment 20000453 PARAMETER Experiment Name: At_100uM_ABA_P Parameter: Timepoint (hr) Value: 24
  misc_feature: MA Experiment 20000453 PARAMETER Experiment Name: At_100uM_ABA_P Parameter: Tissue Value: Aerial
  misc_feature: MA Experiment 20000453 PARAMETER Experiment Name: At_100uM_ABA_P Parameter: Treatment Value: 100uM ABA vs. No Treatment
  misc_feature: MA Experiment ID: 20000794 Result: Up-regulated in Transcription
  misc_feature: MA Experiment 20000794 PARAMETER Experiment Name: At_Petals_P Parameter: Age (day) Value: 23-25 days
  misc_feature: MA Experiment 20000794 PARAMETER Experiment Name: At_Petals_P Parameter: Plant Line Value: WS
  misc_feature: MA Experiment 20000794 PARAMETER Experiment Name: At_Petals_P Parameter: Tissue Value: Petals vs. Whole plant
  misc_feature: MA Experiment ID: 20001450 Result: Up-regulated in Transcription
  misc_feature: MA Experiment 20001450 PARAMETER Experiment Name: At_Far-red-induction_P Parameter: Age (day) Value: 7
  misc_feature: MA Experiment 20001450 PARAMETER Experiment Name: At_Far-red-induction_P Parameter: Light Value: Far-red vs. White
  misc_feature: MA Experiment 20001450 PARAMETER Experiment Name: At_Far-red-induction_P Parameter: Organism Value: A. thaliana
  misc_feature: MA Experiment 20001450 PARAMETER Experiment Name: At_Far-red-induction_P Parameter: Plant Line Value: Columbia
  misc_feature: MA Experiment 20001450 PARAMETER Experiment Name: At_Far-red-induction_P Parameter: Timepoint (hr) Value: 8
  misc_feature: MA Experiment 20001450 PARAMETER Experiment Name: At_Far-red-induction_P Parameter: Tissue Value: Whole Plant
  misc_feature: MA Experiment ID: 20001451 Result: Up-regulated in Transcription
  misc_feature: MA Experiment 20001451 PARAMETER Experiment Name: At_Far-red-induction_P Parameter: Age (day) Value: 7
  misc_feature: MA Experiment 20001451 PARAMETER Experiment Name: At_Far-red-induction_P Parameter: Light Value: Far-red vs. White
  misc_feature: MA Experiment 20001451 PARAMETER Experiment Name: At_Far-red-induction_P Parameter: Organism Value: A. thaliana
  misc_feature: MA Experiment 20001451 PARAMETER Experiment Name: At_Far-red-induction_P Parameter: Plant Line Value: Columbia
  misc_feature: MA Experiment 20001451 PARAMETER Experiment Name: At_Far-red-induction_P Parameter: Timepoint (hr) Value: 24
  misc_feature: MA Experiment 20001451 PARAMETER Experiment Name: At_Far-red-induction_P Parameter: Tissue Value: Whole Plant
  misc_feature: MA Experiment ID: 20001557 Result: Down-regulated in Transcription
  misc_feature: MA Experiment 20001557 PARAMETER Experiment Name: At_Drought_Soil_Dry_P Parameter: Age (day) Value: 27
  misc_feature: MA Experiment 20001557 PARAMETER Experiment Name: At_Drought_Soil_Dry_P Parameter: Organism Value: A. thaliana
  misc_feature: MA Experiment 20001557 PARAMETER Experiment Name: At_Drought_Soil_Dry_P Parameter: Plant Line Value: WS
  misc_feature: MA Experiment 20001557 PARAMETER Experiment Name: At_Drought_Soil_Dry_P Parameter: Post Timepoint (hr) Value: 3
  misc_feature: MA Experiment 20001557 PARAMETER Experiment Name: At_Drought_Soil_Dry_P Parameter: Post-Treatment Value: Re-Water vs. No Drought
  misc_feature: MA Experiment 20001557 PARAMETER Experiment Name: At_Drought_Soil_Dry_P Parameter: Timepoint (day) Value: 13
  misc_feature: MA Experiment 20001557 PARAMETER Experiment Name: At_Drought_Soil_Dry_P Parameter: Treatment Value: Drought vs. No Drought
  misc_feature: MA Experiment ID: 20001558 Result: Down-regulated in Transcription
  misc_feature: MA Experiment 20001558 PARAMETER Experiment Name: At_Drought_Soil_Dry_P Parameter: Age (day) Value: 27
  misc_feature: MA Experiment 20001558 PARAMETER Experiment Name: At_Drought_Soil_Dry_P Parameter: Organism Value: A. thaliana
  misc_feature: MA Experiment 20001558 PARAMETER Experiment Name: At_Drought_Soil_Dry_P Parameter: Plant Line Value: WS
  misc_feature: MA Experiment 20001558 PARAMETER Experiment Name: At_Drought_Soil_Dry_P Parameter: Post Timepoint (hr) Value: 6
  misc_feature: MA Experiment 20001558 PARAMETER Experiment Name: At_Drought_Soil_Dry_P Parameter: Post-Treatment Value: Re-Water vs. No Drought
  misc_feature: MA Experiment 20001558 PARAMETER Experiment Name: At_Drought_Soil_Dry_P Parameter: Timepoint (day) Value: 13
  misc_feature: MA Experiment 20001558 PARAMETER Experiment Name: At_Drought_Soil_Dry_P Parameter: Treatment Value: Drought vs. No Drought
  misc_feature: MA Experiment ID: 20001904 Result: Up-regulated in Transcription
  misc_feature: MA Experiment 20001904 PARAMETER Experiment Name: At_Drought_Reproduction_P Parameter: Age (day) Value: 37
  misc_feature: MA Experiment 20001904 PARAMETER Experiment Name: At_Drought_Reproduction_P Parameter: Organism Value: A. thaliana
  misc_feature: MA Experiment 20001904 PARAMETER Experiment Name: At_Drought_Reproduction_P Parameter: Plant Line Value: WS
  misc_feature: MA Experiment 20001904 PARAMETER Experiment Name: At_Drought_Reproduction_P Parameter: Timepoint (day) Value: 7
  misc_feature: MA Experiment 20001904 PARAMETER Experiment Name: At_Drought_Reproduction_P Parameter: Tissue Value: Rosettes
  misc_feature: MA Experiment 20001904 PARAMETER Experiment Name: At_Drought_Reproduction_P Parameter: Treatment Value: Drought vs. No Drought
ataatcctaccctttctcttgatattgacttctctctcgattcttcttctccagtttcaatcaaactcaatttcttctcaacgaaccctaatttccaacgaatcggattcagtttcttcttcggagactaatcgaatcgccatggctaagagctccttcaagatctctaaccctctcgaggcaaggatgagtgaatcttctcgaatcagagagaagtaccctgacaaattcccgtgattgtggagaaggctggacaaagtgatgttcctgacattgacaagaagaagtatcttgtaccagctgatctaacagtgggacaatttgtatacgttgttcgtaaaagaatcaagcttggagctgagaaagctatttttgtctttgttaagaacacattgcctccaactgctgcattgatgtctgcgatctatgaagaacacaaagatgaggatgggttcctctacatgacttacagtggagagaacacttttggatctcttaccgttgcttgaataaaaatcgatctttggatgactttgatgtacatacataaatcaggaagataaagatgtacattgcttccttcttttctctggcttttaactttgctttggatgtttggatatctttccctttgggtttattaatcgtcagaaacttctccttttctcc

SEQ ID NO: 30493 - protein, 78 aa, Arabidopsis thaliana
  peptide (1)..(78): Ceres Seq. ID no. 12340324
  misc_feature (19)..(60): Homolog of NCBI NO: 7487830 NR Description: hypothetical protein T8O5.180 - Arabidopsis
  misc_feature (48)..(78): Homolog of NCBI NO: 7446944 NR Description: hypothetical protein F8K4.23 - Arabidopsis
  misc_feature (48)..(78): Homolog of NCBI NO: 38344173 NR Description: OSJNBa0053K19.12 [Oryza sativa (japonica
  misc_feature (48)..(78): Homolog of NCBI NO: 40253647 NR Description: putative microtubial binding protein
  misc_feature (48)..(78): Homolog of NCBI NO: 34595981 NR Description: microtubule-associated protein 1 light chain 3
  misc_feature (63)..(78): Homolog of NCBI NO: 11279074 NR Description: symbiosis-related like protein - Arabidopsis
  misc_feature (48)..(78): Homolog of NCBI NO: 15233593 NR Description: putative symbiosis-related protein
  misc_feature (48)..(78): Homolog of NCBI NO: 21553487 NR Description: symbiosis-related like protein [Arabidopsis
  misc_feature (48)..(78): Homolog of NCBI NO: 18415813 NR Description: symbiosis-related like protein
IILPFLLILTSLSILLLQFQSNSISSQRTLISNESDSVSSSETNRIAMAKSSFKISNPLEARMSESSRIREKYPDKFP

SEQ ID NO: 30494 - protein, 42 aa, Arabidopsis thaliana
  peptide (1)..(42): Ceres Seq. ID no. 12340325
NPTLSLDIDFSLDSSSPVSIKLNFFSTNPNFQRIGFSFFFGD

SEQ ID NO: 30495 - DNA, 612 bp, Arabidopsis thaliana
  misc_feature (1)..(612): Ceres Seq. ID no. 12325571
  misc_feature: MA Experiment ID: 108434 Result: Down-regulated in Transcription
  misc_feature: MA Experiment 108434 PARAMETER Experiment Name: At_Root_Tips_cDNA_P Parameter: Tissue Value: Root Tips
  misc_feature: MA Experiment ID: 108462 Result: Up-regulated in Transcription
  misc_feature: MA Experiment 108462 PARAMETER Experiment Name: At_Germinating_Seeds_cDNA_P Parameter: Age (day) Value: 2 vs. 0
  misc_feature: MA Experiment 108462 PARAMETER Experiment Name: At_Germinating_Seeds_cDNA_P Parameter: Tissue Value: Germinating Seeds
  misc_feature: MA Experiment ID: 108464 Result: Up-regulated in Transcription
  misc_feature: MA Experiment 108464 PARAMETER Experiment Name: At_Germinating_Seeds_cDNA_P Parameter: Age (day) Value: 4 vs. 0
  misc_feature: MA Experiment 108464 PARAMETER Experiment Name: At_Germinating_Seeds_cDNA_P Parameter: Tissue Value: Germinating Seeds
  misc_feature: MA Experiment ID: 108573 Result: Down-regulated in Transcription
  misc_feature: MA Experiment 108573 PARAMETER Experiment Name: At_Drought_cDNA_P Parameter: Timepoint (hr) Value: 6
  misc_feature: MA Experiment 108573 PARAMETER Experiment Name: At_Drought_cDNA_P Parameter: Tissue Value: Aerial
  misc_feature: MA Experiment 108573 PARAMETER Experiment Name: At_Drought_cDNA_P Parameter: Treatment Value: Drought vs. No Drought
  misc_feature: MA Experiment ID: 20000111 Result: Down-regulated in Transcription
  misc_feature: MA Experiment 20000111 PARAMETER Experiment Name: At_42deg_Heat_cDNA_P Parameter: Temperature (deg C) Value: 42 vs. 22
  misc_feature: MA Experiment 20000111 PARAMETER Experiment Name: At_42deg_Heat_cDNA_P Parameter: Timepoint (hr) Value: 6
  misc_feature: MA Experiment 20000111 PARAMETER Experiment Name: At_42deg_Heat_cDNA_P Parameter: Tissue Value: Aerial
  misc_feature: MA Experiment ID: 20000112 Result: Down-regulated in Transcription
  misc_feature: MA Experiment 20000112 PARAMETER Experiment Name: At_42deg_Heat_cDNA_P Parameter: Temperature (deg C) Value: 42 vs. 22
  misc_feature: MA Experiment 20000112 PARAMETER Experiment Name: At_42deg_Heat_cDNA_P Parameter: Timepoint (hr) Value: 2
  misc_feature: MA Experiment 20000112 PARAMETER Experiment Name: At_42deg_Heat_cDNA_P Parameter: Tissue Value: Aerial
  misc_feature: MA Experiment ID: 20000144 Result: Down-regulated in Transcription
  misc_feature: MA Experiment 20000144 PARAMETER Experiment Name: At_42deg_Heat_cDNA_P Parameter: Temperature (deg C) Value: 42 vs. 22
  misc_feature: MA Experiment 20000144 PARAMETER Experiment Name: At_42deg_Heat_cDNA_P Parameter: Timepoint (hr) Value: 1
  misc_feature: MA Experiment 20000144 PARAMETER Experiment Name: At_42deg_Heat_cDNA_P Parameter: Tissue Value: Aerial
  misc_feature: MA Experiment ID: 20000171 Result: Down-regulated in Transcription
  misc_feature: MA Experiment 20000171 PARAMETER Experiment Name: At_42deg_Heat_P Parameter: Age (day) Value: 14
  misc_feature: MA Experiment 20000171 PARAMETER Experiment Name: At_42deg_Heat_P Parameter: Organism Value: A. thaliana
  misc_feature: MA Experiment 20000171 PARAMETER Experiment Name: At_42deg_Heat_P Parameter: Plant Line Value: WS
  misc_feature: MA Experiment 20000171 PARAMETER Experiment Name: At_42deg_Heat_P Parameter: Temperature (deg C) Value: 42 vs. 22
  misc_feature: MA Experiment 20000171 PARAMETER Experiment Name: At_42deg_Heat_P Parameter: Timepoint (hr) Value: 1
  misc_feature: MA Experiment 20000171 PARAMETER Experiment Name: At_42deg_Heat_P Parameter: Tissue Value: Aerial
  misc_feature: MA Experiment ID: 20000173 Result: Down-regulated in Transcription
  misc_feature: MA Experiment 20000173 PARAMETER Experiment Name: At_42deg_Heat_P Parameter: Age (day) Value: 14
  misc_feature: MA Experiment 20000173 PARAMETER Experiment Name: At_42deg_Heat_P Parameter: Organism Value: A. thaliana
  misc_feature: MA Experiment 20000173 PARAMETER Experiment Name: At_42deg_Heat_P Parameter: Plant Line Value: WS
  misc_feature: MA Experiment 20000173 PARAMETER Experiment Name: At_42deg_Heat_P Parameter: Temperature (deg C) Value: 42 vs. 22
  misc_feature: MA Experiment 20000173 PARAMETER Experiment Name: At_42deg_Heat_P Parameter: Timepoint (hr) Value: 6
  misc_feature: MA Experiment 20000173 PARAMETER Experiment Name: At_42deg_Heat_P Parameter: Tissue Value: Aerial
  misc_feature: MA Experiment ID: 20000234 Result: Up-regulated in Transcription
  misc_feature: MA Experiment 20000234 PARAMETER Experiment Name: At_Siliques_P Parameter: Age (day) Value: 21
  misc_feature: MA Experiment 20000234 PARAMETER Experiment Name: At_Siliques_P Parameter: Organism Value: A. thaliana
  misc_feature: MA Experiment 20000234 PARAMETER Experiment Name: At_Siliques_P Parameter: Plant Line Value: WS
  misc_feature: MA Experiment 20000234 PARAMETER Experiment Name: At_Siliques_P Parameter: Tissue Value: Less Than 5mm Siliques vs. Whole Plant
  misc_feature: MA Experiment ID: 20000794 Result: Down-regulated in Transcription
  misc_feature: MA Experiment 20000794 PARAMETER Experiment Name: At_Petals_P Parameter: Age (day) Value: 23-25 days
  misc_feature: MA Experiment 20000794 PARAMETER Experiment Name: At_Petals_P Parameter: Plant Line Value: WS
  misc_feature: MA Experiment 20000794 PARAMETER Experiment Name: At_Petals_P Parameter: Tissue Value: Petals vs. Whole plant
  misc_feature: MA Experiment ID: 20001911 Result: Down-regulated in Transcription
  misc_feature: MA Experiment 20001911 PARAMETER Experiment Name: At_Drought_Reproduction_P Parameter: Age (day) Value: 40
  misc_feature: MA Experiment 20001911 PARAMETER Experiment Name: At_Drought_Reproduction_P Parameter: Organism Value: A. thaliana
  misc_feature: MA Experiment 20001911 PARAMETER Experiment Name: At_Drought_Reproduction_P Parameter: Plant Line Value: WS
  misc_feature: MA Experiment 20001911 PARAMETER Experiment Name: At_Drought_Reproduction_P Parameter: Timepoint (day) Value: 10
  misc_feature: MA Experiment 20001911 PARAMETER Experiment Name: At_Drought_Reproduction_P Parameter: Tissue Value: Flowers
  misc_feature: MA Experiment 20001911 PARAMETER Experiment Name: At_Drought_Reproduction_P Parameter: Treatment Value: Drought vs. No Drought
aaccccatttctgcttagagacagagaaatagagagagatcgcgtcggcacaatctgcaatttccaacatcgacatgtttaactctacagcgttggtgattttcgccattcttttcctctcaatctccgccgatgtgttcccgattccgtctcccaacggagagatcgacgcaatgttgatccgaaacagtatcatcggagaagatgaagatctaatgccaactgagatcagccggagagtactgatggcgcagaaacggtacatcggctacgaaacgctaaggagagacatggttccttgtcagaaaccaggagcttcttactacgattgtcgctctggacaagctaattcttacagcagaggctgtgacaccattacaagatgcgctagagacacaaacgacatcaacacatgaaggtaagatccaagaaattgccaaaattggaagctttttggccgaggcaagtaaattatatgattaagcttttgcattgctgttgttatatatgtgtttttgacataagaattgttataatatatgtaactctgccactagttggttatcaatgttcaattattgagatctataaattatattaagtttttttggc

SEQ ID NO: 30496 - protein, 113 aa, Arabidopsis thaliana
  peptide (1)..(113): Ceres Seq. ID no. 12325572
  misc_feature (42)..(106): Pfam Name: Rapid ALkalinization Factor (RALF) Pfam Description: Rapid ALkalinization Factor (RALF)
  misc_feature (42)..(104): Homolog of NCBI NO: 34902918 NR Description: unnamed protein product [Oryza sativa (japonica
  misc_feature (7)..(106): Homolog of NCBI NO: 15217877 NR Description: hypothetical protein; protein id: At1g28270.1
  misc_feature (41)..(104): Homolog of NCBI NO: 15218637 NR Description: hypothetical protein; protein id: At1g02900.1
  misc_feature (41)..(106): Homolog of NCBI NO: 18401177 NR Description: expressed protein
  misc_feature (41)..(106): Homolog of NCBI NO: 18397246 NR Description: expressed protein
  misc_feature (5)..(106): Homolog of NCBI NO: 18414528 NR Description: Expressed protein
  misc_feature (1)..(113): Homolog of NCBI NO: 18403901 NR Description: Expressed protein
  misc_feature (1)..(62): Homolog of NCBI NO: 7459901 NR Description: hypothetical protein DL3015C - Arabidopsis
  misc_feature (1)..(113): Homolog of NCBI NO: 18414108 NR Description: expressed protein
  misc_feature (1)..(113): Homolog of NCBI NO: 21553907 NR Description: unknown [Arabidopsis thaliana]
MFNSTALVIFAILFLSISADVFPIPSPNGEIDAMLIRNSIIGEDEDLMPTEISRRVLMAQKRYIGYETLRRDMVPCQKPGASYYDCRSGQANSYSRGCDTITRCARDTNDINT

SEQ ID NO: 30497 - protein, 80 aa, Arabidopsis thaliana
  peptide (1)..(80): Ceres Seq. ID no. 12325573
  misc_feature (9)..(73): Pfam Name: Rapid ALkalinization Factor (RALF) Pfam Description: Rapid ALkalinization Factor (RALF)
  misc_feature (9)..(71): Homolog of NCBI NO: 34902918 NR Description: unnamed protein product [Oryza sativa (japonica
  misc_feature (1)..(73): Homolog of NCBI NO: 15217877 NR Description: hypothetical protein; protein id: At1g28270.1
  misc_feature (8)..(71): Homolog of NCBI NO: 15218637 NR Description: hypothetical protein; protein id: At1g02900.1
  misc_feature (8)..(73): Homolog of NCBI NO: 18401177 NR Description: expressed protein
  misc_feature (8)..(73): Homolog of NCBI NO: 18397246 NR Description: expressed protein
  misc_feature (1)..(73): Homolog of NCBI NO: 18414528 NR Description: Expressed protein
  misc_feature (1)..(80): Homolog of NCBI NO: 18403901 NR Description: Expressed protein
  misc_feature (1)..(29): Homolog of NCBI NO: 7459901 NR Description: hypothetical protein DL3015C - Arabidopsis
  misc_feature (1)..(80): Homolog of NCBI NO: 18414108 NR Description: expressed protein
  misc_feature (1)..(80): Homolog of NCBI NO: 21553907 NR Description: unknown [Arabidopsis thaliana]
MLIRNSIIGEDEDLMPTEISRRVLMAQKRYIGYETLRRDMVPCQKPGASYYDCRSGQANSYSRGCDTITRCARDTNDINT

SEQ ID NO: 30498 - protein, 66 aa, Arabidopsis thaliana
  peptide (1)..(66): Ceres Seq. ID no. 12325574
  misc_feature (1)..(59): Pfam Name: Rapid ALkalinization Factor (RALF) Pfam Description: Rapid ALkalinization Factor (RALF)
  misc_feature (1)..(57): Homolog of NCBI NO: 34902918 NR Description: unnamed protein product [Oryza sativa (japonica
  misc_feature (1)..(59): Homolog of NCBI NO: 15217877 NR Description: hypothetical protein; protein id: At1g28270.1
  misc_feature (1)..(57): Homolog of NCBI NO: 15218637 NR Description: hypothetical protein; protein id: At1g02900.1
  misc_feature (1)..(59): Homolog of NCBI NO: 18401177 NR Description: expressed protein
  misc_feature (1)..(59): Homolog of NCBI NO: 18397246 NR Description: expressed protein
  misc_feature (1)..(59): Homolog of NCBI NO: 18414528 NR Description: Expressed protein
  misc_feature (1)..(66): Homolog of NCBI NO: 18403901 NR Description: Expressed protein
  misc_feature (1)..(15): Homolog of NCBI NO: 7459901 NR Description: hypothetical protein DL3015C - Arabidopsis
  misc_feature (1)..(66): Homolog of NCBI NO: 18414108 NR Description: expressed protein
  misc_feature (1)..(66): Homolog of NCBI NO: 21553907 NR Description: unknown [Arabidopsis thaliana]
MPTEISRRVLMAQKRYIGYETLRRDMVPCQKPGASYYDCRSGQANSYSRGCDTITRCARDTNDINT

SEQ ID NO: 30499 - DNA, 2535 bp, Arabidopsis thaliana
  misc_feature (1)..(2535): Ceres Seq. ID no. 12327659
  misc_feature: MA Experiment ID: 108434 Result: Down-regulated in Transcription
  misc_feature: MA Experiment 108434 PARAMETER Experiment Name: At_Root_Tips_cDNA_P Parameter: Tissue Value: Root Tips
  misc_feature: MA Experiment ID: 108469 Result: Up-regulated in Transcription
  misc_feature: MA Experiment ID: 20000070 Result: Up-regulated in Transcription
  misc_feature: MA Experiment 20000070 PARAMETER Experiment Name: At_100uM_ABA_Mutants_cDNA_P Parameter: Plant Line Value: CS24
  misc_feature: MA Experiment 20000070 PARAMETER Experiment Name: At_100uM_ABA_Mutants_cDNA_P Parameter: Timepoint (hr) Value: 6
  misc_feature: MA Experiment 20000070 PARAMETER Experiment Name: At_100uM_ABA_Mutants_cDNA_P Parameter: Tissue Value: Aerial
  misc_feature: MA Experiment 20000070 PARAMETER Experiment Name: At_100uM_ABA_Mutants_cDNA_P Parameter: Treatment Value: 100uM ABA vs. No Treatment
  misc_feature: MA Experiment ID: 20000180 Result: Down-regulated in Transcription
  misc_feature: MA Experiment 20000180 PARAMETER Experiment Name: At_Germinating_Seeds_P Parameter: Age (hr) Value: 24 vs. 0
  misc_feature: MA Experiment 20000180 PARAMETER Experiment Name: At_Germinating_Seeds_P Parameter: Tissue Value: Germinating Seeds
  misc_feature: MA Experiment ID: 20000264 Result: Down-regulated in Transcription
  misc_feature: MA Experiment 20000264 PARAMETER Experiment Name: At_Open_Flower_P Parameter: Age (day) Value: 21
  misc_feature: MA Experiment 20000264 PARAMETER Experiment Name: At_Open_Flower_P Parameter: Plant Line Value: WS
  misc_feature: MA Experiment 20000264 PARAMETER Experiment Name: At_Open_Flower_P Parameter: Tissue Value: Open Flower vs. Whole Plant
  misc_feature: MA Experiment ID: 20000265 Result: Down-regulated in Transcription
  misc_feature: MA Experiment 20000265 PARAMETER Experiment Name: At_Open_Flower_P Parameter: Age (day) Value: 21
  misc_feature: MA Experiment 20000265 PARAMETER Experiment Name: At_Open_Flower_P Parameter: Plant Line Value: WS
  misc_feature: MA Experiment 20000265 PARAMETER Experiment Name: At_Open_Flower_P Parameter: Tissue Value: Closed Flower vs. Whole Plant
  misc_feature: MA Experiment ID: 20000573 Result: Up-regulated in Transcription
  misc_feature: MA Experiment 20000573 PARAMETER Experiment Name: At_100uM_ABA_Mutants__P Parameter: Organism Value: A. thaliana
  misc_feature: MA Experiment 20000573 PARAMETER Experiment Name: At_100uM_ABA_Mutants__P Parameter: Plant Line Value: CS22 vs. Ler wt
  misc_feature: MA Experiment 20000573 PARAMETER Experiment Name: At_100uM_ABA_Mutants__P Parameter: Timepoint (hr) Value: N/A
  misc_feature: MA Experiment 20000573 PARAMETER Experiment Name: At_100uM_ABA_Mutants__P Parameter: Tissue Value: Whole Plant
  misc_feature: MA Experiment 20000573 PARAMETER Experiment Name: At_100uM_ABA_Mutants__P Parameter: Treatment Value: None
  misc_feature: MA Experiment ID: 20001247 Result: Up-regulated in Transcription
  misc_feature: MA Experiment 20001247 PARAMETER Experiment Name: At_Far-red-induction_P Parameter: Age (day) Value: 7
  misc_feature: MA Experiment 20001247 PARAMETER Experiment Name: At_Far-red-induction_P Parameter: Light Value: Far-red vs. White
  misc_feature: MA Experiment 20001247 PARAMETER Experiment Name: At_Far-red-induction_P Parameter: Organism Value: A. thaliana
  misc_feature: MA Experiment 20001247 PARAMETER Experiment Name: At_Far-red-induction_P Parameter: Plant Line Value: Columbia
  misc_feature: MA Experiment 20001247 PARAMETER Experiment Name: At_Far-red-induction_P Parameter: Timepoint (hr) Value: 1
  misc_feature: MA Experiment 20001247 PARAMETER Experiment Name: At_Far-red-induction_P Parameter: Tissue Value: Whole Plant
  misc_feature: MA Experiment ID: 20001248 Result: Up-regulated in Transcription
  misc_feature: MA Experiment 20001248 PARAMETER Experiment Name: At_Far-red-induction_P Parameter: Age (day) Value: 7
  misc_feature: MA Experiment 20001248 PARAMETER Experiment Name: At_Far-red-induction_P Parameter: Light Value: Far-red vs. White
  misc_feature: MA Experiment 20001248 PARAMETER Experiment Name: At_Far-red-induction_P Parameter: Organism Value: A. thaliana
  misc_feature: MA Experiment 20001248 PARAMETER Experiment Name: At_Far-red-induction_P Parameter: Plant Line Value: Columbia
  misc_feature: MA Experiment 20001248 PARAMETER Experiment Name: At_Far-red-induction_P Parameter: Timepoint (hr) Value: 4
  misc_feature: MA Experiment 20001248 PARAMETER Experiment Name: At_Far-red-induction_P Parameter: Tissue Value: Whole Plant
  misc_feature: MA Experiment ID: 20001450 Result: Up-regulated in Transcription
  misc_feature: MA Experiment 20001450 PARAMETER Experiment Name: At_Far-red-induction_P Parameter: Age (day) Value: 7
  misc_feature: MA Experiment 20001450 PARAMETER Experiment Name: At_Far-red-induction_P Parameter: Light Value: Far-red vs. White
  misc_feature: MA Experiment 20001450 PARAMETER Experiment Name: At_Far-red-induction_P Parameter: Organism Value: A. thaliana
  misc_feature: MA Experiment 20001450 PARAMETER Experiment Name: At_Far-red-induction_P Parameter: Plant Line Value: Columbia
  misc_feature: MA Experiment 20001450 PARAMETER Experiment Name: At_Far-red-induction_P Parameter: Timepoint (hr) Value: 8
  misc_feature: MA Experiment 20001450 PARAMETER Experiment Name: At_Far-red-induction_P Parameter: Tissue Value: Whole Plant
  misc_feature: MA Experiment ID: 20001557 Result: Up-regulated in Transcription
  misc_feature: MA Experiment 20001557 PARAMETER Experiment Name: At_Drought_Soil_Dry_P Parameter: Age (day) Value: 27
  misc_feature: MA Experiment 20001557 PARAMETER Experiment Name: At_Drought_Soil_Dry_P Parameter: Organism Value: A. thaliana
  misc_feature: MA Experiment 20001557 PARAMETER Experiment Name: At_Drought_Soil_Dry_P Parameter: Plant Line Value: WS
  misc_feature: MA Experiment 20001557 PARAMETER Experiment Name: At_Drought_Soil_Dry_P Parameter: Post Timepoint (hr) Value: 3
  misc_feature: MA Experiment 20001557 PARAMETER Experiment Name: At_Drought_Soil_Dry_P Parameter: Post-Treatment Value: Re-Water vs. No Drought
  misc_feature: MA Experiment 20001557 PARAMETER Experiment Name: At_Drought_Soil_Dry_P Parameter: Timepoint (day) Value: 13
  misc_feature: MA Experiment 20001557 PARAMETER Experiment Name: At_Drought_Soil_Dry_P Parameter: Treatment Value: Drought vs. No Drought
  misc_feature: MA Experiment ID: 20001560 Result: Down-regulated in Transcription
  misc_feature: MA Experiment 20001560 PARAMETER Experiment Name: At_Drought_Soil_Dry_P Parameter: Age (day) Value: 28
  misc_feature: MA Experiment 20001560 PARAMETER Experiment Name: At_Drought_Soil_Dry_P Parameter: Organism Value: A. thaliana
  misc_feature: MA Experiment 20001560 PARAMETER Experiment Name: At_Drought_Soil_Dry_P Parameter: Plant Line Value: WS
  misc_feature: MA Experiment 20001560 PARAMETER Experiment Name: At_Drought_Soil_Dry_P Parameter: Post Timepoint (hr) Value: None
  misc_feature: MA Experiment 20001560 PARAMETER Experiment Name: At_Drought_Soil_Dry_P Parameter: Post-Treatment Value: None
  misc_feature: MA Experiment 20001560 PARAMETER Experiment Name: At_Drought_Soil_Dry_P Parameter: Timepoint (day) Value: 14
  misc_feature: MA Experiment 20001560 PARAMETER Experiment Name: At_Drought_Soil_Dry_P Parameter: Treatment Value: Drought vs. No Drought
aatcaaattcaatttaatttttcttctgcaaatggaaccaccgccttcttctctgtcctccaccgcggtggcttccacctccatctccgccgccactgctcctgttcctcctcctctacctcctcacgtgacttcttcttaccccgaatctctcgactcctcccctcgttctcgcaccaccgatggctgggatgaccttcctgctccttctggcggcggcggtggcggtggtggtagcgccgtctcttctaaacttcgttttatgtgtagctacggcggtcatatccttcctcgccctcacgataagtctctctgctacatgggcggtgacactcgcatcgttgtcgtcgaccgtaactcctctctcccttctctcatcgctcgtctctccaacacgcttctcgacggtcgttccttcaccctcaagtaccagttacctagcgaagaccttgactctctcatctccgtcactaccgacgaagatctcgacaacatgatcgaagagtatgaccgtaccatttccgcttccaattccaccaaaccttcgcgtctccggttgtttctattcacctccaagcctgaggctactcaatctatgggtcagatccttgagagctctgccaagagcgacgattggttcctcaacgcactcaatagcgccggtcttctcaatcgaggattctcagattctgatactaacgtcaatcgtttacttggtttggatgatgctcttgctctccgttctaattccggtgacaacaacaatcgagatggtgatgatggctctgttaaaagcgccaagcaacagcaacctccaccgccgcagcagcaagaacaacagcaaggaggccaagatgtgaactgcttaccggattctccgatgttagatacatcctcttctttcggctccacttcttcgtctccctcgctcgccaatttgcctccgatccgtgtccatgtagaggaaccaggcggagtaaggactttgccagatcagagaaatctgggaattgaagaacagttcgcacgattcaacgtcgggaacaagcatcagctacatgacgacggatttgctgcgatctcttcaccaccgccgatgcctgtcacaatcgcccttcctgctgcgcctgtgactgcagccaccgtctctaatgagttccaggccagggtttactcagatgacgagagatccgatcacggcgtgcaggctggatacaggaagcctccgactccgcgatcgcagccgcagaatctaccgcctcagcaggctcatcagctgaaatcaaatagcggtggtggacacgagctgccatcacccaattccgtttccagtgatagcagtatgagcaacccaatgtttcaccaaagaccatctgtctatcaagaaccaattgctcagataccttctggctctaccgttgttactggtatgatcaatccctcagatccaagcacacttttgtcacagcatcagaatcaggacccagcctatatccttcacccccagtttgagcaacaatctgcacaatctcagccacagcagcagttcatacacactgctgctcctcctcaatacattcatcaccatccgtctagcggccttcctgtcccgacttacatccaggtttacccttcgcaacagcctcaacagtccttccatcaacacgcaggtcgactggatcagcagccttatcctgtttattatgtcactgctcctgtcccacctaggccctacagtatgcctgtgccacaatctccaagtgtgagcgatgctgcagggtctatcccctctaaccatcccaactctaccatgatgcctccacctcctaacaaccacatgagaagtgttagcagtggcaaacctgagatgggacaggctggggtttacacaacagccccaggtgtgggcggtgctcagatggttcaccagattcccacaaaccagcagcaattcatggggtattcgcagatccgtcaccctcctcagtctggttcagctgggaatccaaactatggatatgaatatgtcgacaatgctcatacacagatatactacactcaacctatgggacatgcacagtaccagacaatgactgggcctccacctgccatggtgatgcctgatggttctgctgctgctaagcttccagctgagaacatgactcaacagatccggagttcacagccattgtgacacacacaaggaacacatgaagatgaaccacaaaattttggaggaagaaaaccccgggttggtttttaaacgtataaatatataacttttacttcttttttcttctcttcttttacaagttgctgcatcaaaaaaagagtctggtgtcatgttaagtttggtattatgggttgtgtttaaaagtgttgtgtgagtaaattaaaaaaacaaataaatagtgcttcttggtgggattttacattatatagttgcaattgatacatgtagtgctttaccattttcctggatcttatatcatattattatcattcatttcattttgtaaatgtatcacttttttg

SEQ ID NO: 30500 - protein, 730 aa, Arabidopsis thaliana
  peptide (1)..(730): Ceres Seq. ID no. 12327660
  misc_feature (99)..(191): Pfam Name: PB1 domain Pfam Description: PB1 domain
  misc_feature (71)..(470): Homolog of NCBI NO: 15219183 NR Description: putative Ser/Thr protein kinase; protein id:
  misc_feature (80)..(189): Homolog of NCBI NO: 15222547 NR Description: hypothetical protein; protein id: At1g25300.1
  misc_feature (45)..(239): Homolog of NCBI NO: 15242462 NR Description: putative protein; protein id: At5g09620.1
  misc_feature (45)..(245): Homolog of NCBI NO: 15237703 NR Description: putative protein
  misc_feature (84)..(328): Homolog of NCBI NO: 25407315 NR Description: hypothetical protein AT4g05150 [imported] -
  misc_feature (84)..(328): Homolog of NCBI NO: 18412822 NR Description: putative protein
  misc_feature (11)..(557): Homolog of NCBI NO: 15229599 NR Description: unknown protein; protein id: At3g18230.1
  misc_feature (45)..(703): Homolog of NCBI NO: 34895646 NR Description: P0480E02.2 [Oryza sativa (japonica
  misc_feature (88)..(238): Homolog of NCBI NO: 25410886 NR Description: hypothetical protein At2g01190 [imported] -
  misc_feature (483)..(730): Homolog of NCBI NO: 25410886 NR Description: hypothetical protein At2g01190 [imported] -
IKFNLIFLLQMEPPPSSLSSTAVASTSISAATAPVPPPLPPHVTSSYPESLDSSPRSRTTDGWDDLPAPSGGGGGGGGSAVSSKLRFMCSYGGHILPRPHDKSLCYMGGDTRIVVVDRNSSLPSLIARLSNTLLDGRSFTLKYQLPSEDLDSLISVTTDEDLDNMIEEYDRTISASNSTKPSRLRLFLFTSKPEATQSMGQILESSAKSDDWFLNALNSAGLLNRGFSDSDTNVNRLLGLDDALALRSNSGDNNNRDGDDGSVKSAKQQQPPPPQQQEQQQGGQDVNCLPDSPMLDTSSSFGSTSSSPSLANLPPIRVHVEEPGGVRTLPDQRNLGIEEQFARFNVGNKHQLHDDGFAAISSPPPMPVTIALPAAPVTAATVSNEFQARVYSDDERSDHGVQAGYRKPPTPRSQPQNLPPQQAHQLKSNSGGGHELPSPNSVSSDSSMSNPMFHQRPSVYQEPIAQIPSGSTVVTGMINPSDPSTLLSQHQNQDPAYILHPQFEQQSAQSQPQQQFIHTAAPPQYIHHHPSSGLPVPTYIQVYPSQQPQQSFHQHAGRLDQQPYPVYYVTAPVPPRPYSMPVPQSPSVSDAAGSIPSNHPNSTMMPPPPNNHMRSVSSGKPEMGQAGVYTTAPGVGGAQMVHQIPTNQQQFMGYSQIRHPPQSGSAGNPNYGYEYVDNAHTQIYYTQPMGHAQYQTMTGPPPAMVMPDGSAAAKLPAENMTQQIRSSQPL

SEQ ID NO: 30501 - protein, 720 aa, Arabidopsis thaliana
  peptide (1)..(720): Ceres Seq. ID no. 12327661
  misc_feature (89)..(181): Pfam Name: PB1 domain Pfam Description: PB1 domain
  misc_feature (61)..(460): Homolog of NCBI NO: 15219183 NR Description: putative Ser/Thr protein kinase; protein id:
  misc_feature (70)..(179): Homolog of NCBI NO: 15222547 NR Description: hypothetical protein; protein id: At1g25300.1
  misc_feature (35)..(229): Homolog of NCBI NO: 15242462 NR Description: putative protein; protein id: At5g09620.1
  misc_feature (35)..(235): Homolog of NCBI NO: 15237703 NR Description: putative protein
  misc_feature (74)..(318): Homolog of NCBI NO: 25407315 NR Description: hypothetical protein AT4g05150 [imported] -
  misc_feature (74)..(318): Homolog of NCBI NO: 18412822 NR Description: putative protein
  misc_feature (1)..(547): Homolog of NCBI NO: 15229599 NR Description: unknown protein; protein id: At3g18230.1
  misc_feature (35)..(693): Homolog of NCBI NO: 34895646 NR Description: P0480E02.2 [Oryza sativa (japonica
  misc_feature (78)..(228): Homolog of NCBI NO: 25410886 NR Description: hypothetical protein At2g01190 [imported] -
  misc_feature (473)..(720): Homolog of NCBI NO: 25410886 NR Description: hypothetical protein At2g01190 [imported] -
MEPPPSSLSSTAVASTSISAATAPVPPPLPPHVTSSYPESLDSSPRSRTTDGWDDLPAPSGGGGGGGGSAVSSKLRFMCSYGGHILPRPHDKSLCYMGGDTRIVVVDRNSSLPSLIARLSNTLLDGRSFTLKYQLPSEDLDSLISVTTDEDLDNMIEEYDRTISASNSTKPSRLRLFLFTSKPEATQSMGQILESSAKSDDWFLNALNSAGLLNRGFSDSDTNVNRLLGLDDALALRSNSGDNNNRDGDDGSVKSAKQQQPPPPQQQEQQQGGQDVNCLPDSPMLDTSSSFGSTSSSPSLANLPPIRVHVEEPGGVRTLPDQRNLGIEEQFARFNVGNKHQLHDDGFAAISSPPPMPVTIALPAAPVTAATVSNEFQARVYSDDERSDHGVQAGYRKPPTPRSQPQNLPPQQAHQLKSNSGGGHELPSPNSVSSDSSMSNPMFHQRPSVYQEPIAQIPSGSTVVTGMINPSDPSTLLSQHQNQDPAYILHPQFEQQSAQSQPQQQFIHTAAPPQYIHHHPSSGLPVPTYIQVYPSQQPQQSFHQHAGRLDQQPYPVYYVTAPVPPRPYSMPVPQSPSVSDAAGSIPSNHPNSTMMPPPPNNHMRSVSSGKPEMGQAGVYTTAPGVGGAQMVHQIPTNQQQFMGYSQIRHPPQSGSAGNPNYGYEYVDNAHTQIYYTQPMGHAQYQTMTGPPPAMVMPDGSAAAKLPAENMTQQIRSSQPL

SEQ ID NO: 30502 - protein, 643 aa, Arabidopsis thaliana
  peptide (1)..(643): Ceres Seq. ID no. 12327662
  misc_feature (12)..(104): Pfam Name: PB1 domain Pfam Description: PB1 domain
  misc_feature (1)..(383): Homolog of NCBI NO: 15219183 NR Description: putative Ser/Thr protein kinase; protein id:
  misc_feature (1)..(102): Homolog of NCBI NO: 15222547 NR Description: hypothetical protein; protein id: At1g25300.1
  misc_feature (1)..(152): Homolog of NCBI NO: 15242462 NR Description: putative protein; protein id: At5g09620.1
  misc_feature (1)..(158): Homolog of NCBI NO: 15237703 NR Description: putative protein
  misc_feature (1)..(241): Homolog of NCBI NO: 25407315 NR Description: hypothetical protein AT4g05150 [imported] -
  misc_feature (1)..(241): Homolog of NCBI NO: 18412822 NR Description: putative protein
  misc_feature (1)..(470): Homolog of NCBI NO: 15229599 NR Description: unknown protein; protein id: At3g18230.1
  misc_feature (1)..(616): Homolog of NCBI NO: 34895646 NR Description: P0480E02.2 [Oryza sativa (japonica
  misc_feature (1)..(151): Homolog of NCBI NO: 25410886 NR Description: hypothetical protein At2g01190 [imported] -
  misc_feature (396)..(643): Homolog of NCBI NO: 25410886 NR Description: hypothetical protein At2g01190 [imported] -
MCSYGGHILPRPHDKSLCYMGGDTRIVVVDRNSSLPSLIARLSNTLLDGRSFTLKYQLPSEDLDSLISVTTDEDLDNMIEEYDRTISASNSTKPSRLRLFLFTSKPEATQSMGQILESSAKSDDWFLNALNSAGLLNRGFSDSDTNVNRLLGLDDALALRSNSGDNNNRDGDDGSVKSAKQQQPPPPQQQEQQQGGQDVNCLPDSPMLDTSSSFGSTSSSPSLANLPPIRVHVEEPGGVRTLPDQRNLGIEEQFARFNVGNKHQLHDDGFAAISSPPPMPVTIALPAAPVTAATVSNEFQARVYSDDERSDHGVQAGYRKPPTPRSQPQNLPPQQAHQLKSNSGGGHELPSPNSVSSDSSMSNPMFHQRPSVYQEPIAQIPSGSTVVTGMINPSDPSTLLSQHQNQDPAYILHPQFEQQSAQSQPQQQFIHTAAPPQYIHHHPSSGLPVPTYIQVYPSQQPQQSFHQHAGRLDQQPYPVYYVTAPVPPRPYSMPVPQSPSVSDAAGSIPSNHPNSTMMPPPPNNHMRSVSSGKPEMGQAGVYTTAPGVGGAQMVHQIPTNQQQFMGYSQIRHPPQSGSAGNPNYGYEYVDNAHTQIYYTQPMGHAQYQTMTGPPPAMVMPDGSAAAKLPAENMTQQIRSSQPL

SEQ ID NO: 30503 - DNA, 940 bp, Arabidopsis thaliana
  misc_feature (1)..(940): Ceres Seq. ID no. 12385730
  misc_feature: MA Experiment ID: 108469 Result: Up-regulated in Transcription
  misc_feature: MA Experiment ID: 108573 Result: Up-regulated in Transcription
  misc_feature: MA Experiment 108573 PARAMETER Experiment Name: At_Drought_cDNA_P Parameter: Timepoint (hr) Value: 6
  misc_feature: MA Experiment 108573 PARAMETER Experiment Name: At_Drought_cDNA_P Parameter: Tissue Value: Aerial
  misc_feature: MA Experiment 108573 PARAMETER Experiment Name: At_Drought_cDNA_P Parameter: Treatment Value: Drought vs. No Drought
  misc_feature: MA Experiment ID: 108585 Result: Up-regulated in Transcription
  misc_feature: MA Experiment 108585 PARAMETER Experiment Name: At_5mM_NaNP_cDNA_P Parameter: Timepoint (hr) Value: 6
  misc_feature: MA Experiment 108585 PARAMETER Experiment Name: At_5mM_NaNP_cDNA_P Parameter: Tissue Value: Aerial
  misc_feature: MA Experiment 108585 PARAMETER Experiment Name: At_5mM_NaNP_cDNA_P Parameter: Treatment Value: null
actctcaacaactacttgtttagagagagtcccaccaccaccactaccacaatcccaatggcttcaccaactcttactctcctcctcctcctcaccaccgtctccttcttcatctcctcctccgcagatcctgacatgcttcaagatctctgcgtcgctgatcttccctctggaatcaaaatcaatggcttcccttgcaaagacgcagctacagtcacatcagccgatttcttctcacaaggattagctaaaccaggtcttaccaacaacacattcggtgccttagtcacaggagctaacgttatgacaatcccaggactcaacacacttggtgtctccctctctcgtatcgactacgcaccaggaggcttaaacccacctcacacccacccacgtgccactgaggtcgttttcgtcctcgaaggaacacttgacgttgggtttctcactactgccaataagctaatctctcaatctctcaagaaaggagatgtctttgctttccccaaaggacttgtccatttccagaagaacaatggtgatgtccctgcttctgttattgcagctttcaatagtcagcttcctggaactcaatctcttggtgctactttgtttggttctactcctcctgttcctgacaacatcttggctcaagcctttcagacttctccaggaactgttaaacacatcaaatccaagttccaacccaagaaatgatcatcacccttcctttatattcattactacagttctgtttttttctaaagggaagatctttttatcttctttgatttgtcttctgtaataaaaaaggaacaataactgatgatcttcagtgtgcatttgagctccatagtctcatgtattcgtcttcttgtataatccatattattttttgttcaaagttgactaaagacaggtaagaagtcgaggttgatct

SEQ ID NO: 30504 - protein, 238 aa, Arabidopsis thaliana
  peptide (1)..(238): Ceres Seq. ID no. 12385731
  misc_feature (80)..(206): Pfam Name: Cupin Pfam Description: Cupin
  misc_feature (25)..(238): Homolog of NCBI NO: 18203447 NR Description: Nectarin 1 precursor (Superoxide dismutase [Mn])
  misc_feature (26)..(238): Homolog of NCBI NO: 34904670 NR Description: putative germin protein [Oryza sativa (japonica
  misc_feature (43)..(238): Homolog of NCBI NO: 15228673 NR Description: germin-like protein (GLP10); protein id:
  misc_feature (43)..(238): Homolog of NCBI NO: 1934730 NR Description: germin-like protein [Arabidopsis thaliana]
  misc_feature (27)..(238): Homolog of NCBI NO: 27805638 NR Description: Nectarin 1 precursor (Superoxide dismutase [Mn])
  misc_feature (25)..(238): Homolog of NCBI NO: 18203442 NR Description: Rhicadhesin receptor precursor (Germin-like
  misc_feature (34)..(206): Homolog of NCBI NO: 1755176 NR Description: germin-like protein [Arabidopsis thaliana]
  misc_feature (20)..(206): Homolog of NCBI NO: 1755160 NR Description: germin-like protein [Arabidopsis thaliana]
  misc_feature (20)..(206): Homolog of NCBI NO: 18202459 NR Description: Germin-like protein subfamily 2 member 1
  misc_feature (20)..(238): Homolog of NCBI NO: 15217561 NR Description: germin-like protein
TLNNYLFRESPTTTTTTIPMASPTLTLLLLLTTVSFFISSSADPDMLQDLCVADLPSGIKINGFPCKDAATVTSADFFSQGLAKPGLTNNTFGALVTGANVMTIPGLNTLGVSLSRIDYAPGGLNPPHTHPRATEVVFVLEGTLDVGFLTTANKLISQSLKKGDVFAFPKGLVHFQKNNGDVPASVIAAFNSQLPGTQSLGATLFGSTPPVPDNILAQAFQTSPGTVKHIKSKFQPKK

SEQ ID NO: 30505 - protein, 219 aa, Arabidopsis thaliana
  peptide (1)..(219): Ceres Seq. ID no. 12385732
  misc_feature (61)..(187): Pfam Name: Cupin Pfam Description: Cupin
  misc_feature (6)..(219): Homolog of NCBI NO: 18203447 NR Description: Nectarin 1 precursor (Superoxide dismutase [Mn])
  misc_feature (7)..(219): Homolog of NCBI NO: 34904670 NR Description: putative germin protein [Oryza sativa (japonica
  misc_feature (24)..(219): Homolog of NCBI NO: 15228673 NR Description: germin-like protein (GLP10); protein id:
  misc_feature (24)..(219): Homolog of NCBI NO: 1934730 NR Description: germin-like protein [Arabidopsis thaliana]
  misc_feature (8)..(219): Homolog of NCBI NO: 27805638 NR Description: Nectarin 1 precursor (Superoxide dismutase [Mn])
  misc_feature (6)..(219): Homolog of NCBI NO: 18203442 NR Description: Rhicadhesin receptor precursor (Germin-like
  misc_feature (15)..(187): Homolog of NCBI NO: 1755176 NR Description: germin-like protein [Arabidopsis thaliana]
  misc_feature (1)..(187): Homolog of NCBI NO: 1755160 NR Description: germin-like protein [Arabidopsis thaliana]
  misc_feature (1)..(187): Homolog of NCBI NO: 18202459 NR Description: Germin-like protein subfamily 2 member 1
  misc_feature (1)..(219): Homolog of NCBI NO: 15217561 NR Description: germin-like protein
MASPTLTLLLLLTTVSFFISSSADPDMLQDLCVADLPSGIKINGFPCKDAATVTSADFFSQGLAKPGLTNNTFGALVTGANVMTIPGLNTLGVSLSRIDYAPGGLNPPHTHPRATEVVFVLEGTLDVGFLTTANKLISQSLKKGDVFAFPKGLVHFQKNNGDVPASVIAAFNSQLPGTQSLGATLFGSTPPVPDNILAQAFQTSPGTVKHIKSKFQPKK

SEQ ID NO: 30506 - protein, 193 aa, Arabidopsis thaliana
  peptide (1)..(193): Ceres Seq. ID no. 12385733
  misc_feature (35)..(161): Pfam Name: Cupin Pfam Description: Cupin
  misc_feature (1)..(193): Homolog of NCBI NO: 18203447 NR Description: Nectarin 1 precursor (Superoxide dismutase [Mn])
  misc_feature (1)..(193): Homolog of NCBI NO: 34904670 NR Description: putative germin protein [Oryza sativa (japonica
  misc_feature (1)..(193): Homolog of NCBI NO: 15228673 NR Description: germin-like protein (GLP10); protein id:
  misc_feature (1)..(193): Homolog of NCBI NO: 1934730 NR Description: germin-like protein [Arabidopsis thaliana]
  misc_feature (1)..(193): Homolog of NCBI NO: 27805638 NR Description: Nectarin 1 precursor (Superoxide dismutase [Mn])
  misc_feature (1)..(193): Homolog of NCBI NO: 18203442 NR Description: Rhicadhesin receptor precursor (Germin-like
  misc_feature (1)..(161): Homolog of NCBI NO: 1755176 NR Description: germin-like protein [Arabidopsis thaliana]
  misc_feature (1)..(161): Homolog of NCBI NO: 1755160 NR Description: germin-like protein [Arabidopsis thaliana]
  misc_feature (1)..(161): Homolog of NCBI NO: 18202459 NR Description: Germin-like protein subfamily 2 member 1
  misc_feature (1)..(193): Homolog of NCBI NO: 15217561 NR Description: germin-like protein
MLQDLCVADLPSGIKINGFPCKDAATVTSADFFSQGLAKPGLTNNTFGALVTGANVMTIPGLNTLGVSLSRIDYAPGGLNPPHTHPRATEVVFVLEGTLDVGFLTTANKLISQSLKKGDVFAFPKGLVHFQKNNGDVPASVIAAFNSQLPGTQSLGATLFGSTPPVPDNILAQAFQTSPGTVKHIKSKFQPKK

SEQ ID NO: 30507 - DNA, 735 bp, Arabidopsis thaliana
  misc_feature (1)..(735): Ceres Seq. ID no. 13489816
  misc_feature: MA Experiment ID: 108433 Result: Up-regulated in Transcription
  misc_feature: MA Experiment 108433 PARAMETER Experiment Name: At_rhl_Mutant2_cDNA_P Parameter: Age (day) Value: 7
  misc_feature: MA Experiment 108433 PARAMETER Experiment Name: At_rhl_Mutant2_cDNA_P Parameter: Organism Value: A. thaliana
  misc_feature: MA Experiment 108433 PARAMETER Experiment Name: At_rhl_Mutant2_cDNA_P Parameter: Plant Line Value: rhl Mutant vs. wt landsburg
  misc_feature: MA Experiment 108433 PARAMETER Experiment Name: At_rhl_Mutant2_cDNA_P Parameter: Tissue Value: Roots
  misc_feature: MA Experiment ID: 108573 Result: Down-regulated in Transcription
  misc_feature: MA Experiment 108573 PARAMETER Experiment Name: At_Drought_cDNA_P Parameter: Timepoint (hr) Value: 6
  misc_feature: MA Experiment 108573 PARAMETER Experiment Name: At_Drought_cDNA_P Parameter: Tissue Value: Aerial
  misc_feature: MA Experiment 108573 PARAMETER Experiment Name: At_Drought_cDNA_P Parameter: Treatment Value: Drought vs. No Drought
  misc_feature: MA Experiment ID: 108585 Result: Down-regulated in Transcription
  misc_feature: MA Experiment 108585 PARAMETER Experiment Name: At_5mM_NaNP_cDNA_P Parameter: Timepoint (hr) Value: 6
  misc_feature: MA Experiment 108585 PARAMETER Experiment Name: At_5mM_NaNP_cDNA_P Parameter: Tissue Value: Aerial
  misc_feature: MA Experiment 108585 PARAMETER Experiment Name: At_5mM_NaNP_cDNA_P Parameter: Treatment Value: null
  misc_feature: MA Experiment ID: 108595 Result: Down-regulated in Transcription
  misc_feature: MA Experiment 108595 PARAMETER Experiment Name: At_Ler-pi_Ovule_cDNA_P Parameter: Plant Line Value: null
  misc_feature: MA Experiment ID: 20000113 Result: Up-regulated in Transcription
  misc_feature: MA Experiment 20000113 PARAMETER Experiment Name: At_42deg_Heat_cDNA_P Parameter: Temperature (deg C) Value: 42 vs. 22
  misc_feature: MA Experiment 20000113 PARAMETER Experiment Name: At_42deg_Heat_cDNA_P Parameter: Timepoint (hr) Value: 8
  misc_feature: MA Experiment 20000113 PARAMETER Experiment Name: At_42deg_Heat_cDNA_P Parameter: Tissue Value: Aerial
  misc_feature: MA Experiment ID: 20000184 Result: Down-regulated in Transcription
  misc_feature: MA Experiment 20000184 PARAMETER Experiment Name: At_Shoots__P Parameter: Age (day) Value: 7
  misc_feature: MA Experiment 20000184 PARAMETER Experiment Name: At_Shoots__P Parameter: Tissue Value: Shoots vs. Whole Plant
  misc_feature: MA Experiment ID: 20000185 Result: Down-regulated in Transcription
  misc_feature: MA Experiment 20000185 PARAMETER Experiment Name: At_Roots__P Parameter: Age (day) Value: 7 vs. 21
  misc_feature: MA Experiment 20000185 PARAMETER Experiment Name: At_Roots__P Parameter: Organism Value: A. thaliana
  misc_feature: MA Experiment 20000185 PARAMETER Experiment Name: At_Roots__P Parameter: Tissue Value: Roots vs. Whole Plant
  misc_feature: MA Experiment ID: 20000439 Result: Down-regulated in Transcription
  misc_feature: MA Experiment 20000439 PARAMETER Experiment Name: At_Roots__P Parameter: Age (day) Value: 14 vs. 21
  misc_feature: MA Experiment 20000439 PARAMETER Experiment Name: At_Roots__P Parameter: Organism Value: A. thaliana
  misc_feature: MA Experiment 20000439 PARAMETER Experiment Name: At_Roots__P Parameter: Tissue Value: Roots vs. Whole Plant
  misc_feature: MA Experiment ID: 20001557 Result: Down-regulated in Transcription
  misc_feature: MA Experiment 20001557 PARAMETER Experiment Name: At_Drought_Soil_Dry_P Parameter: Age (day) Value: 27
  misc_feature: MA Experiment 20001557 PARAMETER Experiment Name: At_Drought_Soil_Dry_P Parameter: Organism Value: A. thaliana
  misc_feature: MA Experiment 20001557 PARAMETER Experiment Name: At_Drought_Soil_Dry_P Parameter: Plant Line Value: WS
  misc_feature: MA Experiment 20001557 PARAMETER Experiment Name: At_Drought_Soil_Dry_P Parameter: Post Timepoint (hr) Value: 3
  misc_feature: MA Experiment 20001557 PARAMETER Experiment Name: At_Drought_Soil_Dry_P Parameter: Post-Treatment Value: Re-Water vs. No Drought
  misc_feature: MA Experiment 20001557 PARAMETER Experiment Name: At_Drought_Soil_Dry_P Parameter: Timepoint (day) Value: 13
  misc_feature: MA Experiment 20001557 PARAMETER Experiment Name: At_Drought_Soil_Dry_P Parameter: Treatment Value: Drought vs. No Drought
ggtttcagttcagagtaagagagacagagagagagatgagtagcttcacgattccatctccttcctccttctctctttccaattcatataatcaaacctctcctcattccttcactctccgcaattctcgttccaattttgagttccaccggttacgattagatgtggagtctcgaagaagaagcacttctttacggtccaattgctccaccaaaggtacagattcaggtgaaaatgagaacaaaagtgtgttagatgctttctttttggggaaagcattagctgaggttatcaatgagagaattgagtctactgttggagaagtgttgagtactattggaaagtttcaagctgagcaacagaaacaagttcaagagattcaggaagaggttcttgaaagagctaagaaagctaaggaaagagcagctcgagaaactatggaggaacaaggacttgttgcttccaaaccagtagccattactcgaaatccggatgctgttgttgttgcctctgtaacttctacatcgaccgttgagagcaagactataatggttgatgtagaggaaagctcgagttccagtgatgaagactgaacgatggtttcaagggtttaagttgaagatttggtaatagcagcagagacttgtctaaaagggttaagatatatgtacttgaaaaaacgatgtaaacaatgtaagttgatataaatcaaggttaaaccagcattgatacatg

SEQ ID NO: 30508 - protein, 196 aa, Arabidopsis thaliana
  peptide (1)..(196): Ceres Seq. ID no. 13489817
  misc_feature (83)..(173): Homolog of NCBI NO: 16330265 NR Description: unknown protein [Synechocystis sp. PCC 6803]
  misc_feature (83)..(150): Homolog of NCBI NO: 17232006 NR Description: hypothetical protein [Nostoc sp. PCC 7120]
  misc_feature (83)..(141): Homolog of NCBI NO: 23130619 NR Description: hypothetical protein [Nostoc punctiforme]
  misc_feature (12)..(196): Homolog of NCBI NO: 21553912 NR Description: unknown [Arabidopsis thaliana]
  misc_feature (12)..(196): Homolog of NCBI NO: 15235625 NR Description: expressed protein [Arabidopsis thaliana]
FQFRVRETEREMSSFTIPSPSSFSLSNSYNQTSPHSFTLRNSRSNFEFHRLRLDVESRRRSTSLRSNCSTKGTDSGENENKSVLDAFFLGKALAEVINERIESTVGEVLSTIGKFQAEQQKQVQEIQEEVLERAKKAKERAARETMEEQGLVASKPVAITRNPDAVVVASVTSTSTVESKTIMVDVEESSSSSDED

SEQ ID NO: 30509 - protein, 185 aa, Arabidopsis thaliana
  peptide (1)..(185): Ceres Seq. ID no. 13489818
  misc_feature (72)..(162): Homolog of NCBI NO: 16330265 NR Description: unknown protein [Synechocystis sp. PCC 6803]
  misc_feature (72)..(139): Homolog of NCBI NO: 17232006 NR Description: hypothetical protein [Nostoc sp. PCC 7120]
  misc_feature (72)..(130): Homolog of NCBI NO: 23130619 NR Description: hypothetical protein [Nostoc punctiforme]
  misc_feature (1)..(185): Homolog of NCBI NO: 21553912 NR Description: unknown [Arabidopsis thaliana]
  misc_feature (1)..(185): Homolog of NCBI NO: 15235625 NR Description: expressed protein [Arabidopsis thaliana]
MSSFTIPSPSSFSLSNSYNQTSPHSFTLRNSRSNFEFHRLRLDVESRRRSTSLRSNCSTKGTDSGENENKSVLDAFFLGKALAEVINERIESTVGEVLSTIGKFQAEQQKQVQEIQEEVLERAKKAKERAARETMEEQGLVASKPVAITRNPDAVVVASVTSTSTVESKTIMVDVEESSSSSDED

SEQ ID NO: 30510 - DNA, 713 bp, Arabidopsis thaliana
  misc_feature (1)..(713): Ceres Seq. ID no. 12562391
  misc_feature: MA Experiment ID: 108462 Result: Down-regulated in Transcription
  misc_feature: MA Experiment 108462 PARAMETER Experiment Name: At_Germinating_Seeds_cDNA_P Parameter: Age (day) Value: 2 vs. 0
  misc_feature: MA Experiment 108462 PARAMETER Experiment Name: At_Germinating_Seeds_cDNA_P Parameter: Tissue Value: Germinating Seeds
  misc_feature: MA Experiment ID: 108569 Result: Down-regulated in Transcription
  misc_feature: MA Experiment 108569 PARAMETER Experiment Name: At_0.001%_MeJA__cDNA_P Parameter: Timepoint (hr) Value: 6
  misc_feature: MA Experiment 108569 PARAMETER Experiment Name: At_0.001%_MeJA__cDNA_P Parameter: Tissue Value: Aerial
  misc_feature: MA Experiment 108569 PARAMETER Experiment Name: At_0.001%_MeJA__cDNA_P Parameter: Treatment Value: 0.001% MeJA vs. No Treatment
  misc_feature: MA Experiment ID: 20000113 Result: Down-regulated in Transcription
  misc_feature: MA Experiment 20000113 PARAMETER Experiment Name: At_42deg_Heat_cDNA_P Parameter: Temperature (deg C) Value: 42 vs. 22
  misc_feature: MA Experiment 20000113 PARAMETER Experiment Name: At_42deg_Heat_cDNA_P Parameter: Timepoint (hr) Value: 8
  misc_feature: MA Experiment 20000113 PARAMETER Experiment Name: At_42deg_Heat_cDNA_P Parameter: Tissue Value: Aerial
gagaaaccgggtcatgaaacggatattgcgggttcaagacgaacccatctgaaaaaatcattcaaatccactcttcgacatcttctcactgcttgctccaaacaggattttgttgacattttctcgaaattcagtggggctgagcaagaactgctttttcagttgtatactcgggttgttgtgaatttgcatcagacaatagaggaagagtttgatgaacaatgtcacgaaactcaggtcggaccaattcttgatacagttgaggagctggtcgaagaacagagtttggatcccttgttttcagataagactgatgtaatggcgatagcaaatgatcttacaacagcgaagaagaacgagatacaaaagttaacaattttgctccaaagggctgaagaacagaatcgccagaaggaagcccggatcagcctgctcaaaaaacaaacacaagatctctcaggcacagctgacagaatcgaaaaggtgaaagccggggtctcgggctactttgaaggaaaagacaagctacctccaatatagtttcgagaaaattgcaatgaagaagcgtgtcatttccattccctgcatttgtatatagtttaatatagagtcttaacaagctagtcacaactagtacttgcttcttgtgtaaaccactgagaatcttggttaaatcgcttttatgcattaagttccagttaagtggttgaatt

SEQ ID NO: 30511 - protein, 179 aa, Arabidopsis thaliana
  peptide (1)..(179): Ceres Seq. ID no. 12562392
  misc_feature (1)..(162): Homolog of NCBI NO: 7487713 NR Description: hypothetical protein T5K18.130 - Arabidopsis
  misc_feature (10)..(172): Homolog of NCBI NO: 34905298 NR Description: P0577B11.20 [Oryza sativa (japonica
  misc_feature (44)..(179): Homolog of NCBI NO: 7487713 NR Description: hypothetical protein T5K18.130 - Arabidopsis
  misc_feature (1)..(179): Homolog of NCBI NO: 18415295 NR Description: putative protein
EKPGHETDIAGSRRTHLKKSFKSTLRHLLTACSKQDFVDIFSKFSGAEQELLFQLYTRVVVNLHQTIEEEFDEQCHETQVGPILDTVEELVEEQSLDPLFSDKTDVMAIANDLTTAKKNEIQKLTILLQRAEEQNRQKEARISLLKKQTQDLSGTADRIEKVKAGVSGYFEGKDKLPPI

SEQ ID NO: 30512 - DNA, 645 bp, Arabidopsis thaliana
  misc_feature (1)..(645): Ceres Seq. ID no. 12333415
  misc_feature: MA Experiment ID: 108434 Result: Up-regulated in Transcription
  misc_feature: MA Experiment 108434 PARAMETER Experiment Name: At_Root_Tips_cDNA_P Parameter: Tissue Value: Root Tips
  misc_feature: MA Experiment ID: 108462 Result: Down-regulated in Transcription
  misc_feature: MA Experiment 108462 PARAMETER Experiment Name: At_Germinating_Seeds_cDNA_P Parameter: Age (day) Value: 2 vs. 0
  misc_feature: MA Experiment 108462 PARAMETER Experiment Name: At_Germinating_Seeds_cDNA_P Parameter: Tissue Value: Germinating Seeds
  misc_feature: MA Experiment ID: 108463 Result: Down-regulated in Transcription
  misc_feature: MA Experiment 108463 PARAMETER Experiment Name: At_Germinating_Seeds_cDNA_P Parameter: Age (day) Value: 3 vs. 0
  misc_feature: MA Experiment 108463 PARAMETER Experiment Name: At_Germinating_Seeds_cDNA_P Parameter: Tissue Value: Germinating Seeds
  misc_feature: MA Experiment ID: 108464 Result: Down-regulated in Transcription
  misc_feature: MA Experiment 108464 PARAMETER Experiment Name: At_Germinating_Seeds_cDNA_P Parameter: Age (day) Value: 4 vs. 0
  misc_feature: MA Experiment 108464 PARAMETER Experiment Name: At_Germinating_Seeds_cDNA_P Parameter: Tissue Value: Germinating Seeds
  misc_feature: MA Experiment ID: 108573 Result: Down-regulated in Transcription
  misc_feature: MA Experiment 108573 PARAMETER Experiment Name: At_Drought_cDNA_P Parameter: Timepoint (hr) Value: 6
  misc_feature: MA Experiment 108573 PARAMETER Experiment Name: At_Drought_cDNA_P Parameter: Tissue Value: Aerial
  misc_feature: MA Experiment 108573 PARAMETER Experiment Name: At_Drought_cDNA_P Parameter: Treatment Value: Drought vs. No Drought
  misc_feature: MA Experiment ID: 20001911 Result: Down-regulated in Transcription
  misc_feature: MA Experiment 20001911 PARAMETER Experiment Name: At_Drought_Reproduction_P Parameter: Age (day) Value: 40
  misc_feature: MA Experiment 20001911 PARAMETER Experiment Name: At_Drought_Reproduction_P Parameter: Organism Value: A. thaliana
  misc_feature: MA Experiment 20001911 PARAMETER Experiment Name: At_Drought_Reproduction_P Parameter: Plant Line Value: WS
  misc_feature: MA Experiment 20001911 PARAMETER Experiment Name: At_Drought_Reproduction_P Parameter: Timepoint (day) Value: 10
  misc_feature: MA Experiment 20001911 PARAMETER Experiment Name: At_Drought_Reproduction_P Parameter: Tissue Value: Flowers
  misc_feature: MA Experiment 20001911 PARAMETER Experiment Name: At_Drought_Reproduction_P Parameter: Treatment Value: Drought vs. No Drought
gatttgtgtagtatcgtcgggattttttgaccggagaaatggggaggaggattttgaacgatgcgttgaggacgattgtgaatgctgagagacgaggaaaagcttcggtggagctcaaaccaatctccaccgttatgtcttcgttcttgagaatcatgaaggagaaaggttatatcaagaactttcaagtgtatgatccacatagagttgggagaataacagttgatctgcaagggagggttaatgactgcaaagctcttacctacaggcaagacgttagggcaaaagagattgagaaatacactgaacgcacacttccaacacgtcagtggggttatgttgtaatcacaactccggatgggattttggaccatgaagaagcaatcaaacggaatgtgggtggtcaggttcttggcttcttttactgaatagcttgagctagcacatggcaagaaccttctagtgtcaaaggattcaacaaaagattgaagtttcggtccttctcctgttgctttttgttttttgtaacttgcattgtctttgaacagattggcaattattagataacacatttgttgctaaattcaaagatcttgttgttagtttatattttggacgagaaatttgttcttccatagctatctg

SEQ ID NO: 30513 - protein, 129 aa, Arabidopsis thaliana
  peptide (1)..(129): Ceres Seq. ID no. 12333416
  misc_feature (6)..(129): Pfam Name: Ribosomal protein S8 Pfam Description: Ribosomal protein S8
  misc_feature (5)..(129): Homolog of NCBI NO: 2130985 NR Description: r-protein BnS15a [Brassica napus]
  misc_feature (5)..(129): Homolog of NCBI NO: 15231316 NR Description: cytoplasmic ribosomal protein S15a -like
  misc_feature (5)..(129): Homolog of NCBI NO: 15225502 NR Description: 40S ribosomal protein S15A; protein id:
  misc_feature (5)..(129): Homolog of NCBI NO: 6683481 NR Description: wrp15a [Citrullus lanatus]
  misc_feature (5)..(129): Homolog of NCBI NO: 15223001 NR Description: ribosomal protein S15
  misc_feature (5)..(129): Homolog of NCBI NO: 133793 NR Description: 40S RIBOSOMAL PROTEIN S15A (PPCB8)
  misc_feature (5)..(129): Homolog of NCBI NO: 13560779 NR Description: cytoplasmic ribosomal protein S15a [Daucus carota]
  misc_feature (5)..(129): Homolog of NCBI NO: 28411802 NR Description: ribosomal protein S15 [Oryza sativa (japonica
  misc_feature (1)..(129): Homolog of NCBI NO: 15224834 NR Description: 40S ribosomal protein S15A; protein id:
  misc_feature (1)..(129): Homolog of NCBI NO: 15233571 NR Description: ribosomal protein S15a homolog
MGRRILNDALRTIVNAERRGKASVELKPISTVMSSFLRIMKEKGYIKNFQVYDPHRVGRITVDLQGRVNDCKALTYRQDVRAKEIEKYTERTLPTRQWGYVVITTPDGILDHEEAIKRNVGGQVLGFFY

SEQ ID NO: 30514 - protein, 97 aa, Arabidopsis thaliana
  peptide (1)..(97): Ceres Seq. ID no. 12333417
  misc_feature (1)..(97): Pfam Name: Ribosomal protein S8 Pfam Description: Ribosomal protein S8
  misc_feature (1)..(97): Homolog of NCBI NO: 2130985 NR Description: r-protein BnS15a [Brassica napus]
  misc_feature (1)..(97): Homolog of NCBI NO: 15231316 NR Description: cytoplasmic ribosomal protein S15a -like
  misc_feature (1)..(97): Homolog of NCBI NO: 15225502 NR Description: 40S ribosomal protein S15A; protein id:
  misc_feature (1)..(97): Homolog of NCBI NO: 6683481 NR Description: wrp15a [Citrullus lanatus]
  misc_feature (1)..(97): Homolog of NCBI NO: 15223001 NR Description: ribosomal protein S15
  misc_feature (1)..(97): Homolog of NCBI NO: 133793 NR Description: 40S RIBOSOMAL PROTEIN S15A (PPCB8)
  misc_feature (1)..(97): Homolog of NCBI NO: 13560779 NR Description: cytoplasmic ribosomal protein S15a [Daucus carota]
  misc_feature (1)..(97): Homolog of NCBI NO: 28411802 NR Description: ribosomal protein S15 [Oryza sativa (japonica
  misc_feature (1)..(97): Homolog of NCBI NO: 15224834 NR Description: 40S ribosomal protein S15A; protein id:
  misc_feature (1)..(97): Homolog of NCBI NO: 15233571 NR Description: ribosomal protein S15a homolog
MSSFLRIMKEKGYIKNFQVYDPHRVGRITVDLQGRVNDCKALTYRQDVRAKEIEKYTERTLPTRQWGYVVITTPDGILDHEEAIKRNVGGQVLGFFY

SEQ ID NO: 30515 - protein, 90 aa, Arabidopsis thaliana
  peptide (1)..(90): Ceres Seq. ID no. 12333418
  misc_feature (1)..(90): Pfam Name: Ribosomal protein S8 Pfam Description: Ribosomal protein S8
  misc_feature (1)..(90): Homolog of NCBI NO: 2130985 NR Description: r-protein BnS15a [Brassica napus]
  misc_feature (1)..(90): Homolog of NCBI NO: 15231316 NR Description: cytoplasmic ribosomal protein S15a -like
  misc_feature (1)..(90): Homolog of NCBI NO: 15225502 NR Description: 40S ribosomal protein S15A; protein id:
  misc_feature (1)..(90): Homolog of NCBI NO: 6683481 NR Description: wrp15a [Citrullus lanatus]
  misc_feature (1)..(90): Homolog of NCBI NO: 15223001 NR Description: ribosomal protein S15
  misc_feature (1)..(90): Homolog of NCBI NO: 133793 NR Description: 40S RIBOSOMAL PROTEIN S15A (PPCB8)
  misc_feature (1)..(90): Homolog of NCBI NO: 13560779 NR Description: cytoplasmic ribosomal protein S15a [Daucus carota]
  misc_feature (1)..(90): Homolog of NCBI NO: 28411802 NR Description: ribosomal protein S15 [Oryza sativa (japonica
  misc_feature (1)..(90): Homolog of NCBI NO: 15224834 NR Description: 40S ribosomal protein S15A; protein id:
  misc_feature (1)..(90): Homolog of NCBI NO: 15233571 NR Description: ribosomal protein S15a homolog
MKEKGYIKNFQVYDPHRVGRITVDLQGRVNDCKALTYRQDVRAKEIEKYTERTLPTRQWGYVVITTPDGILDHEEAIKRNVGGQVLGFFY

SEQ ID NO: 30516 - DNA, 903 bp, Arabidopsis thaliana
  misc_feature (1)..(903): Ceres Seq. ID no. 12422995
  misc_feature: MA Experiment ID: 108434 Result: Up-regulated in Transcription
  misc_feature: MA Experiment 108434 PARAMETER Experiment Name: At_Root_Tips_cDNA_P Parameter: Tissue Value: Root Tips
  misc_feature: MA Experiment ID: 108461 Result: Down-regulated in Transcription
  misc_feature: MA Experiment 108461 PARAMETER Experiment Name: At_Germinating_Seeds_cDNA_P Parameter: Age (day) Value: 1 vs. 0
  misc_feature: MA Experiment 108461 PARAMETER Experiment Name: At_Germinating_Seeds_cDNA_P Parameter: Tissue Value: Germinating Seeds
  misc_feature: MA Experiment ID: 108462 Result: Down-regulated in Transcription
  misc_feature: MA Experiment 108462 PARAMETER Experiment Name: At_Germinating_Seeds_cDNA_P Parameter: Age (day) Value: 2 vs. 0
  misc_feature: MA Experiment 108462 PARAMETER Experiment Name: At_Germinating_Seeds_cDNA_P Parameter: Tissue Value: Germinating Seeds
  misc_feature: MA Experiment ID: 108463 Result: Down-regulated in Transcription
  misc_feature: MA Experiment 108463 PARAMETER Experiment Name: At_Germinating_Seeds_cDNA_P Parameter: Age (day) Value: 3 vs. 0
  misc_feature: MA Experiment 108463 PARAMETER Experiment Name: At_Germinating_Seeds_cDNA_P Parameter: Tissue Value: Germinating Seeds
  misc_feature: MA Experiment ID: 108464 Result: Down-regulated in Transcription
  misc_feature: MA Experiment 108464 PARAMETER Experiment Name: At_Germinating_Seeds_cDNA_P Parameter: Age (day) Value: 4 vs. 0
  misc_feature: MA Experiment 108464 PARAMETER Experiment Name: At_Germinating_Seeds_cDNA_P Parameter: Tissue Value: Germinating Seeds
  misc_feature: MA Experiment ID: 108572 Result: Down-regulated in Transcription
  misc_feature: MA Experiment 108572 PARAMETER Experiment Name: At_Drought_cDNA_P Parameter: Timepoint (hr) Value: 1
  misc_feature: MA Experiment 108572 PARAMETER Experiment Name: At_Drought_cDNA_P Parameter: Tissue Value: Aerial
  misc_feature: MA Experiment 108572 PARAMETER Experiment Name: At_Drought_cDNA_P Parameter: Treatment Value: Drought vs. No Drought
  misc_feature: MA Experiment ID: 108573 Result: Down-regulated in Transcription
  misc_feature: MA Experiment 108573 PARAMETER Experiment Name: At_Drought_cDNA_P Parameter: Timepoint (hr) Value: 6
  misc_feature: MA Experiment 108573 PARAMETER Experiment Name: At_Drought_cDNA_P Parameter: Tissue Value: Aerial
  misc_feature: MA Experiment 108573 PARAMETER Experiment Name: At_Drought_cDNA_P Parameter: Treatment Value: Drought vs. No Drought
  misc_feature: MA Experiment ID: 108585 Result: Down-regulated in Transcription
  misc_feature: MA Experiment 108585 PARAMETER Experiment Name: At_5mM_NaNP_cDNA_P Parameter: Timepoint (hr) Value: 6
  misc_feature: MA Experiment 108585 PARAMETER Experiment Name: At_5mM_NaNP_cDNA_P Parameter: Tissue Value: Aerial
  misc_feature: MA Experiment 108585 PARAMETER Experiment Name: At_5mM_NaNP_cDNA_P Parameter: Treatment Value: null
  misc_feature: MA Experiment ID: 108609 Result: Down-regulated in Transcription
  misc_feature: MA Experiment 108609 PARAMETER Experiment Name: At_100uM_ABA_cDNA_P Parameter: Timepoint (hr) Value: 24
  misc_feature: MA Experiment 108609 PARAMETER Experiment Name: At_100uM_ABA_cDNA_P Parameter: Tissue Value: Aerial
  misc_feature: MA Experiment 108609 PARAMETER Experiment Name: At_100uM_ABA_cDNA_P Parameter: Treatment Value: 100uM ABA vs. No Treatment
  misc_feature: MA Experiment ID: 20000112 Result: Down-regulated in Transcription
  misc_feature: MA Experiment 20000112 PARAMETER Experiment Name: At_42deg_Heat_cDNA_P Parameter: Temperature (deg C) Value: 42 vs. 22
  misc_feature: MA Experiment 20000112 PARAMETER Experiment Name: At_42deg_Heat_cDNA_P Parameter: Timepoint (hr) Value: 2
  misc_feature: MA Experiment 20000112 PARAMETER Experiment Name: At_42deg_Heat_cDNA_P Parameter: Tissue Value: Aerial
  misc_feature: MA Experiment ID: 20000224 Result: Up-regulated in Transcription
  misc_feature: MA Experiment ID: 20000235 Result: Up-regulated in Transcription
  misc_feature: MA Experiment 20000235 PARAMETER Experiment Name: At_Siliques_P Parameter: Age (day) Value: 21
  misc_feature: MA Experiment 20000235 PARAMETER Experiment Name: At_Siliques_P Parameter: Organism Value: A. thaliana
  misc_feature: MA Experiment 20000235 PARAMETER Experiment Name: At_Siliques_P Parameter: Plant Line Value: WS
  misc_feature: MA Experiment 20000235 PARAMETER Experiment Name: At_Siliques_P Parameter: Tissue Value: 5-10mm Siliques vs. Whole Plant
  misc_feature: MA Experiment ID: 20001458 Result: Up-regulated in Transcription
  misc_feature: MA Experiment 20001458 PARAMETER Experiment Name: At_50mM_NH4NO3_L-to-H_P Parameter: Age (day) Value: Undefined
  misc_feature: MA Experiment 20001458 PARAMETER Experiment Name: At_50mM_NH4NO3_L-to-H_P Parameter: Organism Value: Undefined
  misc_feature: MA Experiment 20001458 PARAMETER Experiment Name: At_50mM_NH4NO3_L-to-H_P Parameter: Plant Line Value: Undefined
  misc_feature: MA Experiment 20001458 PARAMETER Experiment Name: At_50mM_NH4NO3_L-to-H_P Parameter: Timepoint (hr) Value: 2
  misc_feature: MA Experiment 20001458 PARAMETER Experiment Name: At_50mM_NH4NO3_L-to-H_P Parameter: Tissue Value: Siliques
  misc_feature: MA Experiment 20001458 PARAMETER Experiment Name: At_50mM_NH4NO3_L-to-H_P Parameter: Treatment Value: 50mM NH4NO3 vs. 100mM Manitol
  misc_feature: MA Experiment ID: 20001557 Result: Up-regulated in Transcription
  misc_feature: MA Experiment 20001557 PARAMETER Experiment Name: At_Drought_Soil_Dry_P Parameter: Age (day) Value: 27
  misc_feature: MA Experiment 20001557 PARAMETER Experiment Name: At_Drought_Soil_Dry_P Parameter: Organism Value: A. thaliana
  misc_feature: MA Experiment 20001557 PARAMETER Experiment Name: At_Drought_Soil_Dry_P Parameter: Plant Line Value: WS
  misc_feature: MA Experiment 20001557 PARAMETER Experiment Name: At_Drought_Soil_Dry_P Parameter: Post Timepoint (hr) Value: 3
  misc_feature: MA Experiment 20001557 PARAMETER Experiment Name: At_Drought_Soil_Dry_P Parameter: Post-Treatment Value: Re-Water vs. No Drought
  misc_feature: MA Experiment 20001557 PARAMETER Experiment Name: At_Drought_Soil_Dry_P Parameter: Timepoint (day) Value: 13
  misc_feature: MA Experiment 20001557 PARAMETER Experiment Name: At_Drought_Soil_Dry_P Parameter: Treatment Value: Drought vs. No Drought
  misc_feature: MA Experiment ID: 20001558 Result: Up-regulated in Transcription
  misc_feature: MA Experiment 20001558 PARAMETER Experiment Name: At_Drought_Soil_Dry_P Parameter: Age (day) Value: 27
  misc_feature: MA Experiment 20001558 PARAMETER Experiment Name: At_Drought_Soil_Dry_P Parameter: Organism Value: A. thaliana
  misc_feature: MA Experiment 20001558 PARAMETER Experiment Name: At_Drought_Soil_Dry_P Parameter: Plant Line Value: WS
  misc_feature: MA Experiment 20001558 PARAMETER Experiment Name: At_Drought_Soil_Dry_P Parameter: Post Timepoint (hr) Value: 6
  misc_feature: MA Experiment 20001558 PARAMETER Experiment Name: At_Drought_Soil_Dry_P Parameter: Post-Treatment Value: Re-Water vs. No Drought
  misc_feature: MA Experiment 20001558 PARAMETER Experiment Name: At_Drought_Soil_Dry_P Parameter: Timepoint (day) Value: 13
  misc_feature: MA Experiment 20001558 PARAMETER Experiment Name: At_Drought_Soil_Dry_P Parameter: Treatment Value: Drought vs. No Drought
aacacaaaaaaaatggcgactcttgtacgtcgcgcagcttctcggtttgtgggaagttattggaaaaaccgttctttcgtttactcattgttggaccagtccgcttctggccggaggcgacatctgacgccgtcggttgaccggaatgttccatttaccacatcgaccaaaaagagagcttctccaactgatccgcttcttcgaatcattgaagaggagattggatacgccgagaaagctgatgattatcatcgagttgaagaaactccaagtggcttccctttcgaaatggaagacaaaccaggagggaagattgtgacattgactagagaatatgaaggagagactgttaaagttgaagtacacatgactaatcttgtgactggtgacaaagaagatgatgaagatgatgaggaagaagcagagaatgaagaagatgaagatgaggataagccattgaagcctaagcaatcgaatgtgcctctcttagtaactctttccaagaagacaggaccaagtttggaatttagatgtactgcttttccagacaggattgcgatcaaggacatgtgggttacatttcctgatgatccttccaaagatgagcttgcttatgaaggaccttccttcagggttttggatgaaaagctaaggaaggctttccataggtacattgagattagagggataaagccgagcatgatcaacttcttgcacgagtacatgatcaacaaggatagtagagagcacttactgtggttgaaatctctcaagaactttgtcaagtattgaaataagaaaacaatgttattttccgatgctctttgtcttccaaattttgtacttgaaacaccattcaattatgtttggatctatttatataaaaaaagagtattgtgagac

SEQ ID NO: 30517 - protein, 263 aa, Arabidopsis thaliana
  peptide (1)..(263): Ceres Seq. ID no. 12422996
  misc_feature (70)..(261): Pfam Name: Mitochondrial glycoprotein Pfam Description: Mitochondrial glycoprotein
  misc_feature (48)..(261): Homolog of NCBI NO: 34895740 NR Description: P0019D06.28 [Oryza sativa (japonica
  misc_feature (53)..(262): Homolog of NCBI NO: 21592321 NR Description: unknown [Arabidopsis thaliana]
  misc_feature (53)..(262): Homolog of NCBI NO: 15241669 NR Description: putative protein
  misc_feature (11)..(262): Homolog of NCBI NO: 7487698 NR Description: hypothetical protein At2g39790 [imported] -
  misc_feature (8)..(262): Homolog of NCBI NO: 21593469 NR Description: unknown [Arabidopsis thaliana]
  misc_feature (8)..(262): Homolog of NCBI NO: 18405164 NR Description: Expressed protein
  misc_feature (42)..(262): Homolog of NCBI NO: 11357566 NR Description: hypothetical protein F1I16.10 - Arabidopsis
  misc_feature (6)..(262): Homolog of NCBI NO: 18410318 NR Description: Expressed protein
  misc_feature (48)..(262): Homolog of NCBI NO: 34895730 NR Description: P0019D06.23 [Oryza sativa (japonica
  misc_feature (5)..(263): Homolog of NCBI NO: 15239320 NR Description: putative protein
NTKKMATLVRRAASRFVGSYWKNRSFVYSLLDQSASGRRRHLTPSVDRNVPFTTSTKKRASPTDPLLRIIEEEIGYAEKADDYHRVEETPSGFPFEMEDKPGGKIVTLTREYEGETVKVEVHMTNLVTGDKEDDEDDEEEAENEEDEDEDKPLKPKQSNVPLLVTLSKKTGPSLEFRCTAFPDRIAIKDMWVTFPDDPSKDELAYEGPSFRVLDEKLRKAFHRYIEIRGIKPSMINFLHEYMINKDSREHLLWLKSLKNFVKY

SEQ ID NO: 30518 - protein, 259 aa, Arabidopsis thaliana
  peptide (1)..(259): Ceres Seq. ID no. 12422997
  misc_feature (66)..(257): Pfam Name: Mitochondrial glycoprotein Pfam Description: Mitochondrial glycoprotein
  misc_feature (44)..(257): Homolog of NCBI NO: 34895740 NR Description: P0019D06.28 [Oryza sativa (japonica
  misc_feature (49)..(258): Homolog of NCBI NO: 21592321 NR Description: unknown [Arabidopsis thaliana]
  misc_feature (49)..(258): Homolog of NCBI NO: 15241669 NR Description: putative protein
  misc_feature (7)..(258): Homolog of NCBI NO: 7487698 NR Description: hypothetical protein At2g39790 [imported] -
  misc_feature (4)..(258): Homolog of NCBI NO: 21593469 NR Description: unknown [Arabidopsis thaliana]
  misc_feature (4)..(258): Homolog of NCBI NO: 18405164 NR Description: Expressed protein
  misc_feature (38)..(258): Homolog of NCBI NO: 11357566 NR Description: hypothetical protein F1I16.10 - Arabidopsis
  misc_feature (2)..(258): Homolog of NCBI NO: 18410318 NR Description: Expressed protein
  misc_feature (44)..(258): Homolog of NCBI NO: 34895730 NR Description: P0019D06.23 [Oryza sativa (japonica
  misc_feature (1)..(259): Homolog of NCBI NO: 15239320 NR Description: putative protein
MATLVRRAASRFVGSYWKNRSFVYSLLDQSASGRRRHLTPSVDRNVPFTTSTKKRASPTDPLLRIIEEEIGYAEKADDYHRVEETPSGFPFEMEDKPGGKIVTLTREYEGETVKVEVHMTNLVTGDKEDDEDDEEEAENEEDEDEDKPLKPKQSNVPLLVTLSKKTGPSLEFRCTAFPDRIAIKDMWVTFPDDPSKDELAYEGPSFRVLDEKLRKAFHRYIEIRGIKPSMINFLHEYMINKDSREHLLWLKSLKNFVKY

SEQ ID NO: 30519 - protein, 167 aa, Arabidopsis thaliana
  peptide (1)..(167): Ceres Seq. ID no. 12422998
  misc_feature (1)..(165): Pfam Name: Mitochondrial glycoprotein Pfam Description: Mitochondrial glycoprotein
  misc_feature (1)..(165): Homolog of NCBI NO: 34895740 NR Description: P0019D06.28 [Oryza sativa (japonica
  misc_feature (1)..(166): Homolog of NCBI NO: 21592321 NR Description: unknown [Arabidopsis thaliana]
  misc_feature (1)..(166): Homolog of NCBI NO: 15241669 NR Description: putative protein
  misc_feature (1)..(166): Homolog of NCBI NO: 7487698 NR Description: hypothetical protein At2g39790 [imported] -
  misc_feature (1)..(166): Homolog of NCBI NO: 21593469 NR Description: unknown [Arabidopsis thaliana]
  misc_feature (1)..(166): Homolog of NCBI NO: 18405164 NR Description: Expressed protein
  misc_feature (1)..(166): Homolog of NCBI NO: 11357566 NR Description: hypothetical protein F1I16.10 - Arabidopsis
  misc_feature (1)..(166): Homolog of NCBI NO: 18410318 NR Description: Expressed protein
  misc_feature (1)..(166): Homolog of NCBI NO: 34895730 NR Description: P0019D06.23 [Oryza sativa (japonica
  misc_feature (1)..(167): Homolog of NCBI NO: 15239320 NR Description: putative protein
MEDKPGGKIVTLTREYEGETVKVEVHMTNLVTGDKEDDEDDEEEAENEEDEDEDKPLKPKQSNVPLLVTLSKKTGPSLEFRCTAFPDRIAIKDMWVTFPDDPSKDELAYEGPSFRVLDEKLRKAFHRYIEIRGIKPSMINFLHEYMINKDSREHLLWLKSLKNFVKY

SEQ ID NO: 30520 - DNA, 871 bp, Arabidopsis thaliana
  misc_feature (1)..(871): Ceres Seq. ID no. 13621946
  misc_feature: MA Experiment ID: 108573 Result: Up-regulated in Transcription
  misc_feature: MA Experiment 108573 PARAMETER Experiment Name: At_Drought_cDNA_P Parameter: Timepoint (hr) Value: 6
  misc_feature: MA Experiment 108573 PARAMETER Experiment Name: At_Drought_cDNA_P Parameter: Tissue Value: Aerial
  misc_feature: MA Experiment 108573 PARAMETER Experiment Name: At_Drought_cDNA_P Parameter: Treatment Value: Drought vs. No Drought
  misc_feature: MA Experiment ID: 20000224 Result: Down-regulated in Transcription
attcattcatcacttatacgatcacttcccaaattattgattttttttacccatttctctcatcgcacggtgatattgagaatcgccgacctgaatcgatcggaaaactttctctgattaccggcggtcaacaccgctgaacacatatgtttgtttgacgacctcttctctccgcgatctttacctcaacaacgagatctgtttccacgaaagaaaggaggatgtcgacgccagcaaggaagaggttaatgagggatttcaagaggttgcagcaagacccacctgcgggtattagtggtgctccacaggacaacaacattatgctctggaatgctgtcatatttgggcctgatgacacaccatgggatggaggtactttcaaactctcactgcagttctctgaagattatcccaataaaccaccaacagttcggtttgtgtcacggatgtttcatcctaatatttatgcagatgggagtatctgcttggacattctacaaaaccagtggagtccaatctatgatgttgctgctatacttacctccatccagtccttgctctgtgaccctaatccgaattctcctgcaaactcggaagctgctcggatgtacagcgaaagcaagcgcgagtacaacaggagagtgcgtgatgttgttgagcaaagctggactgctgactagtagtagtttgttgtaagcgttgtagctctctctactttctctcaatcacgattcagcaacagctttcttctcttttcattcatgtcttgtgtttccaaaactatttaagtgattccatgctttgatgtaacccaacatccttaaaaaaacaactttgtaccaaaccatctgaattattcacttttgtgtat

SEQ ID NO: 30521 - protein, 152 aa, Arabidopsis thaliana
  peptide (1)..(152): Ceres Seq. ID no. 13621947
  misc_feature (1)..(149): Homolog of NCBI NO: 18424601 NR Description: ubiquitin-conjugating enzyme 3 (UBC3)
  misc_feature (1)..(152): Homolog of NCBI NO: 18844990 NR Description: Rad6 [Oryza sativa (japonica cultivar-group)]
  misc_feature (1)..(152): Homolog of NCBI NO: 33146810 NR Description: OsRad6 [Oryza sativa (japonica cultivar-group)]
  misc_feature (1)..(152): Homolog of NCBI NO: 13516453 NR Description: ubiquitin-conjugating enzyme (E2) [Nicotiana
  misc_feature (1)..(152): Homolog of NCBI NO: 136640 NR Description: Ubiquitin-conjugating enzyme E2-17 kDa
  misc_feature (1)..(152): Homolog of NCBI NO: 13516451 NR Description: ubiquitin-conjugating enzyme (E2) [Nicotiana
  misc_feature (1)..(152): Homolog of NCBI NO: 8118527 NR Description: ubiquitin conjugating protein [Avicennia marina]
  misc_feature (1)..(152): Homolog of NCBI NO: 464980 NR Description: Ubiquitin-conjugating enzyme E2-17 kDa
  misc_feature (1)..(152): Homolog of NCBI NO: 18395424 NR Description: ubiquitin-conjugating enzyme 2 (UBC2)
  misc_feature (1)..(152): Homolog of NCBI NO: 18394114 NR Description: ubiquitin-conjugating enzyme 1 (UBC1)
MSTPARKRLMRDFKRLQQDPPAGISGAPQDNNIMLWNAVIFGPDDTPWDGGTFKLSLQFSEDYPNKPPTVRFVSRMFHPNIYADGSICLDILQNQWSPIYDVAAILTSIQSLLCDPNPNSPANSEAARMYSESKREYNRRVRDVVEQSWTAD

SEQ ID NO: 30522 - protein, 143 aa, Arabidopsis thaliana
  peptide (1)..(143): Ceres Seq. ID no. 13621948
  misc_feature (1)..(140): Homolog of NCBI NO: 18424601 NR Description: ubiquitin-conjugating enzyme 3 (UBC3)
  misc_feature (1)..(143): Homolog of NCBI NO: 18844990 NR Description: Rad6 [Oryza sativa (japonica cultivar-group)]
  misc_feature (1)..(143): Homolog of NCBI NO: 33146810 NR Description: OsRad6 [Oryza sativa (japonica cultivar-group)]
  misc_feature (1)..(143): Homolog of NCBI NO: 13516453 NR Description: ubiquitin-conjugating enzyme (E2) [Nicotiana
  misc_feature (1)..(143): Homolog of NCBI NO: 136640 NR Description: Ubiquitin-conjugating enzyme E2-17 kDa
  misc_feature (1)..(143): Homolog of NCBI NO: 13516451 NR Description: ubiquitin-conjugating enzyme (E2) [Nicotiana
  misc_feature (1)..(143): Homolog of NCBI NO: 8118527 NR Description: ubiquitin conjugating protein [Avicennia marina]
  misc_feature (1)..(143): Homolog of NCBI NO: 464980 NR Description: Ubiquitin-conjugating enzyme E2-17 kDa
  misc_feature (1)..(143): Homolog of NCBI NO: 18395424 NR Description: ubiquitin-conjugating enzyme 2 (UBC2)
  misc_feature (1)..(143): Homolog of NCBI NO: 18394114 NR Description: ubiquitin-conjugating enzyme 1 (UBC1)
MRDFKRLQQDPPAGISGAPQDNNIMLWNAVIFGPDDTPWDGGTFKLSLQFSEDYPNKPPTVRFVSRMFHPNIYADGSICLDILQNQWSPIYDVAAILTSIQSLLCDPNPNSPANSEAARMYSESKREYNRRVRDVVEQSWTAD

SEQ ID NO: 30523 - protein, 121 aa, Arabidopsis thaliana
  peptide (1)..(121): Ceres Seq. ID no. 13621949
MLSYLGLMTHHGMEVLSNSHCSSLKIIPINHQQFGLCHGCFILIFMQMGVSAWTFYKTSGVQSMMLLLYLPPSSPCSVTLIRILLQTRKLLGCTAKASASTTGECVMLLSKAGLLTSSSLL

SEQ ID NO: 30524 - DNA, 1076 bp, Arabidopsis thaliana
  misc_feature (1)..(1076): Ceres Seq. ID no. 13495712
  misc_feature: MA Experiment ID: 108573 Result: Up-regulated in Transcription
  misc_feature: MA Experiment 108573 PARAMETER Experiment Name: At_Drought_cDNA_P Parameter: Timepoint (hr) Value: 6
  misc_feature: MA Experiment 108573 PARAMETER Experiment Name: At_Drought_cDNA_P Parameter: Tissue Value: Aerial
  misc_feature: MA Experiment 108573 PARAMETER Experiment Name: At_Drought_cDNA_P Parameter: Treatment Value: Drought vs. No Drought
  misc_feature: MA Experiment ID: 108579 Result: Down-regulated in Transcription
  misc_feature: MA Experiment 108579 PARAMETER Experiment Name: At_4deg_Cold_cDNA_P Parameter: Temperature (deg C) Value: 4 vs. 22
  misc_feature: MA Experiment 108579 PARAMETER Experiment Name: At_4deg_Cold_cDNA_P Parameter: Timepoint (hr) Value: 6
  misc_feature: MA Experiment 108579 PARAMETER Experiment Name: At_4deg_Cold_cDNA_P Parameter: Tissue Value: Aerial
  misc_feature: MA Experiment ID: 20000227 Result: Down-regulated in Transcription
  misc_feature: MA Experiment 20000227 PARAMETER Experiment Name: At_Root-Tips-vs-Tops_P Parameter: Tissue Value: Root Tips vs. Root Tops
  misc_feature: MA Experiment ID: 20000234 Result: Down-regulated in Transcription
  misc_feature: MA Experiment 20000234 PARAMETER Experiment Name: At_Siliques_P Parameter: Age (day) Value: 21
  misc_feature: MA Experiment 20000234 PARAMETER Experiment Name: At_Siliques_P Parameter: Organism Value: A. thaliana
  misc_feature: MA Experiment 20000234 PARAMETER Experiment Name: At_Siliques_P Parameter: Plant Line Value: WS
  misc_feature: MA Experiment 20000234 PARAMETER Experiment Name: At_Siliques_P Parameter: Tissue Value: Less Than 5mm Siliques vs. Whole Plant
  misc_feature: MA Experiment ID: 20000235 Result: Down-regulated in Transcription
  misc_feature: MA Experiment 20000235 PARAMETER Experiment Name: At_Siliques_P Parameter: Age (day) Value: 21
  misc_feature: MA Experiment 20000235 PARAMETER Experiment Name: At_Siliques_P Parameter: Organism Value: A. thaliana
  misc_feature: MA Experiment 20000235 PARAMETER Experiment Name: At_Siliques_P Parameter: Plant Line Value: WS
  misc_feature: MA Experiment 20000235 PARAMETER Experiment Name: At_Siliques_P Parameter: Tissue Value: 5-10mm Siliques vs. Whole Plant
  misc_feature: MA Experiment ID: 20000264 Result: Down-regulated in Transcription
  misc_feature: MA Experiment 20000264 PARAMETER Experiment Name: At_Open_Flower_P Parameter: Age (day) Value: 21
  misc_feature: MA Experiment 20000264 PARAMETER Experiment Name: At_Open_Flower_P Parameter: Plant Line Value: WS
  misc_feature: MA Experiment 20000264 PARAMETER Experiment Name: At_Open_Flower_P Parameter: Tissue Value: Open Flower vs. Whole Plant
  misc_feature: MA Experiment ID: 20000265 Result: Down-regulated in Transcription
  misc_feature: MA Experiment 20000265 PARAMETER Experiment Name: At_Open_Flower_P Parameter: Age (day) Value: 21
  misc_feature: MA Experiment 20000265 PARAMETER Experiment Name: At_Open_Flower_P Parameter: Plant Line Value: WS
  misc_feature: MA Experiment 20000265 PARAMETER Experiment Name: At_Open_Flower_P Parameter: Tissue Value: Closed Flower vs. Whole Plant
  misc_feature: MA Experiment ID: 20000286 Result: Down-regulated in Transcription
  misc_feature: MA Experiment 20000286 PARAMETER Experiment Name: At_Open_Flower_P Parameter: Age (day) Value: 21
  misc_feature: MA Experiment 20000286 PARAMETER Experiment Name: At_Open_Flower_P Parameter: Plant Line Value: WS
  misc_feature: MA Experiment 20000286 PARAMETER Experiment Name: At_Open_Flower_P Parameter: Tissue Value: Half Open vs. Whole Plant
  misc_feature: MA Experiment ID: 20001450 Result: Up-regulated in Transcription
  misc_feature: MA Experiment 20001450 PARAMETER Experiment Name: At_Far-red-induction_P Parameter: Age (day) Value: 7
  misc_feature: MA Experiment 20001450 PARAMETER Experiment Name: At_Far-red-induction_P Parameter: Light Value: Far-red vs. White
  misc_feature: MA Experiment 20001450 PARAMETER Experiment Name: At_Far-red-induction_P Parameter: Organism Value: A. thaliana
  misc_feature: MA Experiment 20001450 PARAMETER Experiment Name: At_Far-red-induction_P Parameter: Plant Line Value: Columbia
  misc_feature: MA Experiment 20001450 PARAMETER Experiment Name: At_Far-red-induction_P Parameter: Timepoint (hr) Value: 8
  misc_feature: MA Experiment 20001450 PARAMETER Experiment Name: At_Far-red-induction_P Parameter: Tissue Value: Whole Plant
aatttgccgttgaaggggctcgcaggacttctgtctgcgtctccgaaccaattctcttcttcttctctcgatccgatccgttttctacttctctcaatttcgaaccaattggatcgcatcttacgggggcgaggacgaggaagaagaatttttgctccgggataattgtctcatctgatttatatcggaaaaaaggtcgcttgccggataggacacgatccactttcataaaggagatatttttacagattcagtggacgccatggatgtgcctagctcttgggatgctttacggaaacaggctagaaagattgaagctcagcttgacgagcagatgcattcatatcgtagacttgtttcaactaaggctttatcaaagtcagatggttctgagagtgatattgaagctggaattgacttacttcttaggcaactgcaacaagttaatgctcagatgcaagcatgggtttcttctggtggatcagaaatggtctcccatactttaactcgacatcaagagatccttcaagatctgacacaggagttttatcgacatcgctccagtcttagagcaaaacaagagcatgcttcacttcttgaggactttagagaatttgatcggactagattagatttagaagatggatatgggtctgaacaagccctgatcaaggaacatatgggaatcaaccgcaatacagctcagatggacggtgtcatttcacaagctcaggcaacactcggtacacttgtgtttcaacgttcaacttttggaggcatcaactcaaagcttagcaatgtcgccagccgtctacctacggtgaacactattctggcagcgataaagaggaaaaagtcgatggatacaatcattctttcactcgttgcggctgtatgcacatttctcatattcatttactggataaccaagtagaatttgcccatttctttcgtttcatctttatgttgggccacgtctggttttcccatgatgtcaatttgttctgcaattatcggtgttctagtaaagaatctaaagatcaaaaacataaatattgtgtacagaaaatttcagc

SEQ ID NO: 30525 - protein, 223 aa, Arabidopsis thaliana
  peptide (1)..(223): Ceres Seq. ID no. 13495713
  misc_feature (51)..(201): Pfam Name: Vesicle transport v-SNARE protein Pfam Description: Vesicle transport v-SNARE protein
  misc_feature (38)..(219): Homolog of NCBI NO: 28280046 NR Description: Similar to golgi SNAP receptor complex member 1
  misc_feature (51)..(219): Homolog of NCBI NO: 3335132 NR Description: GOS28/P28 protein [Homo sapiens]
  misc_feature (51)..(219): Homolog of NCBI NO: 30388705 NR Description: Gosr1 protein [Mus musculus]
  misc_feature (51)..(219): Homolog of NCBI NO: 16758358 NR Description: golgi SNAP receptor complex member 1; cis-Golgi
  misc_feature (51)..(219): Homolog of NCBI NO: 11132038 NR Description: 28 kDa Golgi SNARE protein (Golgi SNAP receptor
  misc_feature (51)..(219): Homolog of NCBI NO: 4758456 NR Description: golgi SNAP receptor complex member 1; Golgi SNARE
  misc_feature (6)..(221): Homolog of NCBI NO: 17552950 NR Description: Predicted CDS, putative protein, with 2 coiled
  misc_feature (1)..(223): Homolog of NCBI NO: 15225431 NR Description: cis-Golgi SNARE protein, putative [Arabidopsis
  misc_feature (38)..(223): Homolog of NCBI NO: 6850926 NR Description: hypothetical protein [Cicer arietinum]
  misc_feature (1)..(223): Homolog of NCBI NO: 18394296 NR Description: cis-Golgi SNARE protein, putative [Arabidopsis
MDVPSSWDALRKQARKIEAQLDEQMHSYRRLVSTKALSKSDGSESDIEAGIDLLLRQLQQVNAQMQAWVSSGGSEMVSHTLTRHQEILQDLTQEFYRHRSSLRAKQEHASLLEDFREFDRTRLDLEDGYGSEQALIKEHMGINRNTAQMDGVISQAQATLGTLVFQRSTFGGINSKLSNVASRLPTVNTILAAIKRKKSMDTIILSLVAAVCTFLIFIYWITK

SEQ ID NO: 30526 - protein, 199 aa, Arabidopsis thaliana
  peptide (1)..(199): Ceres Seq. ID no. 13495714
  misc_feature (27)..(177): Pfam Name: Vesicle transport v-SNARE protein Pfam Description: Vesicle transport v-SNARE protein
  misc_feature (14)..(195): Homolog of NCBI NO: 28280046 NR Description: Similar to golgi SNAP receptor complex member 1
  misc_feature (27)..(195): Homolog of NCBI NO: 3335132 NR Description: GOS28/P28 protein [Homo sapiens]
  misc_feature (27)..(195): Homolog of NCBI NO: 30388705 NR Description: Gosr1 protein [Mus musculus]
  misc_feature (27)..(195): Homolog of NCBI NO: 16758358 NR Description: golgi SNAP receptor complex member 1; cis-Golgi
  misc_feature (27)..(195): Homolog of NCBI NO: 11132038 NR Description: 28 kDa Golgi SNARE protein (Golgi SNAP receptor
  misc_feature (27)..(195): Homolog of NCBI NO: 4758456 NR Description: golgi SNAP receptor complex member 1; Golgi SNARE
  misc_feature (1)..(197): Homolog of NCBI NO: 17552950 NR Description: Predicted CDS, putative protein, with 2 coiled
  misc_feature (1)..(199): Homolog of NCBI NO: 15225431 NR Description: cis-Golgi SNARE protein, putative [Arabidopsis
  misc_feature (14)..(199): Homolog of NCBI NO: 6850926 NR Description: hypothetical protein [Cicer arietinum]
  misc_feature (1)..(199): Homolog of NCBI NO: 18394296 NR Description: cis-Golgi SNARE protein, putative [Arabidopsis
MHSYRRLVSTKALSKSDGSESDIEAGIDLLLRQLQQVNAQMQAWVSSGGSEMVSHTLTRHQEILQDLTQEFYRHRSSLRAKQEHASLLEDFREFDRTRLDLEDGYGSEQALIKEHMGINRNTAQMDGVISQAQATLGTLVFQRSTFGGINSKLSNVASRLPTVNTILAAIKRKKSMDTIILSLVAAVCTFLIFIYWITK

SEQ ID NO: 30527 - protein, 167 aa, Arabidopsis thaliana
  peptide (1)..(167): Ceres Seq. ID no. 13495715
FAVEGARRTSVCVSEPILFFFSRSDPFSTSLNFEPIGSHLTGARTRKKNFCSGIIVSSDLYRKKGRLPDRTRSTFIKEIFLQIQWTPWMCLALGMLYGNRLERLKLSLTSRCIHIVDLFQLRLYQSQMVLRVILKLELTYFLGNCNKLMLRCKHGFLLVDQKWSPIL

SEQ ID NO: 30528 - DNA, 1000 bp, Arabidopsis thaliana
  misc_feature (1)..(1000): Ceres Seq. ID no. 12332107
  misc_feature: MA Experiment ID: 108434 Result: Up-regulated in Transcription
  misc_feature: MA Experiment 108434 PARAMETER Experiment Name: At_Root_Tips_cDNA_P Parameter: Tissue Value: Root Tips
  misc_feature: MA Experiment ID: 108462 Result: Down-regulated in Transcription
  misc_feature: MA Experiment 108462 PARAMETER Experiment Name: At_Germinating_Seeds_cDNA_P Parameter: Age (day) Value: 2 vs. 0
  misc_feature: MA Experiment 108462 PARAMETER Experiment Name: At_Germinating_Seeds_cDNA_P Parameter: Tissue Value: Germinating Seeds
  misc_feature: MA Experiment ID: 108463 Result: Down-regulated in Transcription
  misc_feature: MA Experiment 108463 PARAMETER Experiment Name: At_Germinating_Seeds_cDNA_P Parameter: Age (day) Value: 3 vs. 0
  misc_feature: MA Experiment 108463 PARAMETER Experiment Name: At_Germinating_Seeds_cDNA_P Parameter: Tissue Value: Germinating Seeds
  misc_feature: MA Experiment ID: 108464 Result: Down-regulated in Transcription
  misc_feature: MA Experiment 108464 PARAMETER Experiment Name: At_Germinating_Seeds_cDNA_P Parameter: Age (day) Value: 4 vs. 0
  misc_feature: MA Experiment 108464 PARAMETER Experiment Name: At_Germinating_Seeds_cDNA_P Parameter: Tissue Value: Germinating Seeds
  misc_feature: MA Experiment ID: 108488 Result: Up-regulated in Transcription
  misc_feature: MA Experiment ID: 108489 Result: Up-regulated in Transcription
  misc_feature: MA Experiment ID: 108573 Result: Down-regulated in Transcription
  misc_feature: MA Experiment 108573 PARAMETER Experiment Name: At_Drought_cDNA_P Parameter: Timepoint (hr) Value: 6
  misc_feature: MA Experiment 108573 PARAMETER Experiment Name: At_Drought_cDNA_P Parameter: Tissue Value: Aerial
  misc_feature: MA Experiment 108573 PARAMETER Experiment Name: At_Drought_cDNA_P Parameter: Treatment Value: Drought vs. No Drought
  misc_feature: MA Experiment ID: 20000069 Result: Down-regulated in Transcription
  misc_feature: MA Experiment 20000069 PARAMETER Experiment Name: At_100uM_ABA_Mutants_cDNA_P Parameter: Plant Line Value: CS23
  misc_feature: MA Experiment 20000069 PARAMETER Experiment Name: At_100uM_ABA_Mutants_cDNA_P Parameter: Timepoint (hr) Value: 6
  misc_feature: MA Experiment 20000069 PARAMETER Experiment Name: At_100uM_ABA_Mutants_cDNA_P Parameter: Tissue Value: Aerial
  misc_feature: MA Experiment 20000069 PARAMETER Experiment Name: At_100uM_ABA_Mutants_cDNA_P Parameter: Treatment Value: 100uM ABA vs. No Treatment
  misc_feature: MA Experiment ID: 20000117 Result: Down-regulated in Transcription
  misc_feature: MA Experiment 20000117 PARAMETER Experiment Name: At_100uM_ABA_Mutants_cDNA_P Parameter: Plant Line Value: Columbia
  misc_feature: MA Experiment 20000117 PARAMETER Experiment Name: At_100uM_ABA_Mutants_cDNA_P Parameter: Timepoint (hr) Value: 6
  misc_feature: MA Experiment 20000117 PARAMETER Experiment Name: At_100uM_ABA_Mutants_cDNA_P Parameter: Tissue Value: Aerial
  misc_feature: MA Experiment 20000117 PARAMETER Experiment Name: At_100uM_ABA_Mutants_cDNA_P Parameter: Treatment Value: 100uM ABA vs. No Treatment
  misc_feature: MA Experiment ID: 20000234 Result: Up-regulated in Transcription
  misc_feature: MA Experiment 20000234 PARAMETER Experiment Name: At_Siliques_P Parameter: Age (day) Value: 21
  misc_feature: MA Experiment 20000234 PARAMETER Experiment Name: At_Siliques_P Parameter: Organism Value: A. thaliana
  misc_feature: MA Experiment 20000234 PARAMETER Experiment Name: At_Siliques_P Parameter: Plant Line Value: WS
  misc_feature: MA Experiment 20000234 PARAMETER Experiment Name: At_Siliques_P Parameter: Tissue Value: Less Than 5mm Siliques vs. Whole Plant
  misc_feature: MA Experiment ID: 20000437 Result: Down-regulated in Transcription
  misc_feature: MA Experiment 20000437 PARAMETER Experiment Name: At_Drought_P Parameter: Age (day) Value: 8
  misc_feature: MA Experiment 20000437 PARAMETER Experiment Name: At_Drought_P Parameter: Organism Value: A. thaliana
  misc_feature: MA Experiment 20000437 PARAMETER Experiment Name: At_Drought_P Parameter: Plant Line Value: WS
  misc_feature: MA Experiment 20000437 PARAMETER Experiment Name: At_Drought_P Parameter: Timepoint (hr) Value: 24
  misc_feature: MA Experiment 20000437 PARAMETER Experiment Name: At_Drought_P Parameter: Tissue Value: Whole Plant
  misc_feature: MA Experiment 20000437 PARAMETER Experiment Name: At_Drought_P Parameter: Treatment Value: Drought vs. No Drought
  misc_feature: MA Experiment ID: 20000438 Result: Up-regulated in Transcription
  misc_feature: MA Experiment 20000438 PARAMETER Experiment Name: At_Shoots__P Parameter: Age (day) Value: 14
  misc_feature: MA Experiment 20000438 PARAMETER Experiment Name: At_Shoots__P Parameter: Tissue Value: Shoots vs. Whole Plant
  misc_feature: MA Experiment ID: 20000496 Result: Up-regulated in Transcription
  misc_feature: MA Experiment 20000496 PARAMETER Experiment Name: At_Guard_Cells_P Parameter: Harvest Date Value: 7/19/2002
  misc_feature: MA Experiment 20000496 PARAMETER Experiment Name: At_Guard_Cells_P Parameter: Organism Value: Canola
  misc_feature: MA Experiment 20000496 PARAMETER Experiment Name: At_Guard_Cells_P Parameter: Tissue Value: Guard Cells vs. Leaves
  misc_feature: MA Experiment ID: 20000794 Result: Down-regulated in Transcription
  misc_feature: MA Experiment 20000794 PARAMETER Experiment Name: At_Petals_P Parameter: Age (day) Value: 23-25 days
  misc_feature: MA Experiment 20000794 PARAMETER Experiment Name: At_Petals_P Parameter: Plant Line Value: WS
  misc_feature: MA Experiment 20000794 PARAMETER Experiment Name: At_Petals_P Parameter: Tissue Value: Petals vs. Whole plant
  misc_feature: MA Experiment ID: 20001558 Result: Up-regulated in Transcription
  misc_feature: MA Experiment 20001558 PARAMETER Experiment Name: At_Drought_Soil_Dry_P Parameter: Age (day) Value: 27
  misc_feature: MA Experiment 20001558 PARAMETER Experiment Name: At_Drought_Soil_Dry_P Parameter: Organism Value: A. thaliana
  misc_feature: MA Experiment 20001558 PARAMETER Experiment Name: At_Drought_Soil_Dry_P Parameter: Plant Line Value: WS
  misc_feature: MA Experiment 20001558 PARAMETER Experiment Name: At_Drought_Soil_Dry_P Parameter: Post Timepoint (hr) Value: 6
  misc_feature: MA Experiment 20001558 PARAMETER Experiment Name: At_Drought_Soil_Dry_P Parameter: Post-Treatment Value: Re-Water vs. No Drought
  misc_feature: MA Experiment 20001558 PARAMETER Experiment Name: At_Drought_Soil_Dry_P Parameter: Timepoint (day) Value: 13
  misc_feature: MA Experiment 20001558 PARAMETER Experiment Name: At_Drought_Soil_Dry_P Parameter: Treatment Value: Drought vs. No Drought
  misc_feature: MA Experiment ID: 20001757 Result: Up-regulated in Transcription
  misc_feature: MA Experiment 20001757 PARAMETER Experiment Name: At_50mM_NH4NO3_L-to-H_P Parameter: Timepoint (hr) Value: 6
  misc_feature: MA Experiment 20001757 PARAMETER Experiment Name: At_50mM_NH4NO3_L-to-H_P Parameter: Tissue Value: Leaf
  misc_feature: MA Experiment 20001757 PARAMETER Experiment Name: At_50mM_NH4NO3_L-to-H_P Parameter: Treatment Value: 50mM NH4NO3 vs 100mM Mannitol
taggttaaaacttattgttgattcttctctattcgtcgtcgacctattttcctcagccatggccgtcgggaaaaacaagagaatctctaagggtaggaagggaggaaagaagaaggctgttgatcctttctccaagaaagattggtatgatgttaaggctccttcaatcttcactcacaggaatgttggaaagacacttgtttccagaactcagggtaccaaaattgcctcagaaggcttgaaacacagagtttttgaggtttctcttgctgatcttcaaggtgatgaggataacgcttacaggaagatccgtctcagagctgaagatgtccagggcaggaacgttctgtgccaattctggggcatggacttcaccaccgataaacttaggtcattggttaagaagtggcagactttgattgaggctcatgttgatgttaaaaccaccgacagttacactctcaggctattctgtatcgccttcaccaagagacgtgctaaccaggtcaagaggacttgctacgctcaatccagccaaatccgtcagatccgcaggaagatgagggacatcatggttagggaagcttcctcatgtgaccttaaggatcttgttgctaagttcattcctgaagctattggcagggagattgagaaggcaactcagggcatctaccctcttcagaatgttttcatccgtaaagtcaagatcctcaaggcccctaaattcgaccttggcaagctcatggatgttcacggagattactcagcagaagatgttggtgttaaggtagacaggccggctgatgagatggctgttgaggaacctactgaaatcatcggagcttaagaaatcgagagatgtctttttcttctaaactttagctttttgatgctctgtcgtttcacacactcttttgttcccggtttaattttgctgtattgatgacttttctcagtgtaaacttgcgagtttttgataatttatggaacaccttttctc

SEQ ID NO: 30529 - protein, 281 aa, Arabidopsis thaliana
  peptide (1)..(281): Ceres Seq. ID no. 12332108
  misc_feature (30)..(241): Pfam Name: Ribosomal S3Ae family Pfam Description: Ribosomal S3Ae family
  misc_feature (20)..(258): Homolog of NCBI NO: 82065 NR Description: ribosomal protein S3a - Madagascar periwinkle
  misc_feature (20)..(258): Homolog of NCBI NO: 1856971 NR Description: This gene is specifically expressed at the S during the cell cycle in the synchronous culture of periwinkle
  misc_feature (20)..(272): Homolog of NCBI NO: 1350986 NR Description: 40S RIBOSOMAL PROTEIN S3A (CYC07 PROTEIN)
  misc_feature (20)..(281): Homolog of NCBI NO: 6714564 NR Description: cyc07 [Daucus carota]
  misc_feature (20)..(281): Homolog of NCBI NO: 1350984 NR Description: 40S RIBOSOMAL PROTEIN S3A
  misc_feature (20)..(281): Homolog of NCBI NO: 24817254 NR Description: ribosomal protein S3a [Cicer arietinum]
  misc_feature (20)..(281): Homolog of NCBI NO: 1350983 NR Description: 40S RIBOSOMAL PROTEIN S3A (CYC07 PROTEIN)
  misc_feature (20)..(281): Homolog of NCBI NO: 1350981 NR Description: 40S RIBOSOMAL PROTEIN S3A (S PHASE SPECIFIC
  misc_feature (20)..(281): Homolog of NCBI NO: 15236171 NR Description: Putative S-phase-specific ribosomal protein
  misc_feature (20)..(281): Homolog of NCBI NO: 15229364 NR Description: putative 40S ribosomal protein S3A (S phase
RLKLIVDSSLFVVDLFSSAMAVGKNKRISKGRKGGKKKAVDPFSKKDWYDVKAPSIFTHRNVGKTLVSRTQGTKIASEGLKHRVFEVSLADLQGDEDNAYRKIRLRAEDVQGRNVLCQFWGMDFTTDKLRSLVKKWQTLIEAHVDVKTTDSYTLRLFCIAFTKRRANQVKRTCYAQSSQIRQIRRKMRDIMVREASSCDLKDLVAKFIPEAIGREIEKATQGIYPLQNVFIRKVKILKAPKFDLGKLMDVHGDYSAEDVGVKVDRPADEMAVEEPTEIIGA

SEQ ID NO: 30530 - protein, 262 aa, Arabidopsis thaliana
  peptide (1)..(262): Ceres Seq. ID no. 12332109
  misc_feature (11)..(222): Pfam Name: Ribosomal S3Ae family Pfam Description: Ribosomal S3Ae family
  misc_feature (1)..(239): Homolog of NCBI NO: 82065 NR Description: ribosomal protein S3a - Madagascar periwinkle
  misc_feature (1)..(239): Homolog of NCBI NO: 1856971 NR Description: This gene is specifically expressed at the S during the cell cycle in the synchronous culture of periwinkle
  misc_feature (1)..(253): Homolog of NCBI NO: 1350986 NR Description: 40S RIBOSOMAL PROTEIN S3A (CYC07 PROTEIN)
  misc_feature (1)..(262): Homolog of NCBI NO: 6714564 NR Description: cyc07 [Daucus carota]
  misc_feature (1)..(262): Homolog of NCBI NO: 1350984 NR Description: 40S RIBOSOMAL PROTEIN S3A
  misc_feature (1)..(262): Homolog of NCBI NO: 24817254 NR Description: ribosomal protein S3a [Cicer arietinum]
  misc_feature (1)..(262): Homolog of NCBI NO: 1350983 NR Description: 40S RIBOSOMAL PROTEIN S3A (CYC07 PROTEIN)
  misc_feature (1)..(262): Homolog of NCBI NO: 1350981 NR Description: 40S RIBOSOMAL PROTEIN S3A (S PHASE SPECIFIC
  misc_feature (1)..(262): Homolog of NCBI NO: 15236171 NR Description: Putative S-phase-specific ribosomal protein
  misc_feature (1)..(262): Homolog of NCBI NO: 15229364 NR Description: putative 40S ribosomal protein S3A (S phase
MAVGKNKRISKGRKGGKKKAVDPFSKKDWYDVKAPSIFTHRNVGKTLVSRTQGTKIASEGLKHRVFEVSLADLQGDEDNAYRKIRLRAEDVQGRNVLCQFWGMDFTTDKLRSLVKKWQTLIEAHVDVKTTDSYTLRLFCIAFTKRRANQVKRTCYAQSSQIRQIRRKMRDIMVREASSCDLKDLVAKFIPEAIGREIEKATQGIYPLQNVFIRKVKILKAPKFDLGKLMDVHGDYSAEDVGVKVDRPADEMAVEEPTEIIGA

SEQ ID NO: 30531 - protein, 160 aa, Arabidopsis thaliana
  peptide (1)..(160): Ceres Seq. ID no. 12332110
  misc_feature (1)..(120): Pfam Name: Ribosomal S3Ae family Pfam Description: Ribosomal S3Ae family
  misc_feature (1)..(137): Homolog of NCBI NO: 82065 NR Description: ribosomal protein S3a - Madagascar periwinkle
  misc_feature (1)..(137): Homolog of NCBI NO: 1856971 NR Description: This gene is specifically expressed at the S during the cell cycle in the synchronous culture of periwinkle
  misc_feature (1)..(151): Homolog of NCBI NO: 1350986 NR Description: 40S RIBOSOMAL PROTEIN S3A (CYC07 PROTEIN)
  misc_feature (1)..(160): Homolog of NCBI NO: 6714564 NR Description: cyc07 [Daucus carota]
  misc_feature (1)..(160): Homolog of NCBI NO: 1350984 NR Description: 40S RIBOSOMAL PROTEIN S3A
  misc_feature (1)..(160): Homolog of NCBI NO: 24817254 NR Description: ribosomal protein S3a [Cicer arietinum]
  misc_feature (1)..(160): Homolog of NCBI NO: 1350983 NR Description: 40S RIBOSOMAL PROTEIN S3A (CYC07 PROTEIN)
  misc_feature (1)..(160): Homolog of NCBI NO: 1350981 NR Description: 40S RIBOSOMAL PROTEIN S3A (S PHASE SPECIFIC
  misc_feature (1)..(160): Homolog of NCBI NO: 15236171 NR Description: Putative S-phase-specific ribosomal protein
  misc_feature (1)..(160): Homolog of NCBI NO: 15229364 NR Description: putative 40S ribosomal protein S3A (S phase
MDFTTDKLRSLVKKWQTLIEAHVDVKTTDSYTLRLFCIAFTKRRANQVKRTCYAQSSQIRQIRRKMRDIMVREASSCDLKDLVAKFIPEAIGREIEKATQGIYPLQNVFIRKVKILKAPKFDLGKLMDVHGDYSAEDVGVKVDRPADEMAVEEPTEIIGA

SEQ ID NO: 30532 - DNA, 698 bp, Arabidopsis thaliana
  misc_feature (1)..(698): Ceres Seq. ID no. 12333385
  misc_feature: MA Experiment ID: 108434 Result: Up-regulated in Transcription
  misc_feature: MA Experiment 108434 PARAMETER Experiment Name: At_Root_Tips_cDNA_P Parameter: Tissue Value: Root Tips
  misc_feature: MA Experiment ID: 108462 Result: Down-regulated in Transcription
  misc_feature: MA Experiment 108462 PARAMETER Experiment Name: At_Germinating_Seeds_cDNA_P Parameter: Age (day) Value: 2 vs. 0
  misc_feature: MA Experiment 108462 PARAMETER Experiment Name: At_Germinating_Seeds_cDNA_P Parameter: Tissue Value: Germinating Seeds
  misc_feature: MA Experiment ID: 108463 Result: Down-regulated in Transcription
  misc_feature: MA Experiment 108463 PARAMETER Experiment Name: At_Germinating_Seeds_cDNA_P Parameter: Age (day) Value: 3 vs. 0
  misc_feature: MA Experiment 108463 PARAMETER Experiment Name: At_Germinating_Seeds_cDNA_P Parameter: Tissue Value: Germinating Seeds
  misc_feature: MA Experiment ID: 108464 Result: Down-regulated in Transcription
  misc_feature: MA Experiment 108464 PARAMETER Experiment Name: At_Germinating_Seeds_cDNA_P Parameter: Age (day) Value: 4 vs. 0
  misc_feature: MA Experiment 108464 PARAMETER Experiment Name: At_Germinating_Seeds_cDNA_P Parameter: Tissue Value: Germinating Seeds
  misc_feature: MA Experiment ID: 108572 Result: Down-regulated in Transcription
  misc_feature: MA Experiment 108572 PARAMETER Experiment Name: At_Drought_cDNA_P Parameter: Timepoint (hr) Value: 1
  misc_feature: MA Experiment 108572 PARAMETER Experiment Name: At_Drought_cDNA_P Parameter: Tissue Value: Aerial
  misc_feature: MA Experiment 108572 PARAMETER Experiment Name: At_Drought_cDNA_P Parameter: Treatment Value: Drought vs. No Drought
  misc_feature: MA Experiment ID: 108573 Result: Down-regulated in Transcription
  misc_feature: MA Experiment 108573 PARAMETER Experiment Name: At_Drought_cDNA_P Parameter: Timepoint (hr) Value: 6
  misc_feature: MA Experiment 108573 PARAMETER Experiment Name: At_Drought_cDNA_P Parameter: Tissue Value: Aerial
  misc_feature: MA Experiment 108573 PARAMETER Experiment Name: At_Drought_cDNA_P Parameter: Treatment Value: Drought vs. No Drought
  misc_feature: MA Experiment ID: 108579 Result: Up-regulated in Transcription
  misc_feature: MA Experiment 108579 PARAMETER Experiment Name: At_4deg_Cold_cDNA_P Parameter: Temperature (deg C) Value: 4 vs. 22
  misc_feature: MA Experiment 108579 PARAMETER Experiment Name: At_4deg_Cold_cDNA_P Parameter: Timepoint (hr) Value: 6
  misc_feature: MA Experiment 108579 PARAMETER Experiment Name: At_4deg_Cold_cDNA_P Parameter: Tissue Value: Aerial
  misc_feature: MA Experiment ID: 20000112 Result: Down-regulated in Transcription
  misc_feature: MA Experiment 20000112 PARAMETER Experiment Name: At_42deg_Heat_cDNA_P Parameter: Temperature (deg C) Value: 42 vs. 22
  misc_feature: MA Experiment 20000112 PARAMETER Experiment Name: At_42deg_Heat_cDNA_P Parameter: Timepoint (hr) Value: 2
  misc_feature: MA Experiment 20000112 PARAMETER Experiment Name: At_42deg_Heat_cDNA_P Parameter: Tissue Value: Aerial
  misc_feature: MA Experiment ID: 20000180 Result: Down-regulated in Transcription
  misc_feature: MA Experiment 20000180 PARAMETER Experiment Name: At_Germinating_Seeds_P Parameter: Age (hr) Value: 24 vs. 0
  misc_feature: MA Experiment 20000180 PARAMETER Experiment Name: At_Germinating_Seeds_P Parameter: Tissue Value: Germinating Seeds
  misc_feature: MA Experiment ID: 20000436 Result: Down-regulated in Transcription
  misc_feature: MA Experiment 20000436 PARAMETER Experiment Name: At_Drought_P Parameter: Age (day) Value: 7
  misc_feature: MA Experiment 20000436 PARAMETER Experiment Name: At_Drought_P Parameter: Organism Value: A. thaliana
  misc_feature: MA Experiment 20000436 PARAMETER Experiment Name: At_Drought_P Parameter: Plant Line Value: WS
  misc_feature: MA Experiment 20000436 PARAMETER Experiment Name: At_Drought_P Parameter: Timepoint (hr) Value: 12
  misc_feature: MA Experiment 20000436 PARAMETER Experiment Name: At_Drought_P Parameter: Tissue Value: Whole Plant
  misc_feature: MA Experiment 20000436 PARAMETER Experiment Name: At_Drought_P Parameter: Treatment Value: Drought vs. No Drought
  misc_feature: MA Experiment ID: 20000794 Result: Down-regulated in Transcription
  misc_feature: MA Experiment 20000794 PARAMETER Experiment Name: At_Petals_P Parameter: Age (day) Value: 23-25 days
  misc_feature: MA Experiment 20000794 PARAMETER Experiment Name: At_Petals_P Parameter: Plant Line Value: WS
  misc_feature: MA Experiment 20000794 PARAMETER Experiment Name: At_Petals_P Parameter: Tissue Value: Petals vs. Whole plant
  misc_feature: MA Experiment ID: 20001247 Result: Down-regulated in Transcription
  misc_feature: MA Experiment 20001247 PARAMETER Experiment Name: At_Far-red-induction_P Parameter: Age (day) Value: 7
  misc_feature: MA Experiment 20001247 PARAMETER Experiment Name: At_Far-red-induction_P Parameter: Light Value: Far-red vs. White
  misc_feature: MA Experiment 20001247 PARAMETER Experiment Name: At_Far-red-induction_P Parameter: Organism Value: A. thaliana
  misc_feature: MA Experiment 20001247 PARAMETER Experiment Name: At_Far-red-induction_P Parameter: Plant Line Value: Columbia
  misc_feature: MA Experiment 20001247 PARAMETER Experiment Name: At_Far-red-induction_P Parameter: Timepoint (hr) Value: 1
  misc_feature: MA Experiment 20001247 PARAMETER Experiment Name: At_Far-red-induction_P Parameter: Tissue Value: Whole Plant
  misc_feature: MA Experiment ID: 20001558 Result: Up-regulated in Transcription
  misc_feature: MA Experiment 20001558 PARAMETER Experiment Name: At_Drought_Soil_Dry_P Parameter: Age (day) Value: 27
  misc_feature: MA Experiment 20001558 PARAMETER Experiment Name: At_Drought_Soil_Dry_P Parameter: Organism Value: A. thaliana
  misc_feature: MA Experiment 20001558 PARAMETER Experiment Name: At_Drought_Soil_Dry_P Parameter: Plant Line Value: WS
  misc_feature: MA Experiment 20001558 PARAMETER Experiment Name: At_Drought_Soil_Dry_P Parameter: Post Timepoint (hr) Value: 6
  misc_feature: MA Experiment 20001558 PARAMETER Experiment Name: At_Drought_Soil_Dry_P Parameter: Post-Treatment Value: Re-Water vs. No Drought
  misc_feature: MA Experiment 20001558 PARAMETER Experiment Name: At_Drought_Soil_Dry_P Parameter: Timepoint (day) Value: 13
  misc_feature: MA Experiment 20001558 PARAMETER Experiment Name: At_Drought_Soil_Dry_P Parameter: Treatment Value: Drought vs. No Drought
  misc_feature: MA Experiment ID: 20001560 Result: Up-regulated in Transcription
  misc_feature: MA Experiment 20001560 PARAMETER Experiment Name: At_Drought_Soil_Dry_P Parameter: Age (day) Value: 28
  misc_feature: MA Experiment 20001560 PARAMETER Experiment Name: At_Drought_Soil_Dry_P Parameter: Organism Value: A. thaliana
  misc_feature: MA Experiment 20001560 PARAMETER Experiment Name: At_Drought_Soil_Dry_P Parameter: Plant Line Value: WS
  misc_feature: MA Experiment 20001560 PARAMETER Experiment Name: At_Drought_Soil_Dry_P Parameter: Post Timepoint (hr) Value: None
  misc_feature: MA Experiment 20001560 PARAMETER Experiment Name: At_Drought_Soil_Dry_P Parameter: Post-Treatment Value: None
  misc_feature: MA Experiment 20001560 PARAMETER Experiment Name: At_Drought_Soil_Dry_P Parameter: Timepoint (day) Value: 14
  misc_feature: MA Experiment 20001560 PARAMETER Experiment Name: At_Drought_Soil_Dry_P Parameter: Treatment Value: Drought vs. No Drought
  misc_feature: MA Experiment ID: 20001757 Result: Up-regulated in Transcription
  misc_feature: MA Experiment 20001757 PARAMETER Experiment Name: At_50mM_NH4NO3_L-to-H_P Parameter: Timepoint (hr) Value: 6
  misc_feature: MA Experiment 20001757 PARAMETER Experiment Name: At_50mM_NH4NO3_L-to-H_P Parameter: Tissue Value: Leaf
  misc_feature: MA Experiment 20001757 PARAMETER Experiment Name: At_50mM_NH4NO3_L-to-H_P Parameter: Treatment Value: 50mM NH4NO3 vs 100mM Mannitol
agggttttttgggggtttggttcaagcttcatcgtcgtctctctgtctcttcaatttcattcgttttctgagataaaagtgagagagaaatctaaattcgagaggagaagttttaatttttctgagttagattcaatggaagagatcacggaaggagttaacaacatgaacttggctgttgatacccagaagaagaatcggattcaagtttccaacactaagaaaccattgttcttctacgtcaatctcgccaagaggtacatgcagcagtacactgatgtcgaattgtctgcactaggaatggctattgccactgttgttacggtcgctgagatattgaagaacaatggctttgctgttgaaaagaagatcatgacatcgactgtggatatcaaggatgattcaaggggtcgtcctgtgcagaaagctaagattgagatcacgcttgccaagtctgagaagtttgatgaactaatggctgcagctaatgaagagaaggaggctgcagaagcccaagagcaaaactagattgtttcaagttttttctgttcaacgatcttatttcttcgttccctatctctatctgcttaattttaagacacttctatttcgttaatttttggttcacttttttatttcaccttggattgtgtcctctgtacctctgagcatttttatttaaagatcgtaggaagtat

SEQ ID NO: 30533 - protein, 175 aa, Arabidopsis thaliana
  peptide (1)..(175): Ceres Seq. ID no. 12333386
  misc_feature (68)..(174): Homolog of NCBI NO: 8745040 NR Description: conserved hypothetical protein L6293.01
  misc_feature (68)..(174): Homolog of NCBI NO: 15029401 NR Description: unknown [Leishmania infantum]
  misc_feature (60)..(170): Homolog of NCBI NO: 15229322 NR Description: unknown protein; protein id: At3g04620.1
  misc_feature (66)..(174): Homolog of NCBI NO: 34910240 NR Description: OSJNBa0089K24.4 [Oryza sativa (japonica
  misc_feature (46)..(175): Homolog of NCBI NO: 18403464 NR Description: expressed protein
  misc_feature (46)..(175): Homolog of NCBI NO: 18397011 NR Description: expressed protein
RVFWGFGSSFIVVSLSLQFHSFSEIKVREKSKFERRSFNFSELDSMEEITEGVNNMNLAVDTQKKNRIQVSNTKKPLFFYVNLAKRYMQQYTDVELSALGMAIATVVTVAEILKNNGFAVEKKIMTSTVDIKDDSRGRPVQKAKIEITLAKSEKFDELMAAANEEKEAAEAQEQN

SEQ ID NO: 30534 - protein, 130 aa, Arabidopsis thaliana
  peptide (1)..(130): Ceres Seq. ID no. 12333387
  misc_feature (23)..(129): Homolog of NCBI NO: 8745040 NR Description: conserved hypothetical protein L6293.01
  misc_feature (23)..(129): Homolog of NCBI NO: 15029401 NR Description: unknown [Leishmania infantum]
  misc_feature (15)..(125): Homolog of NCBI NO: 15229322 NR Description: unknown protein; protein id: At3g04620.1
  misc_feature (21)..(129): Homolog of NCBI NO: 34910240 NR Description: OSJNBa0089K24.4 [Oryza sativa (japonica
  misc_feature (1)..(130): Homolog of NCBI NO: 18403464 NR Description: expressed protein
  misc_feature (1)..(130): Homolog of NCBI NO: 18397011 NR Description: expressed protein
MEEITEGVNNMNLAVDTQKKNRIQVSNTKKPLFFYVNLAKRYMQQYTDVELSALGMAIATVVTVAEILKNNGFAVEKKIMTSTVDIKDDSRGRPVQKAKIEITLAKSEKFDELMAAANEEKEAAEAQEQN

SEQ ID NO: 30535 - protein, 120 aa, Arabidopsis thaliana
  peptide (1)..(120): Ceres Seq. ID no. 12333388
  misc_feature (13)..(119): Homolog of NCBI NO: 8745040 NR Description: conserved hypothetical protein L6293.01
  misc_feature (13)..(119): Homolog of NCBI NO: 15029401 NR Description: unknown [Leishmania infantum]
  misc_feature (5)..(115): Homolog of NCBI NO: 15229322 NR Description: unknown protein; protein id: At3g04620.1
  misc_feature (11)..(119): Homolog of NCBI NO: 34910240 NR Description: OSJNBa0089K24.4 [Oryza sativa (japonica
  misc_feature (1)..(120): Homolog of NCBI NO: 18403464 NR Description: expressed protein
  misc_feature (1)..(120): Homolog of NCBI NO: 18397011 NR Description: expressed protein
MNLAVDTQKKNRIQVSNTKKPLFFYVNLAKRYMQQYTDVELSALGMAIATVVTVAEILKNNGFAVEKKIMTSTVDIKDDSRGRPVQKAKIEITLAKSEKFDELMAAANEEKEAAEAQEQN

SEQ ID NO: 30536 - DNA, 592 bp, Arabidopsis thaliana
  misc_feature (1)..(592): Ceres Seq. ID no. 12339207
  misc_feature: MA Experiment ID: 20000234 Result: Up-regulated in Transcription
  misc_feature: MA Experiment 20000234 PARAMETER Experiment Name: At_Siliques_P Parameter: Age (day) Value: 21
  misc_feature: MA Experiment 20000234 PARAMETER Experiment Name: At_Siliques_P Parameter: Organism Value: A. thaliana
  misc_feature: MA Experiment 20000234 PARAMETER Experiment Name: At_Siliques_P Parameter: Plant Line Value: WS
  misc_feature: MA Experiment 20000234 PARAMETER Experiment Name: At_Siliques_P Parameter: Tissue Value: Less Than 5mm Siliques vs. Whole Plant
  misc_feature: MA Experiment ID: 20000235 Result: Up-regulated in Transcription
  misc_feature: MA Experiment 20000235 PARAMETER Experiment Name: At_Siliques_P Parameter: Age (day) Value: 21
  misc_feature: MA Experiment 20000235 PARAMETER Experiment Name: At_Siliques_P Parameter: Organism Value: A. thaliana
  misc_feature: MA Experiment 20000235 PARAMETER Experiment Name: At_Siliques_P Parameter: Plant Line Value: WS
  misc_feature: MA Experiment 20000235 PARAMETER Experiment Name: At_Siliques_P Parameter: Tissue Value: 5-10mm Siliques vs. Whole Plant
  misc_feature: MA Experiment ID: 20000437 Result: Down-regulated in Transcription
  misc_feature: MA Experiment 20000437 PARAMETER Experiment Name: At_Drought_P Parameter: Age (day) Value: 8
  misc_feature: MA Experiment 20000437 PARAMETER Experiment Name: At_Drought_P Parameter: Organism Value: A. thaliana
  misc_feature: MA Experiment 20000437 PARAMETER Experiment Name: At_Drought_P Parameter: Plant Line Value: WS
  misc_feature: MA Experiment 20000437 PARAMETER Experiment Name: At_Drought_P Parameter: Timepoint (hr) Value: 24
  misc_feature: MA Experiment 20000437 PARAMETER Experiment Name: At_Drought_P Parameter: Tissue Value: Whole Plant
  misc_feature: MA Experiment 20000437 PARAMETER Experiment Name: At_Drought_P Parameter: Treatment Value: Drought vs. No Drought
  misc_feature: MA Experiment ID: 20000794 Result: Up-regulated in Transcription
  misc_feature: MA Experiment 20000794 PARAMETER Experiment Name: At_Petals_P Parameter: Age (day) Value: 23-25 days
  misc_feature: MA Experiment 20000794 PARAMETER Experiment Name: At_Petals_P Parameter: Plant Line Value: WS
  misc_feature: MA Experiment 20000794 PARAMETER Experiment Name: At_Petals_P Parameter: Tissue Value: Petals vs. Whole plant
  misc_feature: MA Experiment ID: 20001905 Result: Down-regulated in Transcription
  misc_feature: MA Experiment 20001905 PARAMETER Experiment Name: At_Drought_Reproduction_P Parameter: Age (day) Value: 40
  misc_feature: MA Experiment 20001905 PARAMETER Experiment Name: At_Drought_Reproduction_P Parameter: Organism Value: A. thaliana
  misc_feature: MA Experiment 20001905 PARAMETER Experiment Name: At_Drought_Reproduction_P Parameter: Plant Line Value: WS
  misc_feature: MA Experiment 20001905 PARAMETER Experiment Name: At_Drought_Reproduction_P Parameter: Timepoint (day) Value: 10
  misc_feature: MA Experiment 20001905 PARAMETER Experiment Name: At_Drought_Reproduction_P Parameter: Tissue Value: Rosettes
  misc_feature: MA Experiment 20001905 PARAMETER Experiment Name: At_Drought_Reproduction_P Parameter: Treatment Value: Drought vs. No Drought
ttttaccgaacaaggcgatgcgataacttttgaatccgaagttgacaagatttatctaagcacgccaacaaagattgctattttggatcacgagaaaaagaggactttcgttattcgcaaggacgggcttgctgatgctgtggtgtggaatccttgggataagaaatcaaagacgatctctgacttgggagatgaagactataagcatatgctttgtgtggaagctgcgtctatcgagagaccgatcacattgaaacccggtgaagaatggaaaggaagactcgaactctctgcagttccttctagttactccagtggacagcttgaccccaagaaagtccttgagtgactctttcaaactccaaaaacagcatctttctcccctctttaattgcagtactataaagaaacgagtgaaggagagcttaaagatcatcggatatactatttaaagaaactgagatattgaataaaaattgttgcttcttagttctcttttgtaaccacagacaataacgatttgcgaactgcgaaccaagcatgcctggtctagcatttgtctggtcagagtccaaaaggaattacaactttt

SEQ ID NO: 30537 - protein, 115 aa, Arabidopsis thaliana
  peptide (1)..(115): Ceres Seq. ID no. 12339208
  misc_feature (1)..(97): Pfam Name: Aldose 1-epimerase Pfam Description: Aldose 1-epimerase
  misc_feature (1)..(114): Homolog of NCBI NO: 16612258 NR Description: AT3g01590/F4P13_13 [Arabidopsis thaliana]
  misc_feature (1)..(114): Homolog of NCBI NO: 11281678 NR Description: hypothetical protein F18O22.290 - Arabidopsis
  misc_feature (1)..(114): Homolog of NCBI NO: 18395868 NR Description: expressed protein
  misc_feature (1)..(114): Homolog of NCBI NO: 28393808 NR Description: unknown protein [Arabidopsis thaliana]
  misc_feature (1)..(114): Homolog of NCBI NO: 18417396 NR Description: putative protein
  misc_feature (1)..(114): Homolog of NCBI NO: 2501555 NR Description: POSSIBLE APOSPORY-ASSOCIATED PROTEIN C
  misc_feature (1)..(115): Homolog of NCBI NO: 19387263 NR Description: putative apospory-associated protein C
  misc_feature (1)..(115): Homolog of NCBI NO: 40253263 NR Description: putative Aldose 1-epimerase
  misc_feature (2)..(115): Homolog of NCBI NO: 38344152 NR Description: OSJNBa0041A02.19 [Oryza sativa (japonica
  misc_feature (1)..(115): Homolog of NCBI NO: 15242099 NR Description: apospory-associated protein C
FTEQGDAITFESEVDKIYLSTPTKIAILDHEKKRTFVIRKDGLADAVVWNPWDKKSKTISDLGDEDYKHMLCVEAASIERPITLKPGEEWKGRLELSAVPSSYSSGQLDPKKVLE

SEQ ID NO: 30538 - DNA, 855 bp, Arabidopsis thaliana
  misc_feature (1)..(855): Ceres Seq. ID no. 13489834
  misc_feature: MA Experiment ID: 108434 Result: Up-regulated in Transcription
  misc_feature: MA Experiment 108434 PARAMETER Experiment Name: At_Root_Tips_cDNA_P Parameter: Tissue Value: Root Tips
  misc_feature: MA Experiment ID: 108461 Result: Up-regulated in Transcription
  misc_feature: MA Experiment 108461 PARAMETER Experiment Name: At_Germinating_Seeds_cDNA_P Parameter: Age (day) Value: 1 vs. 0
  misc_feature: MA Experiment 108461 PARAMETER Experiment Name: At_Germinating_Seeds_cDNA_P Parameter: Tissue Value: Germinating Seeds
  misc_feature: MA Experiment ID: 108462 Result: Up-regulated in Transcription
  misc_feature: MA Experiment 108462 PARAMETER Experiment Name: At_Germinating_Seeds_cDNA_P Parameter: Age (day) Value: 2 vs. 0
  misc_feature: MA Experiment 108462 PARAMETER Experiment Name: At_Germinating_Seeds_cDNA_P Parameter: Tissue Value: Germinating Seeds
  misc_feature: MA Experiment ID: 108463 Result: Up-regulated in Transcription
  misc_feature: MA Experiment 108463 PARAMETER Experiment Name: At_Germinating_Seeds_cDNA_P Parameter: Age (day) Value: 3 vs. 0
  misc_feature: MA Experiment 108463 PARAMETER Experiment Name: At_Germinating_Seeds_cDNA_P Parameter: Tissue Value: Germinating Seeds
  misc_feature: MA Experiment ID: 108464 Result: Up-regulated in Transcription
  misc_feature: MA Experiment 108464 PARAMETER Experiment Name: At_Germinating_Seeds_cDNA_P Parameter: Age (day) Value: 4 vs. 0
  misc_feature: MA Experiment 108464 PARAMETER Experiment Name: At_Germinating_Seeds_cDNA_P Parameter: Tissue Value: Germinating Seeds
  misc_feature: MA Experiment ID: 108572 Result: Down-regulated in Transcription
  misc_feature: MA Experiment 108572 PARAMETER Experiment Name: At_Drought_cDNA_P Parameter: Timepoint (hr) Value: 1
  misc_feature: MA Experiment 108572 PARAMETER Experiment Name: At_Drought_cDNA_P Parameter: Tissue Value: Aerial
  misc_feature: MA Experiment 108572 PARAMETER Experiment Name: At_Drought_cDNA_P Parameter: Treatment Value: Drought vs. No Drought
  misc_feature: MA Experiment ID: 20000111 Result: Down-regulated in Transcription
  misc_feature: MA Experiment 20000111 PARAMETER Experiment Name: At_42deg_Heat_cDNA_P Parameter: Temperature (deg C) Value: 42 vs. 22
  misc_feature: MA Experiment 20000111 PARAMETER Experiment Name: At_42deg_Heat_cDNA_P Parameter: Timepoint (hr) Value: 6
  misc_feature: MA Experiment 20000111 PARAMETER Experiment Name: At_42deg_Heat_cDNA_P Parameter: Tissue Value: Aerial
  misc_feature: MA Experiment ID: 20000112 Result: Down-regulated in Transcription
  misc_feature: MA Experiment 20000112 PARAMETER Experiment Name: At_42deg_Heat_cDNA_P Parameter: Temperature (deg C) Value: 42 vs. 22
  misc_feature: MA Experiment 20000112 PARAMETER Experiment Name: At_42deg_Heat_cDNA_P Parameter: Timepoint (hr) Value: 2
  misc_feature: MA Experiment 20000112 PARAMETER Experiment Name: At_42deg_Heat_cDNA_P Parameter: Tissue Value: Aerial
  misc_feature: MA Experiment ID: 20000113 Result: Down-regulated in Transcription
  misc_feature: MA Experiment 20000113 PARAMETER Experiment Name: At_42deg_Heat_cDNA_P Parameter: Temperature (deg C) Value: 42 vs. 22
  misc_feature: MA Experiment 20000113 PARAMETER Experiment Name: At_42deg_Heat_cDNA_P Parameter: Timepoint (hr) Value: 8
  misc_feature: MA Experiment 20000113 PARAMETER Experiment Name: At_42deg_Heat_cDNA_P Parameter: Tissue Value: Aerial
  misc_feature: MA Experiment ID: 20000144 Result: Down-regulated in Transcription
  misc_feature: MA Experiment 20000144 PARAMETER Experiment Name: At_42deg_Heat_cDNA_P Parameter: Temperature (deg C) Value: 42 vs. 22
  misc_feature: MA Experiment 20000144 PARAMETER Experiment Name: At_42deg_Heat_cDNA_P Parameter: Timepoint (hr) Value: 1
  misc_feature: MA Experiment 20000144 PARAMETER Experiment Name: At_42deg_Heat_cDNA_P Parameter: Tissue Value: Aerial
  misc_feature: MA Experiment ID: 20000180 Result: Up-regulated in Transcription
  misc_feature: MA Experiment 20000180 PARAMETER Experiment Name: At_Germinating_Seeds_P Parameter: Age (hr) Value: 24 vs. 0
  misc_feature: MA Experiment 20000180 PARAMETER Experiment Name: At_Germinating_Seeds_P Parameter: Tissue Value: Germinating Seeds
  misc_feature: MA Experiment ID: 20000184 Result: Up-regulated in Transcription
  misc_feature: MA Experiment 20000184 PARAMETER Experiment Name: At_Shoots__P Parameter: Age (day) Value: 7
  misc_feature: MA Experiment 20000184 PARAMETER Experiment Name: At_Shoots__P Parameter: Tissue Value: Shoots vs. Whole Plant
  misc_feature: MA Experiment ID: 20000436 Result: Down-regulated in Transcription
  misc_feature: MA Experiment 20000436 PARAMETER Experiment Name: At_Drought_P Parameter: Age (day) Value: 7
  misc_feature: MA Experiment 20000436 PARAMETER Experiment Name: At_Drought_P Parameter: Organism Value: A. thaliana
  misc_feature: MA Experiment 20000436 PARAMETER Experiment Name: At_Drought_P Parameter: Plant Line Value: WS
  misc_feature: MA Experiment 20000436 PARAMETER Experiment Name: At_Drought_P Parameter: Timepoint (hr) Value: 12
  misc_feature: MA Experiment 20000436 PARAMETER Experiment Name: At_Drought_P Parameter: Tissue Value: Whole Plant
  misc_feature: MA Experiment 20000436 PARAMETER Experiment Name: At_Drought_P Parameter: Treatment Value: Drought vs. No Drought
  misc_feature: MA Experiment ID: 20000437 Result: Down-regulated in Transcription
  misc_feature: MA Experiment 20000437 PARAMETER Experiment Name: At_Drought_P Parameter: Age (day) Value: 8
  misc_feature: MA Experiment 20000437 PARAMETER Experiment Name: At_Drought_P Parameter: Organism Value: A. thaliana
  misc_feature: MA Experiment 20000437 PARAMETER Experiment Name: At_Drought_P Parameter: Plant Line Value: WS
  misc_feature: MA Experiment 20000437 PARAMETER Experiment Name: At_Drought_P Parameter: Timepoint (hr) Value: 24
  misc_feature: MA Experiment 20000437 PARAMETER Experiment Name: At_Drought_P Parameter: Tissue Value: Whole Plant
  misc_feature: MA Experiment 20000437 PARAMETER Experiment Name: At_Drought_P Parameter: Treatment Value: Drought vs. No Drought
  misc_feature: MA Experiment ID: 20000495 Result: Up-regulated in Transcription
  misc_feature: MA Experiment 20000495 PARAMETER Experiment Name: At_Guard_Cells_P Parameter: Harvest Date Value: 8/2/2002
  misc_feature: MA Experiment 20000495 PARAMETER Experiment Name: At_Guard_Cells_P Parameter: Organism Value: A. thaliana
  misc_feature: MA Experiment 20000495 PARAMETER Experiment Name: At_Guard_Cells_P Parameter: Tissue Value: Guard Cells vs. Leaves
  misc_feature: MA Experiment ID: 20001555 Result: Down-regulated in Transcription
  misc_feature: MA Experiment 20001555 PARAMETER Experiment Name: At_Drought_Soil_Dry_P Parameter: Age (day) Value: 24
  misc_feature: MA Experiment 20001555 PARAMETER Experiment Name: At_Drought_Soil_Dry_P Parameter: Organism Value: A. thaliana
  misc_feature: MA Experiment 20001555 PARAMETER Experiment Name: At_Drought_Soil_Dry_P Parameter: Plant Line Value: WS
  misc_feature: MA Experiment 20001555 PARAMETER Experiment Name: At_Drought_Soil_Dry_P Parameter: Post Timepoint (hr) Value: None
  misc_feature: MA Experiment 20001555 PARAMETER Experiment Name: At_Drought_Soil_Dry_P Parameter: Post-Treatment Value: None
  misc_feature: MA Experiment 20001555 PARAMETER Experiment Name: At_Drought_Soil_Dry_P Parameter: Timepoint (day) Value: 10
  misc_feature: MA Experiment 20001555 PARAMETER Experiment Name: At_Drought_Soil_Dry_P Parameter: Treatment Value: Drought vs. No Drought
  misc_feature: MA Experiment ID: 20001556 Result: Down-regulated in Transcription
  misc_feature: MA Experiment 20001556 PARAMETER Experiment Name: At_Drought_Soil_Dry_P Parameter: Age (day) Value: 26
  misc_feature: MA Experiment 20001556 PARAMETER Experiment Name: At_Drought_Soil_Dry_P Parameter: Organism Value: A. thaliana
  misc_feature: MA Experiment 20001556 PARAMETER Experiment Name: At_Drought_Soil_Dry_P Parameter: Plant Line Value: WS
  misc_feature: MA Experiment 20001556 PARAMETER Experiment Name: At_Drought_Soil_Dry_P Parameter: Post Timepoint (hr) Value: None
  misc_feature: MA Experiment 20001556 PARAMETER Experiment Name: At_Drought_Soil_Dry_P Parameter: Post-Treatment Value: None
  misc_feature: MA Experiment 20001556 PARAMETER Experiment Name: At_Drought_Soil_Dry_P Parameter: Timepoint (day) Value: 12
  misc_feature: MA Experiment 20001556 PARAMETER Experiment Name: At_Drought_Soil_Dry_P Parameter: Treatment Value: Drought vs. No Drought
  misc_feature: MA Experiment ID: 20001558 Result: Down-regulated in Transcription
  misc_feature: MA Experiment 20001558 PARAMETER Experiment Name: At_Drought_Soil_Dry_P Parameter: Age (day) Value: 27
  misc_feature: MA Experiment 20001558 PARAMETER Experiment Name: At_Drought_Soil_Dry_P Parameter: Organism Value: A. thaliana
  misc_feature: MA Experiment 20001558 PARAMETER Experiment Name: At_Drought_Soil_Dry_P Parameter: Plant Line Value: WS
  misc_feature: MA Experiment 20001558 PARAMETER Experiment Name: At_Drought_Soil_Dry_P Parameter: Post Timepoint (hr) Value: 6
  misc_feature: MA Experiment 20001558 PARAMETER Experiment Name: At_Drought_Soil_Dry_P Parameter: Post-Treatment Value: Re-Water vs. No Drought
  misc_feature: MA Experiment 20001558 PARAMETER Experiment Name: At_Drought_Soil_Dry_P Parameter: Timepoint (day) Value: 13
  misc_feature: MA Experiment 20001558 PARAMETER Experiment Name: At_Drought_Soil_Dry_P Parameter: Treatment Value: Drought vs. No Drought
  misc_feature: MA Experiment ID: 20001560 Result: Up-regulated in Transcription
  misc_feature: MA Experiment 20001560 PARAMETER Experiment Name: At_Drought_Soil_Dry_P Parameter: Age (day) Value: 28
  misc_feature: MA Experiment 20001560 PARAMETER Experiment Name: At_Drought_Soil_Dry_P Parameter: Organism Value: A. thaliana
  misc_feature: MA Experiment 20001560 PARAMETER Experiment Name: At_Drought_Soil_Dry_P Parameter: Plant Line Value: WS
  misc_feature: MA Experiment 20001560 PARAMETER Experiment Name: At_Drought_Soil_Dry_P Parameter: Post Timepoint (hr) Value: None
  misc_feature: MA Experiment 20001560 PARAMETER Experiment Name: At_Drought_Soil_Dry_P Parameter: Post-Treatment Value: None
  misc_feature: MA Experiment 20001560 PARAMETER Experiment Name: At_Drought_Soil_Dry_P Parameter: Timepoint (day) Value: 14
  misc_feature: MA Experiment 20001560 PARAMETER Experiment Name: At_Drought_Soil_Dry_P Parameter: Treatment Value: Drought vs. No Drought
actaacttctacataaacaaactcgttgcgctcttctcaattccacgaatcacacactcttcttcttcttctgttcatcaaagaaaacgaaacccatttctcaaaatccaaaattttcaaaaactcaaaactcatcatgggtttcatttcttcttcatcaccagtagaagagtctcattaccatacacacaagatcttccttttctccaactacatccttctcggcgctgcttcaagttgtatcttcctcacactctctctccgtctaatcccttccatctgcggattcctcctcatcctcctccacgccaccacaatcgccgccgcagtctcaggctgcgctgctgcatcttgcggaagaaaccgttggtacgccgctcacatggttgcaactgtgctcactgctatattccaaggctctgtctctgttctcatcttcaccaacacgtctaaattcctcgggagtcttaagtcgtatgtgcgtgacgaagatgctgctgtgattttgaaactcggtggtggtctttgtattgtgatcttttgtcttgattggatcgttcttgtgtgtgctttcttcttgaagtactatgcttatgtcgatggtggtgatggcgttgcgatgaagagaactggtaaggttcagagtgaggagaatccgaaggactggccatggccgttccaagtttaaagtttgtgtccttttgttttgtggtgagaactgttgagttagatcaatatcaaatgttggttttatggttctgtttcggtgggtattattgtgatttgttcatttgttttttgagtgtttgatgtaattcgtcaatgatctgttacatatataaagtcttttcttat

SEQ ID NO: 30539 - protein, 183 aa, Arabidopsis thaliana
  peptide (1)..(183): Ceres Seq. ID no. 13489835
  misc_feature (16)..(159): Homolog of NCBI NO: 34907616 NR Description: contains EST C27797(C52876)~unknown protein
  misc_feature (6)..(183): Homolog of NCBI NO: 38345379 NR Description: OSJNBa0067K08.8 [Oryza sativa (japonica
  misc_feature (10)..(183): Homolog of NCBI NO: 15239407 NR Description: hypothetical protein [Arabidopsis thaliana]
  misc_feature (1)..(183): Homolog of NCBI NO: 15239379 NR Description: expressed protein [Arabidopsis thaliana]
  misc_feature (1)..(183): Homolog of NCBI NO: 18396262 NR Description: expressed protein [Arabidopsis thaliana]
  misc_feature (1)..(183): Homolog of NCBI NO: 21553926 NR Description: unknown [Arabidopsis thaliana]
  misc_feature (1)..(183): Homolog of NCBI NO: 15237310 NR Description: expressed protein [Arabidopsis thaliana]
  misc_feature (1)..(183): Homolog of NCBI NO: 21703131 NR Description: AT5g16250/T21H19_170 [Arabidopsis thaliana]
MGFISSSSPVEESHYHTHKIFLFSNYILLGAASSCIFLTLSLRLIPSICGFLLILLHATTIAAAVSGCAAASCGRNRWYAAHMVATVLTAIFQGSVSVLIFTNTSKFLGSLKSYVRDEDAAVILKLGGGLCIVIFCLDWIVLVCAFFLKYYAYVDGGDGVAMKRTGKVQSEENPKDWPWPFQV

SEQ ID NO: 30540 - protein, 150 aa, Arabidopsis thaliana
  peptide (1)..(150): Ceres Seq. ID no. 13489836
TNFYINKLVALFSIPRITHSSSSSVHQRKRNPFLKIQNFQKLKTHHGFHFFFITSRRVSLPYTQDLPFLQLHPSRRCFKLYLPHTLSPSNPFHLRIPPHPPPRHHNRRRSLRLRCCILRKKPLVRRSHGCNCAHCYIPRLCLCSHLHQHV

SEQ ID NO: 30541 - protein, 101 aa, Arabidopsis thaliana
  peptide (1)..(101): Ceres Seq. ID no. 13489837
  misc_feature (1)..(77): Homolog of NCBI NO: 34907616 NR Description: contains EST C27797(C52876)~unknown protein
  misc_feature (1)..(101): Homolog of NCBI NO: 38345379 NR Description: OSJNBa0067K08.8 [Oryza sativa (japonica
  misc_feature (1)..(101): Homolog of NCBI NO: 15239407 NR Description: hypothetical protein [Arabidopsis thaliana]
  misc_feature (1)..(101): Homolog of NCBI NO: 15239379 NR Description: expressed protein [Arabidopsis thaliana]
  misc_feature (1)..(101): Homolog of NCBI NO: 18396262 NR Description: expressed protein [Arabidopsis thaliana]
  misc_feature (1)..(101): Homolog of NCBI NO: 21553926 NR Description: unknown [Arabidopsis thaliana]
  misc_feature (1)..(101): Homolog of NCBI NO: 15237310 NR Description: expressed protein [Arabidopsis thaliana]
  misc_feature (1)..(101): Homolog of NCBI NO: 21703131 NR Description: AT5g16250/T21H19_170 [Arabidopsis thaliana]
MVATVLTAIFQGSVSVLIFTNTSKFLGSLKSYVRDEDAAVILKLGGGLCIVIFCLDWIVLVCAFFLKYYAYVDGGDGVAMKRTGKVQSEENPKDWPWPFQV

SEQ ID NO: 30542 - DNA, 901 bp, Arabidopsis thaliana
  misc_feature (1)..(901): Ceres Seq. ID no. 12332065
  misc_feature: MA Experiment ID: 108469 Result: Up-regulated in Transcription
  misc_feature: MA Experiment ID: 108579 Result: Down-regulated in Transcription
  misc_feature: MA Experiment 108579 PARAMETER Experiment Name: At_4deg_Cold_cDNA_P Parameter: Temperature (deg C) Value: 4 vs. 22
  misc_feature: MA Experiment 108579 PARAMETER Experiment Name: At_4deg_Cold_cDNA_P Parameter: Timepoint (hr) Value: 6
  misc_feature: MA Experiment 108579 PARAMETER Experiment Name: At_4deg_Cold_cDNA_P Parameter: Tissue Value: Aerial
  misc_feature: MA Experiment ID: 20000227 Result: Down-regulated in Transcription
  misc_feature: MA Experiment 20000227 PARAMETER Experiment Name: At_Root-Tips-vs-Tops_P Parameter: Tissue Value: Root Tips vs. Root Tops
  misc_feature: MA Experiment ID: 20001247 Result: Up-regulated in Transcription
  misc_feature: MA Experiment 20001247 PARAMETER Experiment Name: At_Far-red-induction_P Parameter: Age (day) Value: 7
  misc_feature: MA Experiment 20001247 PARAMETER Experiment Name: At_Far-red-induction_P Parameter: Light Value: Far-red vs. White
  misc_feature: MA Experiment 20001247 PARAMETER Experiment Name: At_Far-red-induction_P Parameter: Organism Value: A. thaliana
  misc_feature: MA Experiment 20001247 PARAMETER Experiment Name: At_Far-red-induction_P Parameter: Plant Line Value: Columbia
  misc_feature: MA Experiment 20001247 PARAMETER Experiment Name: At_Far-red-induction_P Parameter: Timepoint (hr) Value: 1
  misc_feature: MA Experiment 20001247 PARAMETER Experiment Name: At_Far-red-induction_P Parameter: Tissue Value: Whole Plant
  misc_feature: MA Experiment ID: 20001248 Result: Up-regulated in Transcription
  misc_feature: MA Experiment 20001248 PARAMETER Experiment Name: At_Far-red-induction_P Parameter: Age (day) Value: 7
  misc_feature: MA Experiment 20001248 PARAMETER Experiment Name: At_Far-red-induction_P Parameter: Light Value: Far-red vs. White
  misc_feature: MA Experiment 20001248 PARAMETER Experiment Name: At_Far-red-induction_P Parameter: Organism Value: A. thaliana
  misc_feature: MA Experiment 20001248 PARAMETER Experiment Name: At_Far-red-induction_P Parameter: Plant Line Value: Columbia
  misc_feature: MA Experiment 20001248 PARAMETER Experiment Name: At_Far-red-induction_P Parameter: Timepoint (hr) Value: 4
  misc_feature: MA Experiment 20001248 PARAMETER Experiment Name: At_Far-red-induction_P Parameter: Tissue Value: Whole Plant
  misc_feature: MA Experiment ID: 20001451 Result: Up-regulated in Transcription
  misc_feature: MA Experiment 20001451 PARAMETER Experiment Name: At_Far-red-induction_P Parameter: Age (day) Value: 7
  misc_feature: MA Experiment 20001451 PARAMETER Experiment Name: At_Far-red-induction_P Parameter: Light Value: Far-red vs. White
  misc_feature: MA Experiment 20001451 PARAMETER Experiment Name: At_Far-red-induction_P Parameter: Organism Value: A. thaliana
  misc_feature: MA Experiment 20001451 PARAMETER Experiment Name: At_Far-red-induction_P Parameter: Plant Line Value: Columbia
  misc_feature: MA Experiment 20001451 PARAMETER Experiment Name: At_Far-red-induction_P Parameter: Timepoint (hr) Value: 24
  misc_feature: MA Experiment 20001451 PARAMETER Experiment Name: At_Far-red-induction_P Parameter: Tissue Value: Whole Plant
aacgaatctctatctctctctagattttggggattttgctctctctccctctctgtctctctttggtgctcgtagctttctgtctcccaattgagagaaggagggagatagaaacgtcgatgggcttaattgtggatgatgataacgatggagaagttttgattccgccgccgaatttttcaatggtagaagatggaatttaccgatctgggtttcctgagctggagaatttcggattcttatcaaccctaaatcttcgatccatcatttatctgtgtcctgagccataccctgaggacaatctcaagtctcttgcatccaacaacattaagcttttccagttcgggattgaaggcaaaacggatcctccaactcctatgccaaaggatacagtgttgagtgctcttagagtactagttgatgttcgaaatcatccaattcttatccactgtaagcgcggaaagcataggacaggttgtcttgtgggatgcttgaggaaagtgcagaactggtgcttgtcatcggttctcgaggaataccagaagtgtgcgggtttgaaatggagacaaagagatttaaggttcattgaggatttcgatgtgctcagattgaagcaatgtctatacagcatcatatatcagtacaatgggtatggtctcaagagaagaaagttgctgtatcaagaagagaatgttgttcaagaacagcaaaaacctcaagccaccaaaggataaagaaagagatttgaaatcggatttttttttgtttctttacattttgtcgtgatgatgatgatgatttttttgagaataggatagttctttaaaaagcttgagaaaacagaggatttgatttggtctctctctatcttttttttacggttagagaaatttacagattg

SEQ ID NO: 30543 - protein, 204 aa, Arabidopsis thaliana
  peptide (1)..(204): Ceres Seq. ID no. 12332066
  misc_feature (14)..(172): Pfam Name: Tyrosine phosphatase family Pfam Description: Tyrosine phosphatase family
  misc_feature (5)..(165): Homolog of NCBI NO: 7487406 NR Description: hypothetical protein T24M8.4 - Arabidopsis
  misc_feature (14)..(166): Homolog of NCBI NO: 6324296 NR Description: Synthetic interaction with Whi2; Siw14p
  misc_feature (5)..(165): Homolog of NCBI NO: 18412419 NR Description: putative protein
  misc_feature (14)..(86): Homolog of NCBI NO: 30102538 NR Description: At2g32960 [Arabidopsis thaliana]
  misc_feature (80)..(165): Homolog of NCBI NO: 30102538 NR Description: At2g32960 [Arabidopsis thaliana]
  misc_feature (14)..(165): Homolog of NCBI NO: 15225761 NR Description: unknown protein; protein id: At2g32960.1
  misc_feature (14)..(161): Homolog of NCBI NO: 15220383 NR Description: unkown protein; protein id: At1g05000.1
  misc_feature (7)..(203): Homolog of NCBI NO: 15232985 NR Description: unknown protein; protein id: At3g02800.1
  misc_feature (1)..(204): Homolog of NCBI NO: 15237359 NR Description: putative protein
  misc_feature (1)..(204): Homolog of NCBI NO: 21553927 NR Description: unknown [Arabidopsis thaliana]
MGLIVDDDNDGEVLIPPPNFSMVEDGIYRSGFPELENFGFLSTLNLRSIIYLCPEPYPEDNLKSLASNNIKLFQFGIEGKTDPPTPMPKDTVLSALRVLVDVRNHPILIHCKRGKHRTGCLVGCLRKVQNWCLSSVLEEYQKCAGLKWRQRDLRFIEDFDVLRLKQCLYSIIYQYNGYGLKRRKLLYQEENVVQEQQKPQATKG

SEQ ID NO: 30544 - protein, 183 aa, Arabidopsis thaliana
  peptide (1)..(183): Ceres Seq. ID no. 12332067
  misc_feature (1)..(151): Pfam Name: Tyrosine phosphatase family Pfam Description: Tyrosine phosphatase family
  misc_feature (1)..(144): Homolog of NCBI NO: 7487406 NR Description: hypothetical protein T24M8.4 - Arabidopsis
  misc_feature (1)..(145): Homolog of NCBI NO: 6324296 NR Description: Synthetic interaction with Whi2; Siw14p
  misc_feature (1)..(144): Homolog of NCBI NO: 18412419 NR Description: putative protein
  misc_feature (1)..(65): Homolog of NCBI NO: 30102538 NR Description: At2g32960 [Arabidopsis thaliana]
  misc_feature (59)..(144): Homolog of NCBI NO: 30102538 NR Description: At2g32960 [Arabidopsis thaliana]
  misc_feature (1)..(144): Homolog of NCBI NO: 15225761 NR Description: unknown protein; protein id: At2g32960.1
  misc_feature (1)..(140): Homolog of NCBI NO: 15220383 NR Description: unkown protein; protein id: At1g05000.1
  misc_feature (1)..(182): Homolog of NCBI NO: 15232985 NR Description: unknown protein; protein id: At3g02800.1
  misc_feature (1)..(183): Homolog of NCBI NO: 15237359 NR Description: putative protein
  misc_feature (1)..(183): Homolog of NCBI NO: 21553927 NR Description: unknown [Arabidopsis thaliana]
MVEDGIYRSGFPELENFGFLSTLNLRSIIYLCPEPYPEDNLKSLASNNIKLFQFGIEGKTDPPTPMPKDTVLSALRVLVDVRNHPILIHCKRGKHRTGCLVGCLRKVQNWCLSSVLEEYQKCAGLKWRQRDLRFIEDFDVLRLKQCLYSIIYQYNGYGLKRRKLLYQEENVVQEQQKPQATKG

SEQ ID NO: 30545 - protein, 118 aa, Arabidopsis thaliana
  peptide (1)..(118): Ceres Seq. ID no. 12332068
  misc_feature (1)..(86): Pfam Name: Tyrosine phosphatase family Pfam Description: Tyrosine phosphatase family
  misc_feature (1)..(71): Homolog of NCBI NO: 15027525 NR Description: conserved hypothetical protein [Leishmania major]
  misc_feature (1)..(79): Homolog of NCBI NO: 7487406 NR Description: hypothetical protein T24M8.4 - Arabidopsis
  misc_feature (1)..(80): Homolog of NCBI NO: 6324296 NR Description: Synthetic interaction with Whi2; Siw14p
  misc_feature (1)..(79): Homolog of NCBI NO: 18412419 NR Description: putative protein
  misc_feature (1)..(79): Homolog of NCBI NO: 30102538 NR Description: At2g32960 [Arabidopsis thaliana]
  misc_feature (1)..(79): Homolog of NCBI NO: 15225761 NR Description: unknown protein; protein id: At2g32960.1
  misc_feature (1)..(75): Homolog of NCBI NO: 15220383 NR Description: unkown protein; protein id: At1g05000.1
  misc_feature (1)..(117): Homolog of NCBI NO: 15232985 NR Description: unknown protein; protein id: At3g02800.1
  misc_feature (1)..(118): Homolog of NCBI NO: 15237359 NR Description: putative protein
  misc_feature (1)..(118): Homolog of NCBI NO: 21553927 NR Description: unknown [Arabidopsis thaliana]
MPKDTVLSALRVLVDVRNHPILIHCKRGKHRTGCLVGCLRKVQNWCLSSVLEEYQKCAGLKWRQRDLRFIEDFDVLRLKQCLYSIIYQYNGYGLKRRKLLYQEENVVQEQQKPQATKG

SEQ ID NO: 30546 - DNA, 1052 bp, Arabidopsis thaliana
  misc_feature (1)..(1052): Ceres Seq. ID no. 12327211
  misc_feature: MA Experiment ID: 108461 Result: Up-regulated in Transcription
  misc_feature: MA Experiment 108461 PARAMETER Experiment Name: At_Germinating_Seeds_cDNA_P Parameter: Age (day) Value: 1 vs. 0
  misc_feature: MA Experiment 108461 PARAMETER Experiment Name: At_Germinating_Seeds_cDNA_P Parameter: Tissue Value: Germinating Seeds
  misc_feature: MA Experiment ID: 108462 Result: Up-regulated in Transcription
  misc_feature: MA Experiment 108462 PARAMETER Experiment Name: At_Germinating_Seeds_cDNA_P Parameter: Age (day) Value: 2 vs. 0
  misc_feature: MA Experiment 108462 PARAMETER Experiment Name: At_Germinating_Seeds_cDNA_P Parameter: Tissue Value: Germinating Seeds
  misc_feature: MA Experiment ID: 20000111 Result: Down-regulated in Transcription
  misc_feature: MA Experiment 20000111 PARAMETER Experiment Name: At_42deg_Heat_cDNA_P Parameter: Temperature (deg C) Value: 42 vs. 22
  misc_feature: MA Experiment 20000111 PARAMETER Experiment Name: At_42deg_Heat_cDNA_P Parameter: Timepoint (hr) Value: 6
  misc_feature: MA Experiment 20000111 PARAMETER Experiment Name: At_42deg_Heat_cDNA_P Parameter: Tissue Value: Aerial
  misc_feature: MA Experiment ID: 20000113 Result: Down-regulated in Transcription
  misc_feature: MA Experiment 20000113 PARAMETER Experiment Name: At_42deg_Heat_cDNA_P Parameter: Temperature (deg C) Value: 42 vs. 22
  misc_feature: MA Experiment 20000113 PARAMETER Experiment Name: At_42deg_Heat_cDNA_P Parameter: Timepoint (hr) Value: 8
  misc_feature: MA Experiment 20000113 PARAMETER Experiment Name: At_42deg_Heat_cDNA_P Parameter: Tissue Value: Aerial
  misc_feature: MA Experiment ID: 20000224 Result: Up-regulated in Transcription
  misc_feature: MA Experiment ID: 20000234 Result: Up-regulated in Transcription
  misc_feature: MA Experiment 20000234 PARAMETER Experiment Name: At_Siliques_P Parameter: Age (day) Value: 21
  misc_feature: MA Experiment 20000234 PARAMETER Experiment Name: At_Siliques_P Parameter: Organism Value: A. thaliana
  misc_feature: MA Experiment 20000234 PARAMETER Experiment Name: At_Siliques_P Parameter: Plant Line Value: WS
  misc_feature: MA Experiment 20000234 PARAMETER Experiment Name: At_Siliques_P Parameter: Tissue Value: Less Than 5mm Siliques vs. Whole Plant
  misc_feature: MA Experiment ID: 20000235 Result: Up-regulated in Transcription
  misc_feature: MA Experiment 20000235 PARAMETER Experiment Name: At_Siliques_P Parameter: Age (day) Value: 21
  misc_feature: MA Experiment 20000235 PARAMETER Experiment Name: At_Siliques_P Parameter: Organism Value: A. thaliana
  misc_feature: MA Experiment 20000235 PARAMETER Experiment Name: At_Siliques_P Parameter: Plant Line Value: WS
  misc_feature: MA Experiment 20000235 PARAMETER Experiment Name: At_Siliques_P Parameter: Tissue Value: 5-10mm Siliques vs. Whole Plant
  misc_feature: MA Experiment ID: 20000264 Result: Up-regulated in Transcription
  misc_feature: MA Experiment 20000264 PARAMETER Experiment Name: At_Open_Flower_P Parameter: Age (day) Value: 21
  misc_feature: MA Experiment 20000264 PARAMETER Experiment Name: At_Open_Flower_P Parameter: Plant Line Value: WS
  misc_feature: MA Experiment 20000264 PARAMETER Experiment Name: At_Open_Flower_P Parameter: Tissue Value: Open Flower vs. Whole Plant
  misc_feature: MA Experiment ID: 20000265 Result: Up-regulated in Transcription
  misc_feature: MA Experiment 20000265 PARAMETER Experiment Name: At_Open_Flower_P Parameter: Age (day) Value: 21
  misc_feature: MA Experiment 20000265 PARAMETER Experiment Name: At_Open_Flower_P Parameter: Plant Line Value: WS
  misc_feature: MA Experiment 20000265 PARAMETER Experiment Name: At_Open_Flower_P Parameter: Tissue Value: Closed Flower vs. Whole Plant
  misc_feature: MA Experiment ID: 20000286 Result: Up-regulated in Transcription
  misc_feature: MA Experiment 20000286 PARAMETER Experiment Name: At_Open_Flower_P Parameter: Age (day) Value: 21
  misc_feature: MA Experiment 20000286 PARAMETER Experiment Name: At_Open_Flower_P Parameter: Plant Line Value: WS
  misc_feature: MA Experiment 20000286 PARAMETER Experiment Name: At_Open_Flower_P Parameter: Tissue Value: Half Open vs. Whole Plant
  misc_feature: MA Experiment ID: 20000451 Result: Down-regulated in Transcription
  misc_feature: MA Experiment 20000451 PARAMETER Experiment Name: At_CS6879_Shoots-Roots_P Parameter: Age (day) Value: 14
  misc_feature: MA Experiment 20000451 PARAMETER Experiment Name: At_CS6879_Shoots-Roots_P Parameter: Organism Value: A. thaliana
  misc_feature: MA Experiment 20000451 PARAMETER Experiment Name: At_CS6879_Shoots-Roots_P Parameter: Plant Line Value: CS6879 vs. WS
  misc_feature: MA Experiment 20000451 PARAMETER Experiment Name: At_CS6879_Shoots-Roots_P Parameter: Tissue Value: Roots
  misc_feature: MA Experiment ID: 20000794 Result: Up-regulated in Transcription
  misc_feature: MA Experiment 20000794 PARAMETER Experiment Name: At_Petals_P Parameter: Age (day) Value: 23-25 days
  misc_feature: MA Experiment 20000794 PARAMETER Experiment Name: At_Petals_P Parameter: Plant Line Value: WS
  misc_feature: MA Experiment 20000794 PARAMETER Experiment Name: At_Petals_P Parameter: Tissue Value: Petals vs. Whole plant
  misc_feature: MA Experiment ID: 20001905 Result: Down-regulated in Transcription
  misc_feature: MA Experiment 20001905 PARAMETER Experiment Name: At_Drought_Reproduction_P Parameter: Age (day) Value: 40
  misc_feature: MA Experiment 20001905 PARAMETER Experiment Name: At_Drought_Reproduction_P Parameter: Organism Value: A. thaliana
  misc_feature: MA Experiment 20001905 PARAMETER Experiment Name: At_Drought_Reproduction_P Parameter: Plant Line Value: WS
  misc_feature: MA Experiment 20001905 PARAMETER Experiment Name: At_Drought_Reproduction_P Parameter: Timepoint (day) Value: 10
  misc_feature: MA Experiment 20001905 PARAMETER Experiment Name: At_Drought_Reproduction_P Parameter: Tissue Value: Rosettes
  misc_feature: MA Experiment 20001905 PARAMETER Experiment Name: At_Drought_Reproduction_P Parameter: Treatment Value: Drought vs. No Drought
  misc_feature: MA Experiment ID: 20001911 Result: Down-regulated in Transcription
  misc_feature: MA Experiment 20001911 PARAMETER Experiment Name: At_Drought_Reproduction_P Parameter: Age (day) Value: 40
  misc_feature: MA Experiment 20001911 PARAMETER Experiment Name: At_Drought_Reproduction_P Parameter: Organism Value: A. thaliana
  misc_feature: MA Experiment 20001911 PARAMETER Experiment Name: At_Drought_Reproduction_P Parameter: Plant Line Value: WS
  misc_feature: MA Experiment 20001911 PARAMETER Experiment Name: At_Drought_Reproduction_P Parameter: Timepoint (day) Value: 10
  misc_feature: MA Experiment 20001911 PARAMETER Experiment Name: At_Drought_Reproduction_P Parameter: Tissue Value: Flowers
  misc_feature: MA Experiment 20001911 PARAMETER Experiment Name: At_Drought_Reproduction_P Parameter: Treatment Value: Drought vs. No Drought
acattttcgtcttcgtctccaatgattgctctctcactctcagtctcactcacatcattaccattctccttcgcgctttcatcgactccgtgcaaatcacgcgcctctcctccacgtagcaccgtctcgttgagttcttccaggagacgacaagatcgccggcgatcaattgaggctatgtctcaggtgatggaattggaagatgaatccgatttcgagaagcttctctcatcggataatcggatctcgatcactggattcggttctcttctctccgagagaagcgcgaggagtacattcccagatttggagaatttcagaatcgcgaaattgcaaggattcagaagagttttcgctcattctgctccgatcttcttcgagcgtggcatcgcgaatcctgaaactaaggagatctcaagcttgagtgttgagccatgtgaaggagagagccttgtggttactgtcttcgagatcaaaagctcagagattccggcttttattggaagggagcttgagttccggtttctcgctgttgttcctgaaacattggaaggcaaaccttacaccaattctgcggtactttgtggtcgatacagtgatgaggagtttttccagattagatgcaaaggaaacaaagagatttactttcaacattatggaagattcaagatcgataagatatggcgggacgacatcttaccttgtcgtctctatctaagacactgtgtgttggctgctaagaatctgggagatgaagcttataataactttctggatcatacattcttgggagatcgaaaaacaaccatcagagagtatttaagcagcacagggtctggtatcatggaagaagaaccaccggaggctctaaagtctagatatggaggttgatcaaaaaccaacaaaaaaagttaaactgatttttatcaagcttcaaacgttatcgaagctagttataaaattaagaaaacaaaaatcaacaaatgtcccacatcgggagtcttagagaagggtagcgtttctttgggctatataagagaatgagttttgtc

SEQ ID NO: 30547 - protein, 296 aa, Arabidopsis thaliana
  peptide (1)..(296): Ceres Seq. ID no. 12327212
  misc_feature (90)..(296): Homolog of NCBI NO: 26452147 NR Description: unknown protein [Arabidopsis thaliana]
  misc_feature (60)..(296): Homolog of NCBI NO: 30683505 NR Description: expressed protein [Arabidopsis thaliana]
  misc_feature (8)..(296): Homolog of NCBI NO: 7485175 NR Description: hypothetical protein - Arabidopsis thaliana
TFSSSSPMIALSLSVSLTSLPFSFALSSTPCKSRASPPRSTVSLSSSRRRQDRRRSIEAMSQVMELEDESDFEKLLSSDNRISITGFGSLLSERSARSTFPDLENFRIAKLQGFRRVFAHSAPIFFERGIANPETKEISSLSVEPCEGESLVVTVFEIKSSEIPAFIGRELEFRFLAVVPETLEGKPYTNSAVLCGRYSDEEFFQIRCKGNKEIYFQHYGRFKIDKIWRDDILPCRLYLRHCVLAAKNLGDEAYNNFLDHTFLGDRKTTIREYLSSTGSGIMEEEPPEALKSRYGG

SEQ ID NO: 30548 - protein, 289 aa, Arabidopsis thaliana
  peptide (1)..(289): Ceres Seq. ID no. 12327213
  misc_feature (83)..(289): Homolog of NCBI NO: 26452147 NR Description: unknown protein [Arabidopsis thaliana]
  misc_feature (53)..(289): Homolog of NCBI NO: 30683505 NR Description: expressed protein [Arabidopsis thaliana]
  misc_feature (1)..(289): Homolog of NCBI NO: 7485175 NR Description: hypothetical protein - Arabidopsis thaliana
MIALSLSVSLTSLPFSFALSSTPCKSRASPPRSTVSLSSSRRRQDRRRSIEAMSQVMELEDESDFEKLLSSDNRISITGFGSLLSERSARSTFPDLENFRIAKLQGFRRVFAHSAPIFFERGIANPETKEISSLSVEPCEGESLVVTVFEIKSSEIPAFIGRELEFRFLAVVPETLEGKPYTNSAVLCGRYSDEEFFQIRCKGNKEIYFQHYGRFKIDKIWRDDILPCRLYLRHCVLAAKNLGDEAYNNFLDHTFLGDRKTTIREYLSSTGSGIMEEEPPEALKSRYGG

SEQ ID NO: 30549 - protein, 237 aa, Arabidopsis thaliana
  peptide (1)..(237): Ceres Seq. ID no. 12327214
  misc_feature (31)..(237): Homolog of NCBI NO: 26452147 NR Description: unknown protein [Arabidopsis thaliana]
  misc_feature (1)..(237): Homolog of NCBI NO: 30683505 NR Description: expressed protein [Arabidopsis thaliana]
  misc_feature (1)..(237): Homolog of NCBI NO: 7485175 NR Description: hypothetical protein - Arabidopsis thaliana
MSQVMELEDESDFEKLLSSDNRISITGFGSLLSERSARSTFPDLENFRIAKLQGFRRVFAHSAPIFFERGIANPETKEISSLSVEPCEGESLVVTVFEIKSSEIPAFIGRELEFRFLAVVPETLEGKPYTNSAVLCGRYSDEEFFQIRCKGNKEIYFQHYGRFKIDKIWRDDILPCRLYLRHCVLAAKNLGDEAYNNFLDHTFLGDRKTTIREYLSSTGSGIMEEEPPEALKSRYGG

SEQ ID NO: 30550 - DNA, 955 bp, Arabidopsis thaliana
  misc_feature (1)..(955): Ceres Seq. ID no. 12579911
  misc_feature: MA Experiment ID: 108462 Result: Up-regulated in Transcription
  misc_feature: MA Experiment 108462 PARAMETER Experiment Name: At_Germinating_Seeds_cDNA_P Parameter: Age (day) Value: 2 vs. 0
  misc_feature: MA Experiment 108462 PARAMETER Experiment Name: At_Germinating_Seeds_cDNA_P Parameter: Tissue Value: Germinating Seeds
  misc_feature: MA Experiment ID: 108463 Result: Up-regulated in Transcription
  misc_feature: MA Experiment 108463 PARAMETER Experiment Name: At_Germinating_Seeds_cDNA_P Parameter: Age (day) Value: 3 vs. 0
  misc_feature: MA Experiment 108463 PARAMETER Experiment Name: At_Germinating_Seeds_cDNA_P Parameter: Tissue Value: Germinating Seeds
  misc_feature: MA Experiment ID: 108464 Result: Up-regulated in Transcription
  misc_feature: MA Experiment 108464 PARAMETER Experiment Name: At_Germinating_Seeds_cDNA_P Parameter: Age (day) Value: 4 vs. 0
  misc_feature: MA Experiment 108464 PARAMETER Experiment Name: At_Germinating_Seeds_cDNA_P Parameter: Tissue Value: Germinating Seeds
  misc_feature: MA Experiment ID: 108561 Result: Up-regulated in Transcription
  misc_feature: MA Experiment 108561 PARAMETER Experiment Name: At_100uM_ABA_cDNA_P Parameter: Timepoint (hr) Value: 6
  misc_feature: MA Experiment 108561 PARAMETER Experiment Name: At_100uM_ABA_cDNA_P Parameter: Tissue Value: Aerial
  misc_feature: MA Experiment 108561 PARAMETER Experiment Name: At_100uM_ABA_cDNA_P Parameter: Treatment Value: 100uM ABA vs. No Treatment
  misc_feature: MA Experiment ID: 108573 Result: Up-regulated in Transcription
  misc_feature: MA Experiment 108573 PARAMETER Experiment Name: At_Drought_cDNA_P Parameter: Timepoint (hr) Value: 6
  misc_feature: MA Experiment 108573 PARAMETER Experiment Name: At_Drought_cDNA_P Parameter: Tissue Value: Aerial
  misc_feature: MA Experiment 108573 PARAMETER Experiment Name: At_Drought_cDNA_P Parameter: Treatment Value: Drought vs. No Drought
  misc_feature: MA Experiment ID: 108579 Result: Down-regulated in Transcription
  misc_feature: MA Experiment 108579 PARAMETER Experiment Name: At_4deg_Cold_cDNA_P Parameter: Temperature (deg C) Value: 4 vs. 22
  misc_feature: MA Experiment 108579 PARAMETER Experiment Name: At_4deg_Cold_cDNA_P Parameter: Timepoint (hr) Value: 6
  misc_feature: MA Experiment 108579 PARAMETER Experiment Name: At_4deg_Cold_cDNA_P Parameter: Tissue Value: Aerial
  misc_feature: MA Experiment ID: 108605 Result: Up-regulated in Transcription
  misc_feature: MA Experiment 108605 PARAMETER Experiment Name: At_100uM_ABA_cDNA_P Parameter: Timepoint (hr) Value: 6
  misc_feature: MA Experiment 108605 PARAMETER Experiment Name: At_100uM_ABA_cDNA_P Parameter: Tissue Value: Aerial
  misc_feature: MA Experiment 108605 PARAMETER Experiment Name: At_100uM_ABA_cDNA_P Parameter: Treatment Value: 100uM ABA vs. No Treatment
  misc_feature: MA Experiment ID: 108607 Result: Up-regulated in Transcription
  misc_feature: MA Experiment 108607 PARAMETER Experiment Name: At_100uM_ABA_cDNA_P Parameter: Timepoint (hr) Value: 4
  misc_feature: MA Experiment 108607 PARAMETER Experiment Name: At_100uM_ABA_cDNA_P Parameter: Tissue Value: Aerial
  misc_feature: MA Experiment 108607 PARAMETER Experiment Name: At_100uM_ABA_cDNA_P Parameter: Treatment Value: 100uM ABA vs. No Treatment
  misc_feature: MA Experiment ID: 20000069 Result: Up-regulated in Transcription
  misc_feature: MA Experiment 20000069 PARAMETER Experiment Name: At_100uM_ABA_Mutants_cDNA_P Parameter: Plant Line Value: CS23
  misc_feature: MA Experiment 20000069 PARAMETER Experiment Name: At_100uM_ABA_Mutants_cDNA_P Parameter: Timepoint (hr) Value: 6
  misc_feature: MA Experiment 20000069 PARAMETER Experiment Name: At_100uM_ABA_Mutants_cDNA_P Parameter: Tissue Value: Aerial
  misc_feature: MA Experiment 20000069 PARAMETER Experiment Name: At_100uM_ABA_Mutants_cDNA_P Parameter: Treatment Value: 100uM ABA vs. No Treatment
  misc_feature: MA Experiment ID: 20000070 Result: Up-regulated in Transcription
  misc_feature: MA Experiment 20000070 PARAMETER Experiment Name: At_100uM_ABA_Mutants_cDNA_P Parameter: Plant Line Value: CS24
  misc_feature: MA Experiment 20000070 PARAMETER Experiment Name: At_100uM_ABA_Mutants_cDNA_P Parameter: Timepoint (hr) Value: 6
  misc_feature: MA Experiment 20000070 PARAMETER Experiment Name: At_100uM_ABA_Mutants_cDNA_P Parameter: Tissue Value: Aerial
  misc_feature: MA Experiment 20000070 PARAMETER Experiment Name: At_100uM_ABA_Mutants_cDNA_P Parameter: Treatment Value: 100uM ABA vs. No Treatment
  misc_feature: MA Experiment ID: 20000071 Result: Up-regulated in Transcription
  misc_feature: MA Experiment 20000071 PARAMETER Experiment Name: At_100uM_ABA_Mutants_cDNA_P Parameter: Plant Line Value: CS8104
  misc_feature: MA Experiment 20000071 PARAMETER Experiment Name: At_100uM_ABA_Mutants_cDNA_P Parameter: Timepoint (hr) Value: 6
  misc_feature: MA Experiment 20000071 PARAMETER Experiment Name: At_100uM_ABA_Mutants_cDNA_P Parameter: Tissue Value: Aerial
  misc_feature: MA Experiment 20000071 PARAMETER Experiment Name: At_100uM_ABA_Mutants_cDNA_P Parameter: Treatment Value: 100uM ABA vs. No Treatment
  misc_feature: MA Experiment ID: 20000113 Result: Up-regulated in Transcription
  misc_feature: MA Experiment 20000113 PARAMETER Experiment Name: At_42deg_Heat_cDNA_P Parameter: Temperature (deg C) Value: 42 vs. 22
  misc_feature: MA Experiment 20000113 PARAMETER Experiment Name: At_42deg_Heat_cDNA_P Parameter: Timepoint (hr) Value: 8
  misc_feature: MA Experiment 20000113 PARAMETER Experiment Name: At_42deg_Heat_cDNA_P Parameter: Tissue Value: Aerial
  misc_feature: MA Experiment ID: 20000234 Result: Down-regulated in Transcription
  misc_feature: MA Experiment 20000234 PARAMETER Experiment Name: At_Siliques_P Parameter: Age (day) Value: 21
  misc_feature: MA Experiment 20000234 PARAMETER Experiment Name: At_Siliques_P Parameter: Organism Value: A. thaliana
  misc_feature: MA Experiment 20000234 PARAMETER Experiment Name: At_Siliques_P Parameter: Plant Line Value: WS
  misc_feature: MA Experiment 20000234 PARAMETER Experiment Name: At_Siliques_P Parameter: Tissue Value: Less Than 5mm Siliques vs. Whole Plant
  misc_feature: MA Experiment ID: 20000436 Result: Up-regulated in Transcription
  misc_feature: MA Experiment 20000436 PARAMETER Experiment Name: At_Drought_P Parameter: Age (day) Value: 7
  misc_feature: MA Experiment 20000436 PARAMETER Experiment Name: At_Drought_P Parameter: Organism Value: A. thaliana
  misc_feature: MA Experiment 20000436 PARAMETER Experiment Name: At_Drought_P Parameter: Plant Line Value: WS
  misc_feature: MA Experiment 20000436 PARAMETER Experiment Name: At_Drought_P Parameter: Timepoint (hr) Value: 12
  misc_feature: MA Experiment 20000436 PARAMETER Experiment Name: At_Drought_P Parameter: Tissue Value: Whole Plant
  misc_feature: MA Experiment 20000436 PARAMETER Experiment Name: At_Drought_P Parameter: Treatment Value: Drought vs. No Drought
  misc_feature: MA Experiment ID: 20000437 Result: Up-regulated in Transcription
  misc_feature: MA Experiment 20000437 PARAMETER Experiment Name: At_Drought_P Parameter: Age (day) Value: 8
  misc_feature: MA Experiment 20000437 PARAMETER Experiment Name: At_Drought_P Parameter: Organism Value: A. thaliana
  misc_feature: MA Experiment 20000437 PARAMETER Experiment Name: At_Drought_P Parameter: Plant Line Value: WS
  misc_feature: MA Experiment 20000437 PARAMETER Experiment Name: At_Drought_P Parameter: Timepoint (hr) Value: 24
  misc_feature: MA Experiment 20000437 PARAMETER Experiment Name: At_Drought_P Parameter: Tissue Value: Whole Plant
  misc_feature: MA Experiment 20000437 PARAMETER Experiment Name: At_Drought_P Parameter: Treatment Value: Drought vs. No Drought
  misc_feature: MA Experiment ID: 20001450 Result: Up-regulated in Transcription
  misc_feature: MA Experiment 20001450 PARAMETER Experiment Name: At_Far-red-induction_P Parameter: Age (day) Value: 7
  misc_feature: MA Experiment 20001450 PARAMETER Experiment Name: At_Far-red-induction_P Parameter: Light Value: Far-red vs. White
  misc_feature: MA Experiment 20001450 PARAMETER Experiment Name: At_Far-red-induction_P Parameter: Organism Value: A. thaliana
  misc_feature: MA Experiment 20001450 PARAMETER Experiment Name: At_Far-red-induction_P Parameter: Plant Line Value: Columbia
  misc_feature: MA Experiment 20001450 PARAMETER Experiment Name: At_Far-red-induction_P Parameter: Timepoint (hr) Value: 8
  misc_feature: MA Experiment 20001450 PARAMETER Experiment Name: At_Far-red-induction_P Parameter: Tissue Value: Whole Plant
atgattgatctacacagaatccatttccgcaaatcggattcatgtttttgctttatcgtaggcttccttcatttgcacgaacaacaacaacaacccttctctgcaaatctatggagcctgcgataacagcgacttcttcttcttctttcggtggtggctcttctcgtctcgccgctttagcccagcaacttcgccaatacaagcccccaccttcttcatcgttcgatgactccgaggagatgcagacagatcaggagaccgctgggaaagtcgtttctcaggttgggtttcaggaatctattgctcctctttcgaaagaccctgataggtttaaacccaagagagccgctgtgttgatctgtctctttgaaggagatgatggtgatttgcgtgttattcttactaagagatcttccaaattgtctactcactcaggagaagtttcattgccaggtggtaaagcggaggaggatgataaagatgatgggatgactgctaccagagaggctgaggaagagattggattggacccttctcttgttgatgttgttacttctcttgaaccatttctgtctaagcatcttcttagagtaattcctgtgataggcatcttgagggacaaaaataaattcaatccgataccaaatcctggggaagtggaagctgtgtttgatgcacccttggaaatgttccttaaggatgagaatcgaagatctgaagagagagagtggatgggtgaaaagtatttgatccattactttgactacagaacaggagataaggattatatgatatggggttaaactgctgggattttgatcagagctgcatctgtgacttatgaacgaccacctgcttttatcgagcagtgccctaagtttaagtaccctaaaatggtagaaaaacatacttgtatgccttaatgaacataatttttcgaatgatgctttcctag

SEQ ID NO: 30551 - protein, 253 aa, Arabidopsis thaliana
  peptide (1)..(253): Ceres Seq. ID no. 12579912
  misc_feature (100)..(233): Pfam Name: NUDIX domain Pfam Description: NUDIX domain
  misc_feature (86)..(253): Homolog of NCBI NO: 28868671 NR Description: mutT/nudix family protein
  misc_feature (22)..(179): Homolog of NCBI NO: 25370770 NR Description: hypothetical protein At2g33980 [imported] -
  misc_feature (97)..(253): Homolog of NCBI NO: 15242543 NR Description: putative protein
  misc_feature (97)..(253): Homolog of NCBI NO: 21553389 NR Description: unknown [Arabidopsis thaliana]
  misc_feature (97)..(253): Homolog of NCBI NO: 40253324 NR Description: putative phosphohydrolase
  misc_feature (22)..(253): Homolog of NCBI NO: 18403412 NR Description: expressed protein
  misc_feature (24)..(253): Homolog of NCBI NO: 10764850 NR Description: F1K23.5 [Arabidopsis thaliana]
  misc_feature (1)..(253): Homolog of NCBI NO: 26450576 NR Description: unknown protein [Arabidopsis thaliana]
  misc_feature (1)..(253): Homolog of NCBI NO: 30690557 NR Description: MutT/nudix family protein [Arabidopsis thaliana]
  misc_feature (1)..(253): Homolog of NCBI NO: 18396900 NR Description: Expressed protein
MFLLYRRLPSFARTTTTTLLCKSMEPAITATSSSSFGGGSSRLAALAQQLRQYKPPPSSSFDDSEEMQTDQETAGKVVSQVGFQESIAPLSKDPDRFKPKRAAVLICLFEGDDGDLRVILTKRSSKLSTHSGEVSLPGGKAEEDDKDDGMTATREAEEEIGLDPSLVDVVTSLEPFLSKHLLRVIPVIGILRDKNKFNPIPNPGEVEAVFDAPLEMFLKDENRRSEEREWMGEKYLIHYFDYRTGDKDYMIWG

SEQ ID NO: 30552 - protein, 230 aa, Arabidopsis thaliana
  peptide (1)..(230): Ceres Seq. ID no. 12579913
  misc_feature (77)..(210): Pfam Name: NUDIX domain Pfam Description: NUDIX domain
  misc_feature (63)..(230): Homolog of NCBI NO: 28868671 NR Description: mutT/nudix family protein
  misc_feature (1)..(156): Homolog of NCBI NO: 25370770 NR Description: hypothetical protein At2g33980 [imported] -
  misc_feature (74)..(230): Homolog of NCBI NO: 15242543 NR Description: putative protein
  misc_feature (74)..(230): Homolog of NCBI NO: 21553389 NR Description: unknown [Arabidopsis thaliana]
  misc_feature (74)..(230): Homolog of NCBI NO: 40253324 NR Description: putative phosphohydrolase
  misc_feature (1)..(230): Homolog of NCBI NO: 18403412 NR Description: expressed protein
  misc_feature (1)..(230): Homolog of NCBI NO: 10764850 NR Description: F1K23.5 [Arabidopsis thaliana]
  misc_feature (1)..(230): Homolog of NCBI NO: 26450576 NR Description: unknown protein [Arabidopsis thaliana]
  misc_feature (1)..(230): Homolog of NCBI NO: 30690557 NR Description: MutT/nudix family protein [Arabidopsis thaliana]
  misc_feature (1)..(230): Homolog of NCBI NO: 18396900 NR Description: Expressed protein
MEPAITATSSSSFGGGSSRLAALAQQLRQYKPPPSSSFDDSEEMQTDQETAGKVVSQVGFQESIAPLSKDPDRFKPKRAAVLICLFEGDDGDLRVILTKRSSKLSTHSGEVSLPGGKAEEDDKDDGMTATREAEEEIGLDPSLVDVVTSLEPFLSKHLLRVIPVIGILRDKNKFNPIPNPGEVEAVFDAPLEMFLKDENRRSEEREWMGEKYLIHYFDYRTGDKDYMIWG

SEQ ID NO: 30553 - protein, 187 aa, Arabidopsis thaliana
  peptide (1)..(187): Ceres Seq. ID no. 12579914
  misc_feature (34)..(167): Pfam Name: NUDIX domain Pfam Description: NUDIX domain
  misc_feature (20)..(187): Homolog of NCBI NO: 28868671 NR Description: mutT/nudix family protein
  misc_feature (1)..(113): Homolog of NCBI NO: 25370770 NR Description: hypothetical protein At2g33980 [imported] -
  misc_feature (31)..(187): Homolog of NCBI NO: 15242543 NR Description: putative protein
  misc_feature (31)..(187): Homolog of NCBI NO: 21553389 NR Description: unknown [Arabidopsis thaliana]
  misc_feature (31)..(187): Homolog of NCBI NO: 40253324 NR Description: putative phosphohydrolase
  misc_feature (1)..(187): Homolog of NCBI NO: 18403412 NR Description: expressed protein
  misc_feature (1)..(187): Homolog of NCBI NO: 10764850 NR Description: F1K23.5 [Arabidopsis thaliana]
  misc_feature (1)..(187): Homolog of NCBI NO: 26450576 NR Description: unknown protein [Arabidopsis thaliana]
  misc_feature (1)..(187): Homolog of NCBI NO: 30690557 NR Description: MutT/nudix family protein [Arabidopsis thaliana]
  misc_feature (1)..(187): Homolog of NCBI NO: 18396900 NR Description: Expressed protein
MQTDQETAGKVVSQVGFQESIAPLSKDPDRFKPKRAAVLICLFEGDDGDLRVILTKRSSKLSTHSGEVSLPGGKAEEDDKDDGMTATREAEEEIGLDPSLVDVVTSLEPFLSKHLLRVIPVIGILRDKNKFNPIPNPGEVEAVFDAPLEMFLKDENRRSEEREWMGEKYLIHYFDYRTGDKDYMIWG

SEQ ID NO: 30554 - DNA, 836 bp, Arabidopsis thaliana
  misc_feature (1)..(836): Ceres Seq. ID no. 13489838
  misc_feature: MA Experiment ID: 108433 Result: Up-regulated in Transcription
  misc_feature: MA Experiment 108433 PARAMETER Experiment Name: At_rhl_Mutant2_cDNA_P Parameter: Age (day) Value: 7
  misc_feature: MA Experiment 108433 PARAMETER Experiment Name: At_rhl_Mutant2_cDNA_P Parameter: Organism Value: A. thaliana
  misc_feature: MA Experiment 108433 PARAMETER Experiment Name: At_rhl_Mutant2_cDNA_P Parameter: Plant Line Value: rhl Mutant vs. wt landsburg
  misc_feature: MA Experiment 108433 PARAMETER Experiment Name: At_rhl_Mutant2_cDNA_P Parameter: Tissue Value: Roots
  misc_feature: MA Experiment ID: 108434 Result: Down-regulated in Transcription
  misc_feature: MA Experiment 108434 PARAMETER Experiment Name: At_Root_Tips_cDNA_P Parameter: Tissue Value: Root Tips
  misc_feature: MA Experiment ID: 108461 Result: Down-regulated in Transcription
  misc_feature: MA Experiment 108461 PARAMETER Experiment Name: At_Germinating_Seeds_cDNA_P Parameter: Age (day) Value: 1 vs. 0
  misc_feature: MA Experiment 108461 PARAMETER Experiment Name: At_Germinating_Seeds_cDNA_P Parameter: Tissue Value: Germinating Seeds
  misc_feature: MA Experiment ID: 108585 Result: Up-regulated in Transcription
  misc_feature: MA Experiment 108585 PARAMETER Experiment Name: At_5mM_NaNP_cDNA_P Parameter: Timepoint (hr) Value: 6
  misc_feature: MA Experiment 108585 PARAMETER Experiment Name: At_5mM_NaNP_cDNA_P Parameter: Tissue Value: Aerial
  misc_feature: MA Experiment 108585 PARAMETER Experiment Name: At_5mM_NaNP_cDNA_P Parameter: Treatment Value: null
  misc_feature: MA Experiment ID: 108595 Result: Down-regulated in Transcription
  misc_feature: MA Experiment 108595 PARAMETER Experiment Name: At_Ler-pi_Ovule_cDNA_P Parameter: Plant Line Value: null
  misc_feature: MA Experiment ID: 108605 Result: Up-regulated in Transcription
  misc_feature: MA Experiment 108605 PARAMETER Experiment Name: At_100uM_ABA_cDNA_P Parameter: Timepoint (hr) Value: 6
  misc_feature: MA Experiment 108605 PARAMETER Experiment Name: At_100uM_ABA_cDNA_P Parameter: Tissue Value: Aerial
  misc_feature: MA Experiment 108605 PARAMETER Experiment Name: At_100uM_ABA_cDNA_P Parameter: Treatment Value: 100uM ABA vs. No Treatment
  misc_feature: MA Experiment ID: 108607 Result: Up-regulated in Transcription
  misc_feature: MA Experiment 108607 PARAMETER Experiment Name: At_100uM_ABA_cDNA_P Parameter: Timepoint (hr) Value: 4
  misc_feature: MA Experiment 108607 PARAMETER Experiment Name: At_100uM_ABA_cDNA_P Parameter: Tissue Value: Aerial
  misc_feature: MA Experiment 108607 PARAMETER Experiment Name: At_100uM_ABA_cDNA_P Parameter: Treatment Value: 100uM ABA vs. No Treatment
  misc_feature: MA Experiment ID: 108609 Result: Up-regulated in Transcription
  misc_feature: MA Experiment 108609 PARAMETER Experiment Name: At_100uM_ABA_cDNA_P Parameter: Timepoint (hr) Value: 24
  misc_feature: MA Experiment 108609 PARAMETER Experiment Name: At_100uM_ABA_cDNA_P Parameter: Tissue Value: Aerial
  misc_feature: MA Experiment 108609 PARAMETER Experiment Name: At_100uM_ABA_cDNA_P Parameter: Treatment Value: 100uM ABA vs. No Treatment
  misc_feature: MA Experiment ID: 108667 Result: Up-regulated in Transcription
  misc_feature: MA Experiment 108667 PARAMETER Experiment Name: At_2mM_SA_cDNA_P Parameter: Plant Line Value: WS
  misc_feature: MA Experiment 108667 PARAMETER Experiment Name: At_2mM_SA_cDNA_P Parameter: Timepoint (hr) Value: 1
  misc_feature: MA Experiment 108667 PARAMETER Experiment Name: At_2mM_SA_cDNA_P Parameter: Treatment Value: 2mM SA vs. No Treatment
  misc_feature: MA Experiment ID: 108668 Result: Up-regulated in Transcription
  misc_feature: MA Experiment 108668 PARAMETER Experiment Name: At_2mM_SA_cDNA_P Parameter: Plant Line Value: WS
  misc_feature: MA Experiment 108668 PARAMETER Experiment Name: At_2mM_SA_cDNA_P Parameter: Timepoint (hr) Value: 6
  misc_feature: MA Experiment 108668 PARAMETER Experiment Name: At_2mM_SA_cDNA_P Parameter: Treatment Value: 2mM SA vs. No Treatment
  misc_feature: MA Experiment ID: 20000069 Result: Up-regulated in Transcription
  misc_feature: MA Experiment 20000069 PARAMETER Experiment Name: At_100uM_ABA_Mutants_cDNA_P Parameter: Plant Line Value: CS23
  misc_feature: MA Experiment 20000069 PARAMETER Experiment Name: At_100uM_ABA_Mutants_cDNA_P Parameter: Timepoint (hr) Value: 6
  misc_feature: MA Experiment 20000069 PARAMETER Experiment Name: At_100uM_ABA_Mutants_cDNA_P Parameter: Tissue Value: Aerial
  misc_feature: MA Experiment 20000069 PARAMETER Experiment Name: At_100uM_ABA_Mutants_cDNA_P Parameter: Treatment Value: 100uM ABA vs. No Treatment
  misc_feature: MA Experiment ID: 20000070 Result: Up-regulated in Transcription
  misc_feature: MA Experiment 20000070 PARAMETER Experiment Name: At_100uM_ABA_Mutants_cDNA_P Parameter: Plant Line Value: CS24
  misc_feature: MA Experiment 20000070 PARAMETER Experiment Name: At_100uM_ABA_Mutants_cDNA_P Parameter: Timepoint (hr) Value: 6
  misc_feature: MA Experiment 20000070 PARAMETER Experiment Name: At_100uM_ABA_Mutants_cDNA_P Parameter: Tissue Value: Aerial
  misc_feature: MA Experiment 20000070 PARAMETER Experiment Name: At_100uM_ABA_Mutants_cDNA_P Parameter: Treatment Value: 100uM ABA vs. No Treatment
  misc_feature: MA Experiment ID: 20000071 Result: Up-regulated in Transcription
  misc_feature: MA Experiment 20000071 PARAMETER Experiment Name: At_100uM_ABA_Mutants_cDNA_P Parameter: Plant Line Value: CS8104
  misc_feature: MA Experiment 20000071 PARAMETER Experiment Name: At_100uM_ABA_Mutants_cDNA_P Parameter: Timepoint (hr) Value: 6
  misc_feature: MA Experiment 20000071 PARAMETER Experiment Name: At_100uM_ABA_Mutants_cDNA_P Parameter: Tissue Value: Aerial
  misc_feature: MA Experiment 20000071 PARAMETER Experiment Name: At_100uM_ABA_Mutants_cDNA_P Parameter: Treatment Value: 100uM ABA vs. No Treatment
  misc_feature: MA Experiment ID: 20000086 Result: Up-regulated in Transcription
  misc_feature: MA Experiment 20000086 PARAMETER Experiment Name: At_100uM_ABA_Mutants_cDNA_P Parameter: Plant Line Value: CS22
  misc_feature: MA Experiment 20000086 PARAMETER Experiment Name: At_100uM_ABA_Mutants_cDNA_P Parameter: Timepoint (hr) Value: 6
  misc_feature: MA Experiment 20000086 PARAMETER Experiment Name: At_100uM_ABA_Mutants_cDNA_P Parameter: Tissue Value: Aerial
  misc_feature: MA Experiment 20000086 PARAMETER Experiment Name: At_100uM_ABA_Mutants_cDNA_P Parameter: Treatment Value: 100uM ABA vs. No Treatment
  misc_feature: MA Experiment ID: 20000087 Result: Up-regulated in Transcription
  misc_feature: MA Experiment 20000087 PARAMETER Experiment Name: At_100uM_ABA_Mutants_cDNA_P Parameter: Plant Line Value: WS
  misc_feature: MA Experiment 20000087 PARAMETER Experiment Name: At_100uM_ABA_Mutants_cDNA_P Parameter: Timepoint (hr) Value: 6
  misc_feature: MA Experiment 20000087 PARAMETER Experiment Name: At_100uM_ABA_Mutants_cDNA_P Parameter: Tissue Value: Aerial
  misc_feature: MA Experiment 20000087 PARAMETER Experiment Name: At_100uM_ABA_Mutants_cDNA_P Parameter: Treatment Value: 100uM ABA vs. No Treatment
  misc_feature: MA Experiment ID: 20000088 Result: Up-regulated in Transcription
  misc_feature: MA Experiment 20000088 PARAMETER Experiment Name: At_100uM_ABA_Mutants_cDNA_P Parameter: Plant Line Value: Landsberg
  misc_feature: MA Experiment 20000088 PARAMETER Experiment Name: At_100uM_ABA_Mutants_cDNA_P Parameter: Timepoint (hr) Value: 6
  misc_feature: MA Experiment 20000088 PARAMETER Experiment Name: At_100uM_ABA_Mutants_cDNA_P Parameter: Tissue Value: Aerial
  misc_feature: MA Experiment 20000088 PARAMETER Experiment Name: At_100uM_ABA_Mutants_cDNA_P Parameter: Treatment Value: 100uM ABA vs. No Treatment
  misc_feature: MA Experiment ID: 20000089 Result: Up-regulated in Transcription
  misc_feature: MA Experiment ID: 20000090 Result: Up-regulated in Transcription
  misc_feature: MA Experiment ID: 20000117 Result: Up-regulated in Transcription
  misc_feature: MA Experiment 20000117 PARAMETER Experiment Name: At_100uM_ABA_Mutants_cDNA_P Parameter: Plant Line Value: Columbia
  misc_feature: MA Experiment 20000117 PARAMETER Experiment Name: At_100uM_ABA_Mutants_cDNA_P Parameter: Timepoint (hr) Value: 6
  misc_feature: MA Experiment 20000117 PARAMETER Experiment Name: At_100uM_ABA_Mutants_cDNA_P Parameter: Tissue Value: Aerial
  misc_feature: MA Experiment 20000117 PARAMETER Experiment Name: At_100uM_ABA_Mutants_cDNA_P Parameter: Treatment Value: 100uM ABA vs. No Treatment
  misc_feature: MA Experiment ID: 20000182 Result: Up-regulated in Transcription
  misc_feature: MA Experiment 20000182 PARAMETER Experiment Name: At_2mM_SA_P Parameter: Age (day) Value: 14
  misc_feature: MA Experiment 20000182 PARAMETER Experiment Name: At_2mM_SA_P Parameter: Organism Value: A. thaliana
  misc_feature: MA Experiment 20000182 PARAMETER Experiment Name: At_2mM_SA_P Parameter: Plant Line Value: WS
  misc_feature: MA Experiment 20000182 PARAMETER Experiment Name: At_2mM_SA_P Parameter: Timepoint (hr) Value: 6
  misc_feature: MA Experiment 20000182 PARAMETER Experiment Name: At_2mM_SA_P Parameter: Tissue Value: Aerial
  misc_feature: MA Experiment 20000182 PARAMETER Experiment Name: At_2mM_SA_P Parameter: Treatment Value: 2mM SA vs. No Treatment
  misc_feature: MA Experiment ID: 20000185 Result: Up-regulated in Transcription
  misc_feature: MA Experiment 20000185 PARAMETER Experiment Name: At_Roots__P Parameter: Age (day) Value: 7 vs. 21
  misc_feature: MA Experiment 20000185 PARAMETER Experiment Name: At_Roots__P Parameter: Organism Value: A. thaliana
  misc_feature: MA Experiment 20000185 PARAMETER Experiment Name: At_Roots__P Parameter: Tissue Value: Roots vs. Whole Plant
  misc_feature: MA Experiment ID: 20000451 Result: Down-regulated in Transcription
  misc_feature: MA Experiment 20000451 PARAMETER Experiment Name: At_CS6879_Shoots-Roots_P Parameter: Age (day) Value: 14
  misc_feature: MA Experiment 20000451 PARAMETER Experiment Name: At_CS6879_Shoots-Roots_P Parameter: Organism Value: A. thaliana
  misc_feature: MA Experiment 20000451 PARAMETER Experiment Name: At_CS6879_Shoots-Roots_P Parameter: Plant Line Value: CS6879 vs. WS
  misc_feature: MA Experiment 20000451 PARAMETER Experiment Name: At_CS6879_Shoots-Roots_P Parameter: Tissue Value: Roots
  misc_feature: Phenotype: FERTILITY Fertility-Reduced
  misc_feature: Phenotype: FERTILITY Fertility-Reduced
  misc_feature: Phenotype: ROSETTE LEAVES Shape-Lanceolate
  misc_feature: Phenotype: ROSETTE LEAVES Other
  misc_feature: Phenotype: FERTILITY Fertility-Reduced
  misc_feature: Phenotype: FERTILITY Fertility-Reduced
  misc_feature: Phenotype: ROSETTE LEAVES Disorganized Rosette-Disorganized Rosette
  misc_feature: Phenotype: ROSETTE LEAVES Other
  misc_feature: Phenotype: INFLORESCENCE Flowering Time-Late Flowering
acaatcgctggactctgctactgcgaagaacaacaaattccttgtttatcatggcgaattccggcgaagagaagttgaagctctactcttactggagaagctcgtgtgctcatcgtgtccgtatcgccctcgctttgaaagggcttgattatgagtatataccagtgaatttgctcaagggtgatcaattcgattcagatttcaagaagatcaatccaatgggaactgtaccagctctggtggatggagatgttgtgattaatgattcttttgcgataataatgtatctggatgagaagtaccctgagccacctttgttacctcgtgacctccataaacgagctgtgaattaccaggcaatgagtattgtcttgtctggcatacagcctcatcaaaatctggctgttattaggtatatcgaggaaaagataaatgtggaggagaagactgcttgggttaataatgctatcacaaaaggatttacagctctcgagaaactgttggtgaattgcgctgggaaacttgcgactggtgatgaaatttacctggctgatctctttctagcaccacagatccacggagcaatcaacagattccagattaacatggaaccatacccaaatcttgcaaaatgttacgaatcatacaaggaactgcctgtgtttcaaaatgcactaccggaaaagcagccagatgctccttcttccaccaactgattccgtgaacccgtaagctacgctcagcttaataaaacctcagacaacaacaacaatgatgagagtaataccttgtactcgtacatgtatcatataaaccagttacatcttagttcctcc

SEQ ID NO: 30555 - protein, 237 aa, Arabidopsis thaliana
  peptide (1)..(237): Ceres Seq. ID no. 13489839
  misc_feature (17)..(234): Homolog of NCBI NO: 24061762 NR Description: glutathione S-transferase [Capsicum annuum]
  misc_feature (17)..(235): Homolog of NCBI NO: 29420155 NR Description: glutathione S-transferase Z1 [Malva pusilla]
  misc_feature (24)..(236): Homolog of NCBI NO: 11132235 NR Description: Glutathione S-transferase zeta class
  misc_feature (22)..(235): Homolog of NCBI NO: 15226949 NR Description: glutathione transferase, putative [Arabidopsis
  misc_feature (17)..(237): Homolog of NCBI NO: 28932694 NR Description: glutathione S-transferase zeta [Brassica napus]
  misc_feature (17)..(237): Homolog of NCBI NO: 28932698 NR Description: glutathione S-transferase zeta [Brassica napus]
  misc_feature (17)..(236): Homolog of NCBI NO: 30677995 NR Description: glutathione transferase, putative [Arabidopsis
  misc_feature (17)..(236): Homolog of NCBI NO: 15226952 NR Description: glutathione transferase, putative [Arabidopsis
NRWTLLLRRTTNSLFIMANSGEEKLKLYSYWRSSCAHRVRIALALKGLDYEYIPVNLLKGDQFDSDFKKINPMGTVPALVDGDVVINDSFAIIMYLDEKYPEPPLLPRDLHKRAVNYQAMSIVLSGIQPHQNLAVIRYIEEKINVEEKTAWVNNAITKGFTALEKLLVNCAGKLATGDEIYLADLFLAPQIHGAINRFQINMEPYPNLAKCYESYKELPVFQNALPEKQPDAPSSTN

SEQ ID NO: 30556 - protein, 221 aa, Arabidopsis thaliana
  peptide (1)..(221): Ceres Seq. ID no. 13489840
  misc_feature (1)..(218): Homolog of NCBI NO: 24061762 NR Description: glutathione S-transferase [Capsicum annuum]
  misc_feature (1)..(219): Homolog of NCBI NO: 29420155 NR Description: glutathione S-transferase Z1 [Malva pusilla]
  misc_feature (8)..(220): Homolog of NCBI NO: 11132235 NR Description: Glutathione S-transferase zeta class
  misc_feature (6)..(219): Homolog of NCBI NO: 15226949 NR Description: glutathione transferase, putative [Arabidopsis
  misc_feature (1)..(221): Homolog of NCBI NO: 28932694 NR Description: glutathione S-transferase zeta [Brassica napus]
  misc_feature (1)..(221): Homolog of NCBI NO: 28932698 NR Description: glutathione S-transferase zeta [Brassica napus]
  misc_feature (1)..(220): Homolog of NCBI NO: 30677995 NR Description: glutathione transferase, putative [Arabidopsis
  misc_feature (1)..(220): Homolog of NCBI NO: 15226952 NR Description: glutathione transferase, putative [Arabidopsis
MANSGEEKLKLYSYWRSSCAHRVRIALALKGLDYEYIPVNLLKGDQFDSDFKKINPMGTVPALVDGDVVINDSFAIIMYLDEKYPEPPLLPRDLHKRAVNYQAMSIVLSGIQPHQNLAVIRYIEEKINVEEKTAWVNNAITKGFTALEKLLVNCAGKLATGDEIYLADLFLAPQIHGAINRFQINMEPYPNLAKCYESYKELPVFQNALPEKQPDAPSSTN

SEQ ID NO: 30557 - protein, 165 aa, Arabidopsis thaliana
  peptide (1)..(165): Ceres Seq. ID no. 13489841
  misc_feature (1)..(162): Homolog of NCBI NO: 24061762 NR Description: glutathione S-transferase [Capsicum annuum]
  misc_feature (1)..(163): Homolog of NCBI NO: 29420155 NR Description: glutathione S-transferase Z1 [Malva pusilla]
  misc_feature (1)..(164): Homolog of NCBI NO: 11132235 NR Description: Glutathione S-transferase zeta class
  misc_feature (1)..(163): Homolog of NCBI NO: 15226949 NR Description: glutathione transferase, putative [Arabidopsis
  misc_feature (1)..(165): Homolog of NCBI NO: 28932694 NR Description: glutathione S-transferase zeta [Brassica napus]
  misc_feature (1)..(165): Homolog of NCBI NO: 28932698 NR Description: glutathione S-transferase zeta [Brassica napus]
  misc_feature (1)..(164): Homolog of NCBI NO: 30677995 NR Description: glutathione transferase, putative [Arabidopsis
  misc_feature (1)..(164): Homolog of NCBI NO: 15226952 NR Description: glutathione transferase, putative [Arabidopsis
MGTVPALVDGDVVINDSFAIIMYLDEKYPEPPLLPRDLHKRAVNYQAMSIVLSGIQPHQNLAVIRYIEEKINVEEKTAWVNNAITKGFTALEKLLVNCAGKLATGDEIYLADLFLAPQIHGAINRFQINMEPYPNLAKCYESYKELPVFQNALPEKQPDAPSSTN

SEQ ID NO: 30558 - DNA, 691 bp, Arabidopsis thaliana
  misc_feature (1)..(691): Ceres Seq. ID no. 12332112
  misc_feature: MA Experiment ID: 108435 Result: Down-regulated in Transcription
  misc_feature: MA Experiment 108435 PARAMETER Experiment Name: At_stm_Mutants_cDNA_P Parameter: Plant Line Value: wt Landsburg vs stm
  misc_feature: MA Experiment 108435 PARAMETER Experiment Name: At_stm_Mutants_cDNA_P Parameter: Tissue Value: Shoot Apical Meristem Region
  misc_feature: MA Experiment ID: 108595 Result: Down-regulated in Transcription
  misc_feature: MA Experiment 108595 PARAMETER Experiment Name: At_Ler-pi_Ovule_cDNA_P Parameter: Plant Line Value: null
  misc_feature: MA Experiment ID: 20000086 Result: Down-regulated in Transcription
  misc_feature: MA Experiment 20000086 PARAMETER Experiment Name: At_100uM_ABA_Mutants_cDNA_P Parameter: Plant Line Value: CS22
  misc_feature: MA Experiment 20000086 PARAMETER Experiment Name: At_100uM_ABA_Mutants_cDNA_P Parameter: Timepoint (hr) Value: 6
  misc_feature: MA Experiment 20000086 PARAMETER Experiment Name: At_100uM_ABA_Mutants_cDNA_P Parameter: Tissue Value: Aerial
  misc_feature: MA Experiment 20000086 PARAMETER Experiment Name: At_100uM_ABA_Mutants_cDNA_P Parameter: Treatment Value: 100uM ABA vs. No Treatment
  misc_feature: MA Experiment ID: 20000090 Result: Down-regulated in Transcription
  misc_feature: MA Experiment ID: 20000185 Result: Down-regulated in Transcription
  misc_feature: MA Experiment 20000185 PARAMETER Experiment Name: At_Roots__P Parameter: Age (day) Value: 7 vs. 21
  misc_feature: MA Experiment 20000185 PARAMETER Experiment Name: At_Roots__P Parameter: Organism Value: A. thaliana
  misc_feature: MA Experiment 20000185 PARAMETER Experiment Name: At_Roots__P Parameter: Tissue Value: Roots vs. Whole Plant
  misc_feature: MA Experiment ID: 20000439 Result: Down-regulated in Transcription
  misc_feature: MA Experiment 20000439 PARAMETER Experiment Name: At_Roots__P Parameter: Age (day) Value: 14 vs. 21
  misc_feature: MA Experiment 20000439 PARAMETER Experiment Name: At_Roots__P Parameter: Organism Value: A. thaliana
  misc_feature: MA Experiment 20000439 PARAMETER Experiment Name: At_Roots__P Parameter: Tissue Value: Roots vs. Whole Plant
  misc_feature: MA Experiment ID: 20001248 Result: Down-regulated in Transcription
  misc_feature: MA Experiment 20001248 PARAMETER Experiment Name: At_Far-red-induction_P Parameter: Age (day) Value: 7
  misc_feature: MA Experiment 20001248 PARAMETER Experiment Name: At_Far-red-induction_P Parameter: Light Value: Far-red vs. White
  misc_feature: MA Experiment 20001248 PARAMETER Experiment Name: At_Far-red-induction_P Parameter: Organism Value: A. thaliana
  misc_feature: MA Experiment 20001248 PARAMETER Experiment Name: At_Far-red-induction_P Parameter: Plant Line Value: Columbia
  misc_feature: MA Experiment 20001248 PARAMETER Experiment Name: At_Far-red-induction_P Parameter: Timepoint (hr) Value: 4
  misc_feature: MA Experiment 20001248 PARAMETER Experiment Name: At_Far-red-induction_P Parameter: Tissue Value: Whole Plant
  misc_feature: MA Experiment ID: 20001450 Result: Down-regulated in Transcription
  misc_feature: MA Experiment 20001450 PARAMETER Experiment Name: At_Far-red-induction_P Parameter: Age (day) Value: 7
  misc_feature: MA Experiment 20001450 PARAMETER Experiment Name: At_Far-red-induction_P Parameter: Light Value: Far-red vs. White
  misc_feature: MA Experiment 20001450 PARAMETER Experiment Name: At_Far-red-induction_P Parameter: Organism Value: A. thaliana
  misc_feature: MA Experiment 20001450 PARAMETER Experiment Name: At_Far-red-induction_P Parameter: Plant Line Value: Columbia
  misc_feature: MA Experiment 20001450 PARAMETER Experiment Name: At_Far-red-induction_P Parameter: Timepoint (hr) Value: 8
  misc_feature: MA Experiment 20001450 PARAMETER Experiment Name: At_Far-red-induction_P Parameter: Tissue Value: Whole Plant
aaccttattcttatgattaaaattgttcggtcctgattatctctgtgtttttgggaactgagaagcatccactcgacaatggagactgcgatttgtgggagattagctctcgcaccatcctctctcttcaattctaaatcaggggacaaacatttagtctcaaaaggaccatgtgtgaatcgtagcattctcatgaccttgtctacatctgctgcattgggtaaaggaggtggtgtcttagacaaaccaattatagagaaaaccactcctggtcgtgaatccgagtttgatttaaggaaatcaaagaagatagctccaccttacagggtgatactacacaatgacaacttcaacaagagggaatatgtggttcaggtgttgatgaaggtaatacccggcatgactgtagacaacgcggttaacattatgcaagaagctcatatcaacggtttggcagttgtgattgtttgtgctcaggctgatgcagagcaacactgtatgcagctgcgcggtaacggccttctcagttctgttgaacctgatggtggaggctgctgaaactaattaaactcagtatagattttcccaccttccaggactctctatttagtcaaaaacatttgttgttttaatgtatataatatcagaaatttggtacaagactgttactatatgcaatgaaccttgcccc

SEQ ID NO: 30559 - protein, 159 aa, Arabidopsis thaliana
  peptide (1)..(159): Ceres Seq. ID no. 12332113
  misc_feature (76)..(155): Homolog of NCBI NO: 33862055 NR Description: conserved hypothetical protein
  misc_feature (64)..(155): Homolog of NCBI NO: 33241103 NR Description: Uncharacterized conserved protein
  misc_feature (63)..(155): Homolog of NCBI NO: 33864059 NR Description: conserved hypothetical protein
  misc_feature (73)..(155): Homolog of NCBI NO: 37520315 NR Description: hypothetical protein gsl0746 [Gloeobacter
  misc_feature (76)..(155): Homolog of NCBI NO: 33866680 NR Description: conserved hypothetical protein [Synechococcus sp.
  misc_feature (76)..(155): Homolog of NCBI NO: 16331021 NR Description: unknown protein [Synechocystis sp. PCC 6803]
  misc_feature (76)..(154): Homolog of NCBI NO: 22297755 NR Description: ORF_ID:tll0211~hypothetical protein
  misc_feature (75)..(155): Homolog of NCBI NO: 17231817 NR Description: hypothetical protein [Nostoc sp. PCC 7120]
  misc_feature (76)..(155): Homolog of NCBI NO: 23043721 NR Description: hypothetical protein [Trichodesmium erythraeum
  misc_feature (1)..(159): Homolog of NCBI NO: 18409086 NR Description: expressed protein
METAICGRLALAPSSLFNSKSGDKHLVSKGPCVNRSILMTLSTSAALGKGGGVLDKPIIEKTTPGRESEFDLRKSKKIAPPYRVILHNDNFNKREYVVQVLMKVIPGMTVDNAVNIMQEAHINGLAVVIVCAQADAEQHCMQLRGNGLLSSVEPDGGGC

SEQ ID NO: 30560 - protein, 121 aa, Arabidopsis thaliana
  peptide (1)..(121): Ceres Seq. ID no. 12332114
  misc_feature (38)..(117): Homolog of NCBI NO: 33862055 NR Description: conserved hypothetical protein
  misc_feature (26)..(117): Homolog of NCBI NO: 33241103 NR Description: Uncharacterized conserved protein
  misc_feature (25)..(117): Homolog of NCBI NO: 33864059 NR Description: conserved hypothetical protein
  misc_feature (35)..(117): Homolog of NCBI NO: 37520315 NR Description: hypothetical protein gsl0746 [Gloeobacter
  misc_feature (38)..(117): Homolog of NCBI NO: 33866680 NR Description: conserved hypothetical protein [Synechococcus sp.
  misc_feature (38)..(117): Homolog of NCBI NO: 16331021 NR Description: unknown protein [Synechocystis sp. PCC 6803]
  misc_feature (38)..(116): Homolog of NCBI NO: 22297755 NR Description: ORF_ID:tll0211~hypothetical protein
  misc_feature (37)..(117): Homolog of NCBI NO: 17231817 NR Description: hypothetical protein [Nostoc sp. PCC 7120]
  misc_feature (38)..(117): Homolog of NCBI NO: 23043721 NR Description: hypothetical protein [Trichodesmium erythraeum
  misc_feature (1)..(121): Homolog of NCBI NO: 18409086 NR Description: expressed protein
MTLSTSAALGKGGGVLDKPIIEKTTPGRESEFDLRKSKKIAPPYRVILHNDNFNKREYVVQVLMKVIPGMTVDNAVNIMQEAHINGLAVVIVCAQADAEQHCMQLRGNGLLSSVEPDGGGC

SEQ ID NO: 30561 - DNA, 618 bp, Arabidopsis thaliana
  misc_feature (1)..(618): Ceres Seq. ID no. 13497742
  misc_feature: MA Experiment ID: 108434 Result: Down-regulated in Transcription
  misc_feature: MA Experiment 108434 PARAMETER Experiment Name: At_Root_Tips_cDNA_P Parameter: Tissue Value: Root Tips
  misc_feature: MA Experiment ID: 108464 Result: Down-regulated in Transcription
  misc_feature: MA Experiment 108464 PARAMETER Experiment Name: At_Germinating_Seeds_cDNA_P Parameter: Age (day) Value: 4 vs. 0
  misc_feature: MA Experiment 108464 PARAMETER Experiment Name: At_Germinating_Seeds_cDNA_P Parameter: Tissue Value: Germinating Seeds
  misc_feature: MA Experiment ID: 108473 Result: Up-regulated in Transcription
  misc_feature: MA Experiment 108473 PARAMETER Experiment Name: At_Drought_Flowers_cDNA_P Parameter: Timepoint (hr) Value: 7 d
  misc_feature: MA Experiment 108473 PARAMETER Experiment Name: At_Drought_Flowers_cDNA_P Parameter: Tissue Value: Flower
  misc_feature: MA Experiment 108473 PARAMETER Experiment Name: At_Drought_Flowers_cDNA_P Parameter: Treatment Value: Drought vs. No Drought
  misc_feature: MA Experiment ID: 108489 Result: Up-regulated in Transcription
  misc_feature: MA Experiment ID: 108501 Result: Up-regulated in Transcription
  misc_feature: MA Experiment 108501 PARAMETER Experiment Name: At_ap2_floral_buds_cDNA_P Parameter: Plant Line Value: ap2 (Ler.)
  misc_feature: MA Experiment 108501 PARAMETER Experiment Name: At_ap2_floral_buds_cDNA_P Parameter: Tissue Value: Closed Flower
  misc_feature: MA Experiment ID: 108572 Result: Up-regulated in Transcription
  misc_feature: MA Experiment 108572 PARAMETER Experiment Name: At_Drought_cDNA_P Parameter: Timepoint (hr) Value: 1
  misc_feature: MA Experiment 108572 PARAMETER Experiment Name: At_Drought_cDNA_P Parameter: Tissue Value: Aerial
  misc_feature: MA Experiment 108572 PARAMETER Experiment Name: At_Drought_cDNA_P Parameter: Treatment Value: Drought vs. No Drought
  misc_feature: MA Experiment ID: 108573 Result: Up-regulated in Transcription
  misc_feature: MA Experiment 108573 PARAMETER Experiment Name: At_Drought_cDNA_P Parameter: Timepoint (hr) Value: 6
  misc_feature: MA Experiment 108573 PARAMETER Experiment Name: At_Drought_cDNA_P Parameter: Tissue Value: Aerial
  misc_feature: MA Experiment 108573 PARAMETER Experiment Name: At_Drought_cDNA_P Parameter: Treatment Value: Drought vs. No Drought
  misc_feature: MA Experiment ID: 108595 Result: Up-regulated in Transcription
  misc_feature: MA Experiment 108595 PARAMETER Experiment Name: At_Ler-pi_Ovule_cDNA_P Parameter: Plant Line Value: null
  misc_feature: MA Experiment ID: 108605 Result: Up-regulated in Transcription
  misc_feature: MA Experiment 108605 PARAMETER Experiment Name: At_100uM_ABA_cDNA_P Parameter: Timepoint (hr) Value: 6
  misc_feature: MA Experiment 108605 PARAMETER Experiment Name: At_100uM_ABA_cDNA_P Parameter: Tissue Value: Aerial
  misc_feature: MA Experiment 108605 PARAMETER Experiment Name: At_100uM_ABA_cDNA_P Parameter: Treatment Value: 100uM ABA vs. No Treatment
  misc_feature: MA Experiment ID: 108607 Result: Up-regulated in Transcription
  misc_feature: MA Experiment 108607 PARAMETER Experiment Name: At_100uM_ABA_cDNA_P Parameter: Timepoint (hr) Value: 4
  misc_feature: MA Experiment 108607 PARAMETER Experiment Name: At_100uM_ABA_cDNA_P Parameter: Tissue Value: Aerial
  misc_feature: MA Experiment 108607 PARAMETER Experiment Name: At_100uM_ABA_cDNA_P Parameter: Treatment Value: 100uM ABA vs. No Treatment
  misc_feature: MA Experiment ID: 20000069 Result: Up-regulated in Transcription
  misc_feature: MA Experiment 20000069 PARAMETER Experiment Name: At_100uM_ABA_Mutants_cDNA_P Parameter: Plant Line Value: CS23
  misc_feature: MA Experiment 20000069 PARAMETER Experiment Name: At_100uM_ABA_Mutants_cDNA_P Parameter: Timepoint (hr) Value: 6
  misc_feature: MA Experiment 20000069 PARAMETER Experiment Name: At_100uM_ABA_Mutants_cDNA_P Parameter: Tissue Value: Aerial
  misc_feature: MA Experiment 20000069 PARAMETER Experiment Name: At_100uM_ABA_Mutants_cDNA_P Parameter: Treatment Value: 100uM ABA vs. No Treatment
  misc_feature: MA Experiment ID: 20000070 Result: Up-regulated in Transcription
  misc_feature: MA Experiment 20000070 PARAMETER Experiment Name: At_100uM_ABA_Mutants_cDNA_P Parameter: Plant Line Value: CS24
  misc_feature: MA Experiment 20000070 PARAMETER Experiment Name: At_100uM_ABA_Mutants_cDNA_P Parameter: Timepoint (hr) Value: 6
  misc_feature: MA Experiment 20000070 PARAMETER Experiment Name: At_100uM_ABA_Mutants_cDNA_P Parameter: Tissue Value: Aerial
  misc_feature: MA Experiment 20000070 PARAMETER Experiment Name: At_100uM_ABA_Mutants_cDNA_P Parameter: Treatment Value: 100uM ABA vs. No Treatment
  misc_feature: MA Experiment ID: 20000071 Result: Up-regulated in Transcription
  misc_feature: MA Experiment 20000071 PARAMETER Experiment Name: At_100uM_ABA_Mutants_cDNA_P Parameter: Plant Line Value: CS8104
  misc_feature: MA Experiment 20000071 PARAMETER Experiment Name: At_100uM_ABA_Mutants_cDNA_P Parameter: Timepoint (hr) Value: 6
  misc_feature: MA Experiment 20000071 PARAMETER Experiment Name: At_100uM_ABA_Mutants_cDNA_P Parameter: Tissue Value: Aerial
  misc_feature: MA Experiment 20000071 PARAMETER Experiment Name: At_100uM_ABA_Mutants_cDNA_P Parameter: Treatment Value: 100uM ABA vs. No Treatment
  misc_feature: MA Experiment ID: 20000072 Result: Up-regulated in Transcription
  misc_feature: MA Experiment 20000072 PARAMETER Experiment Name: At_100uM_ABA_Mutants_cDNA_P Parameter: Plant Line Value: CS8105
  misc_feature: MA Experiment 20000072 PARAMETER Experiment Name: At_100uM_ABA_Mutants_cDNA_P Parameter: Timepoint (hr) Value: 6
  misc_feature: MA Experiment 20000072 PARAMETER Experiment Name: At_100uM_ABA_Mutants_cDNA_P Parameter: Tissue Value: Aerial
  misc_feature: MA Experiment 20000072 PARAMETER Experiment Name: At_100uM_ABA_Mutants_cDNA_P Parameter: Treatment Value: 100uM ABA vs. No Treatment
  misc_feature: MA Experiment ID: 20000117 Result: Up-regulated in Transcription
  misc_feature: MA Experiment 20000117 PARAMETER Experiment Name: At_100uM_ABA_Mutants_cDNA_P Parameter: Plant Line Value: Columbia
  misc_feature: MA Experiment 20000117 PARAMETER Experiment Name: At_100uM_ABA_Mutants_cDNA_P Parameter: Timepoint (hr) Value: 6
  misc_feature: MA Experiment 20000117 PARAMETER Experiment Name: At_100uM_ABA_Mutants_cDNA_P Parameter: Tissue Value: Aerial
  misc_feature: MA Experiment 20000117 PARAMETER Experiment Name: At_100uM_ABA_Mutants_cDNA_P Parameter: Treatment Value: 100uM ABA vs. No Treatment
  misc_feature: MA Experiment ID: 20000169 Result: Up-regulated in Transcription
  misc_feature: MA Experiment 20000169 PARAMETER Experiment Name: At_100uM_ABA_P Parameter: Age (day) Value: 14
  misc_feature: MA Experiment 20000169 PARAMETER Experiment Name: At_100uM_ABA_P Parameter: Organism Value: A. thaliana
  misc_feature: MA Experiment 20000169 PARAMETER Experiment Name: At_100uM_ABA_P Parameter: Plant Line Value: WS
  misc_feature: MA Experiment 20000169 PARAMETER Experiment Name: At_100uM_ABA_P Parameter: Timepoint (hr) Value: 6
  misc_feature: MA Experiment 20000169 PARAMETER Experiment Name: At_100uM_ABA_P Parameter: Tissue Value: Aerial
  misc_feature: MA Experiment 20000169 PARAMETER Experiment Name: At_100uM_ABA_P Parameter: Treatment Value: 100uM ABA vs. No Treatment
  misc_feature: MA Experiment ID: 20000184 Result: Up-regulated in Transcription
  misc_feature: MA Experiment 20000184 PARAMETER Experiment Name: At_Shoots__P Parameter: Age (day) Value: 7
  misc_feature: MA Experiment 20000184 PARAMETER Experiment Name: At_Shoots__P Parameter: Tissue Value: Shoots vs. Whole Plant
  misc_feature: MA Experiment ID: 20000185 Result: Down-regulated in Transcription
  misc_feature: MA Experiment 20000185 PARAMETER Experiment Name: At_Roots__P Parameter: Age (day) Value: 7 vs. 21
  misc_feature: MA Experiment 20000185 PARAMETER Experiment Name: At_Roots__P Parameter: Organism Value: A. thaliana
  misc_feature: MA Experiment 20000185 PARAMETER Experiment Name: At_Roots__P Parameter: Tissue Value: Roots vs. Whole Plant
  misc_feature: MA Experiment ID: 20000227 Result: Down-regulated in Transcription
  misc_feature: MA Experiment 20000227 PARAMETER Experiment Name: At_Root-Tips-vs-Tops_P Parameter: Tissue Value: Root Tips vs. Root Tops
  misc_feature: MA Experiment ID: 20000264 Result: Up-regulated in Transcription
  misc_feature: MA Experiment 20000264 PARAMETER Experiment Name: At_Open_Flower_P Parameter: Age (day) Value: 21
  misc_feature: MA Experiment 20000264 PARAMETER Experiment Name: At_Open_Flower_P Parameter: Plant Line Value: WS
  misc_feature: MA Experiment 20000264 PARAMETER Experiment Name: At_Open_Flower_P Parameter: Tissue Value: Open Flower vs. Whole Plant
  misc_feature: MA Experiment ID: 20000267 Result: Up-regulated in Transcription
  misc_feature: MA Experiment 20000267 PARAMETER Experiment Name: At_Drought_P Parameter: Age (day) Value: 7
  misc_feature: MA Experiment 20000267 PARAMETER Experiment Name: At_Drought_P Parameter: Organism Value: A. thaliana
  misc_feature: MA Experiment 20000267 PARAMETER Experiment Name: At_Drought_P Parameter: Plant Line Value: WS
  misc_feature: MA Experiment 20000267 PARAMETER Experiment Name: At_Drought_P Parameter: Timepoint (hr) Value: 6
  misc_feature: MA Experiment 20000267 PARAMETER Experiment Name: At_Drought_P Parameter: Tissue Value: Whole Plant
  misc_feature: MA Experiment 20000267 PARAMETER Experiment Name: At_Drought_P Parameter: Treatment Value: Drought vs. No Drought
  misc_feature: MA Experiment ID: 20000268 Result: Up-regulated in Transcription
  misc_feature: MA Experiment 20000268 PARAMETER Experiment Name: At_100mM_NaCl__P Parameter: Age (day) Value: 14
  misc_feature: MA Experiment 20000268 PARAMETER Experiment Name: At_100mM_NaCl__P Parameter: Organism Value: A. thaliana
  misc_feature: MA Experiment 20000268 PARAMETER Experiment Name: At_100mM_NaCl__P Parameter: Plant Line Value: WS
  misc_feature: MA Experiment 20000268 PARAMETER Experiment Name: At_100mM_NaCl__P Parameter: Timepoint (hr) Value: 6
  misc_feature: MA Experiment 20000268 PARAMETER Experiment Name: At_100mM_NaCl__P Parameter: Tissue Value: Whole Plant
  misc_feature: MA Experiment 20000268 PARAMETER Experiment Name: At_100mM_NaCl__P Parameter: Treatment Value: 100mM NaCl vs. No Treatment
  misc_feature: MA Experiment ID: 20000308 Result: Up-regulated in Transcription
  misc_feature: MA Experiment 20000308 PARAMETER Experiment Name: At_100mM_NaCl__P Parameter: Age (day) Value: 17
  misc_feature: MA Experiment 20000308 PARAMETER Experiment Name: At_100mM_NaCl__P Parameter: Organism Value: A. thaliana
  misc_feature: MA Experiment 20000308 PARAMETER Experiment Name: At_100mM_NaCl__P Parameter: Plant Line Value: WS
  misc_feature: MA Experiment 20000308 PARAMETER Experiment Name: At_100mM_NaCl__P Parameter: Timepoint (hr) Value: 72
  misc_feature: MA Experiment 20000308 PARAMETER Experiment Name: At_100mM_NaCl__P Parameter: Tissue Value: Whole Plant
  misc_feature: MA Experiment 20000308 PARAMETER Experiment Name: At_100mM_NaCl__P Parameter: Treatment Value: 100mM NaCl vs. No Treatment
  misc_feature: MA Experiment ID: 20000436 Result: Up-regulated in Transcription
  misc_feature: MA Experiment 20000436 PARAMETER Experiment Name: At_Drought_P Parameter: Age (day) Value: 7
  misc_feature: MA Experiment 20000436 PARAMETER Experiment Name: At_Drought_P Parameter: Organism Value: A. thaliana
  misc_feature: MA Experiment 20000436 PARAMETER Experiment Name: At_Drought_P Parameter: Plant Line Value: WS
  misc_feature: MA Experiment 20000436 PARAMETER Experiment Name: At_Drought_P Parameter: Timepoint (hr) Value: 12
  misc_feature: MA Experiment 20000436 PARAMETER Experiment Name: At_Drought_P Parameter: Tissue Value: Whole Plant
  misc_feature: MA Experiment 20000436 PARAMETER Experiment Name: At_Drought_P Parameter: Treatment Value: Drought vs. No Drought
  misc_feature: MA Experiment ID: 20000437 Result: Up-regulated in Transcription
  misc_feature: MA Experiment 20000437 PARAMETER Experiment Name: At_Drought_P Parameter: Age (day) Value: 8
  misc_feature: MA Experiment 20000437 PARAMETER Experiment Name: At_Drought_P Parameter: Organism Value: A. thaliana
  misc_feature: MA Experiment 20000437 PARAMETER Experiment Name: At_Drought_P Parameter: Plant Line Value: WS
  misc_feature: MA Experiment 20000437 PARAMETER Experiment Name: At_Drought_P Parameter: Timepoint (hr) Value: 24
  misc_feature: MA Experiment 20000437 PARAMETER Experiment Name: At_Drought_P Parameter: Tissue Value: Whole Plant
  misc_feature: MA Experiment 20000437 PARAMETER Experiment Name: At_Drought_P Parameter: Treatment Value: Drought vs. No Drought
  misc_feature: MA Experiment ID: 20000438 Result: Up-regulated in Transcription
  misc_feature: MA Experiment 20000438 PARAMETER Experiment Name: At_Shoots__P Parameter: Age (day) Value: 14
  misc_feature: MA Experiment 20000438 PARAMETER Experiment Name: At_Shoots__P Parameter: Tissue Value: Shoots vs. Whole Plant
  misc_feature: MA Experiment ID: 20000453 Result: Up-regulated in Transcription
  misc_feature: MA Experiment 20000453 PARAMETER Experiment Name: At_100uM_ABA_P Parameter: Age (day) Value: 15
  misc_feature: MA Experiment 20000453 PARAMETER Experiment Name: At_100uM_ABA_P Parameter: Organism Value: A. thaliana
  misc_feature: MA Experiment 20000453 PARAMETER Experiment Name: At_100uM_ABA_P Parameter: Plant Line Value: WS
  misc_feature: MA Experiment 20000453 PARAMETER Experiment Name: At_100uM_ABA_P Parameter: Timepoint (hr) Value: 24
  misc_feature: MA Experiment 20000453 PARAMETER Experiment Name: At_100uM_ABA_P Parameter: Tissue Value: Aerial
  misc_feature: MA Experiment 20000453 PARAMETER Experiment Name: At_100uM_ABA_P Parameter: Treatment Value: 100uM ABA vs. No Treatment
  misc_feature: MA Experiment ID: 20000455 Result: Up-regulated in Transcription
  misc_feature: MA Experiment 20000455 PARAMETER Experiment Name: At_100uM_ABA_P Parameter: Age (day) Value: 16
  misc_feature: MA Experiment 20000455 PARAMETER Experiment Name: At_100uM_ABA_P Parameter: Organism Value: A. thaliana
  misc_feature: MA Experiment 20000455 PARAMETER Experiment Name: At_100uM_ABA_P Parameter: Plant Line Value: WS
  misc_feature: MA Experiment 20000455 PARAMETER Experiment Name: At_100uM_ABA_P Parameter: Timepoint (hr) Value: 48
  misc_feature: MA Experiment 20000455 PARAMETER Experiment Name: At_100uM_ABA_P Parameter: Tissue Value: Aerial
  misc_feature: MA Experiment 20000455 PARAMETER Experiment Name: At_100uM_ABA_P Parameter: Treatment Value: 100uM ABA vs. No Treatment
  misc_feature: MA Experiment ID: 20000460 Result: Up-regulated in Transcription
  misc_feature: MA Experiment 20000460 PARAMETER Experiment Name: At_10percent_PEG_P Parameter: Age (day) Value: 12
  misc_feature: MA Experiment 20000460 PARAMETER Experiment Name: At_10percent_PEG_P Parameter: Organism Value: A. thaliana
  misc_feature: MA Experiment 20000460 PARAMETER Experiment Name: At_10percent_PEG_P Parameter: Plant Line Value: WS
  misc_feature: MA Experiment 20000460 PARAMETER Experiment Name: At_10percent_PEG_P Parameter: Timepoint (day) Value: 12
  misc_feature: MA Experiment 20000460 PARAMETER Experiment Name: At_10percent_PEG_P Parameter: Tissue Value: Whole Plant
  misc_feature: MA Experiment 20000460 PARAMETER Experiment Name: At_10percent_PEG_P Parameter: Treatment Value: 10percent PEG vs. No Treatment
  misc_feature: MA Experiment ID: 20000506 Result: Up-regulated in Transcription
  misc_feature: MA Experiment 20000506 PARAMETER Experiment Name: At_Wounding_P Parameter: Organism Value: A. thaliana
  misc_feature: MA Experiment 20000506 PARAMETER Experiment Name: At_Wounding_P Parameter: Plant Line Value: WS
  misc_feature: MA Experiment 20000506 PARAMETER Experiment Name: At_Wounding_P Parameter: Timepoint (hr) Value: 6
  misc_feature: MA Experiment 20000506 PARAMETER Experiment Name: At_Wounding_P Parameter: Tissue Value: Aerial
  misc_feature: MA Experiment 20000506 PARAMETER Experiment Name: At_Wounding_P Parameter: Treatment Value: Wounding vs. No Wounding
  misc_feature: MA Experiment ID: 20000573 Result: Down-regulated in Transcription
  misc_feature: MA Experiment 20000573 PARAMETER Experiment Name: At_100uM_ABA_Mutants__P Parameter: Organism Value: A. thaliana
  misc_feature: MA Experiment 20000573 PARAMETER Experiment Name: At_100uM_ABA_Mutants__P Parameter: Plant Line Value: CS22 vs. Ler wt
  misc_feature: MA Experiment 20000573 PARAMETER Experiment Name: At_100uM_ABA_Mutants__P Parameter: Timepoint (hr) Value: N/A
  misc_feature: MA Experiment 20000573 PARAMETER Experiment Name: At_100uM_ABA_Mutants__P Parameter: Tissue Value: Whole Plant
  misc_feature: MA Experiment 20000573 PARAMETER Experiment Name: At_100uM_ABA_Mutants__P Parameter: Treatment Value: None
  misc_feature: MA Experiment ID: 20001450 Result: Up-regulated in Transcription
  misc_feature: MA Experiment 20001450 PARAMETER Experiment Name: At_Far-red-induction_P Parameter: Age (day) Value: 7
  misc_feature: MA Experiment 20001450 PARAMETER Experiment Name: At_Far-red-induction_P Parameter: Light Value: Far-red vs. White
  misc_feature: MA Experiment 20001450 PARAMETER Experiment Name: At_Far-red-induction_P Parameter: Organism Value: A. thaliana
  misc_feature: MA Experiment 20001450 PARAMETER Experiment Name: At_Far-red-induction_P Parameter: Plant Line Value: Columbia
  misc_feature: MA Experiment 20001450 PARAMETER Experiment Name: At_Far-red-induction_P Parameter: Timepoint (hr) Value: 8
  misc_feature: MA Experiment 20001450 PARAMETER Experiment Name: At_Far-red-induction_P Parameter: Tissue Value: Whole Plant
  misc_feature: MA Experiment ID: 20001451 Result: Up-regulated in Transcription
  misc_feature: MA Experiment 20001451 PARAMETER Experiment Name: At_Far-red-induction_P Parameter: Age (day) Value: 7
  misc_feature: MA Experiment 20001451 PARAMETER Experiment Name: At_Far-red-induction_P Parameter: Light Value: Far-red vs. White
  misc_feature: MA Experiment 20001451 PARAMETER Experiment Name: At_Far-red-induction_P Parameter: Organism Value: A. thaliana
  misc_feature: MA Experiment 20001451 PARAMETER Experiment Name: At_Far-red-induction_P Parameter: Plant Line Value: Columbia
  misc_feature: MA Experiment 20001451 PARAMETER Experiment Name: At_Far-red-induction_P Parameter: Timepoint (hr) Value: 24
  misc_feature: MA Experiment 20001451 PARAMETER Experiment Name: At_Far-red-induction_P Parameter: Tissue Value: Whole Plant
  misc_feature: MA Experiment ID: 20001554 Result: Up-regulated in Transcription
  misc_feature: MA Experiment 20001554 PARAMETER Experiment Name: At_Drought_Soil_Dry_P Parameter: Age (day) Value: 21
  misc_feature: MA Experiment 20001554 PARAMETER Experiment Name: At_Drought_Soil_Dry_P Parameter: Organism Value: A. thaliana
  misc_feature: MA Experiment 20001554 PARAMETER Experiment Name: At_Drought_Soil_Dry_P Parameter: Plant Line Value: WS
  misc_feature: MA Experiment 20001554 PARAMETER Experiment Name: At_Drought_Soil_Dry_P Parameter: Post Timepoint (hr) Value: None
  misc_feature: MA Experiment 20001554 PARAMETER Experiment Name: At_Drought_Soil_Dry_P Parameter: Post-Treatment Value: None
  misc_feature: MA Experiment 20001554 PARAMETER Experiment Name: At_Drought_Soil_Dry_P Parameter: Timepoint (day) Value: 7
  misc_feature: MA Experiment 20001554 PARAMETER Experiment Name: At_Drought_Soil_Dry_P Parameter: Treatment Value: Drought vs. No Drought
  misc_feature: MA Experiment ID: 20001555 Result: Up-regulated in Transcription
  misc_feature: MA Experiment 20001555 PARAMETER Experiment Name: At_Drought_Soil_Dry_P Parameter: Age (day) Value: 24
  misc_feature: MA Experiment 20001555 PARAMETER Experiment Name: At_Drought_Soil_Dry_P Parameter: Organism Value: A. thaliana
  misc_feature: MA Experiment 20001555 PARAMETER Experiment Name: At_Drought_Soil_Dry_P Parameter: Plant Line Value: WS
  misc_feature: MA Experiment 20001555 PARAMETER Experiment Name: At_Drought_Soil_Dry_P Parameter: Post Timepoint (hr) Value: None
  misc_feature: MA Experiment 20001555 PARAMETER Experiment Name: At_Drought_Soil_Dry_P Parameter: Post-Treatment Value: None
  misc_feature: MA Experiment 20001555 PARAMETER Experiment Name: At_Drought_Soil_Dry_P Parameter: Timepoint (day) Value: 10
  misc_feature: MA Experiment 20001555 PARAMETER Experiment Name: At_Drought_Soil_Dry_P Parameter: Treatment Value: Drought vs. No Drought
  misc_feature: MA Experiment ID: 20001556 Result: Up-regulated in Transcription
  misc_feature: MA Experiment 20001556 PARAMETER Experiment Name: At_Drought_Soil_Dry_P Parameter: Age (day) Value: 26
  misc_feature: MA Experiment 20001556 PARAMETER Experiment Name: At_Drought_Soil_Dry_P Parameter: Organism Value: A. thaliana
  misc_feature: MA Experiment 20001556 PARAMETER Experiment Name: At_Drought_Soil_Dry_P Parameter: Plant Line Value: WS
  misc_feature: MA Experiment 20001556 PARAMETER Experiment Name: At_Drought_Soil_Dry_P Parameter: Post Timepoint (hr) Value: None
  misc_feature: MA Experiment 20001556 PARAMETER Experiment Name: At_Drought_Soil_Dry_P Parameter: Post-Treatment Value: None
  misc_feature: MA Experiment 20001556 PARAMETER Experiment Name: At_Drought_Soil_Dry_P Parameter: Timepoint (day) Value: 12
  misc_feature: MA Experiment 20001556 PARAMETER Experiment Name: At_Drought_Soil_Dry_P Parameter: Treatment Value: Drought vs. No Drought
  misc_feature: MA Experiment ID: 20001559 Result: Up-regulated in Transcription
  misc_feature: MA Experiment 20001559 PARAMETER Experiment Name: At_Drought_Soil_Dry_P Parameter: Age (day) Value: 28
  misc_feature: MA Experiment 20001559 PARAMETER Experiment Name: At_Drought_Soil_Dry_P Parameter: Organism Value: A. thaliana
  misc_feature: MA Experiment 20001559 PARAMETER Experiment Name: At_Drought_Soil_Dry_P Parameter: Plant Line Value: WS
  misc_feature: MA Experiment 20001559 PARAMETER Experiment Name: At_Drought_Soil_Dry_P Parameter: Post Timepoint (hr) Value: 29
  misc_feature: MA Experiment 20001559 PARAMETER Experiment Name: At_Drought_Soil_Dry_P Parameter: Post-Treatment Value: Re-Water vs. No Drought
  misc_feature: MA Experiment 20001559 PARAMETER Experiment Name: At_Drought_Soil_Dry_P Parameter: Timepoint (day) Value: 14
  misc_feature: MA Experiment 20001559 PARAMETER Experiment Name: At_Drought_Soil_Dry_P Parameter: Treatment Value: Drought vs. No Drought
  misc_feature: MA Experiment ID: 20001560 Result: Up-regulated in Transcription
  misc_feature: MA Experiment 20001560 PARAMETER Experiment Name: At_Drought_Soil_Dry_P Parameter: Age (day) Value: 28
  misc_feature: MA Experiment 20001560 PARAMETER Experiment Name: At_Drought_Soil_Dry_P Parameter: Organism Value: A. thaliana
  misc_feature: MA Experiment 20001560 PARAMETER Experiment Name: At_Drought_Soil_Dry_P Parameter: Plant Line Value: WS
  misc_feature: MA Experiment 20001560 PARAMETER Experiment Name: At_Drought_Soil_Dry_P Parameter: Post Timepoint (hr) Value: None
  misc_feature: MA Experiment 20001560 PARAMETER Experiment Name: At_Drought_Soil_Dry_P Parameter: Post-Treatment Value: None
  misc_feature: MA Experiment 20001560 PARAMETER Experiment Name: At_Drought_Soil_Dry_P Parameter: Timepoint (day) Value: 14
  misc_feature: MA Experiment 20001560 PARAMETER Experiment Name: At_Drought_Soil_Dry_P Parameter: Treatment Value: Drought vs. No Drought
  misc_feature: MA Experiment ID: 20001772 Result: Up-regulated in Transcription
  misc_feature: MA Experiment 20001772 PARAMETER Experiment Name: At_Far-red-enriched-adult_P Parameter: Age (day) Value: 29
  misc_feature: MA Experiment 20001772 PARAMETER Experiment Name: At_Far-red-enriched-adult_P Parameter: Light Value: Far-red enriched vs. White
  misc_feature: MA Experiment 20001772 PARAMETER Experiment Name: At_Far-red-enriched-adult_P Parameter: Organism Value: A. thaliana
  misc_feature: MA Experiment 20001772 PARAMETER Experiment Name: At_Far-red-enriched-adult_P Parameter: Plant Line Value: Columbia
  misc_feature: MA Experiment 20001772 PARAMETER Experiment Name: At_Far-red-enriched-adult_P Parameter: Timepoint (hr) Value: 24
  misc_feature: MA Experiment 20001772 PARAMETER Experiment Name: At_Far-red-enriched-adult_P Parameter: Tissue Value: Aerial
  misc_feature: MA Experiment ID: 20001904 Result: Up-regulated in Transcription
  misc_feature: MA Experiment 20001904 PARAMETER Experiment Name: At_Drought_Reproduction_P Parameter: Age (day) Value: 37
  misc_feature: MA Experiment 20001904 PARAMETER Experiment Name: At_Drought_Reproduction_P Parameter: Organism Value: A. thaliana
  misc_feature: MA Experiment 20001904 PARAMETER Experiment Name: At_Drought_Reproduction_P Parameter: Plant Line Value: WS
  misc_feature: MA Experiment 20001904 PARAMETER Experiment Name: At_Drought_Reproduction_P Parameter: Timepoint (day) Value: 7
  misc_feature: MA Experiment 20001904 PARAMETER Experiment Name: At_Drought_Reproduction_P Parameter: Tissue Value: Rosettes
  misc_feature: MA Experiment 20001904 PARAMETER Experiment Name: At_Drought_Reproduction_P Parameter: Treatment Value: Drought vs. No Drought
  misc_feature: MA Experiment ID: 20001905 Result: Up-regulated in Transcription
  misc_feature: MA Experiment 20001905 PARAMETER Experiment Name: At_Drought_Reproduction_P Parameter: Age (day) Value: 40
  misc_feature: MA Experiment 20001905 PARAMETER Experiment Name: At_Drought_Reproduction_P Parameter: Organism Value: A. thaliana
  misc_feature: MA Experiment 20001905 PARAMETER Experiment Name: At_Drought_Reproduction_P Parameter: Plant Line Value: WS
  misc_feature: MA Experiment 20001905 PARAMETER Experiment Name: At_Drought_Reproduction_P Parameter: Timepoint (day) Value: 10
  misc_feature: MA Experiment 20001905 PARAMETER Experiment Name: At_Drought_Reproduction_P Parameter: Tissue Value: Rosettes
  misc_feature: MA Experiment 20001905 PARAMETER Experiment Name: At_Drought_Reproduction_P Parameter: Treatment Value: Drought vs. No Drought
  misc_feature: MA Experiment ID: 20001908 Result: Up-regulated in Transcription
  misc_feature: MA Experiment 20001908 PARAMETER Experiment Name: At_Drought_Reproduction_P Parameter: Age (day) Value: 40
  misc_feature: MA Experiment 20001908 PARAMETER Experiment Name: At_Drought_Reproduction_P Parameter: Organism Value: A. thaliana
  misc_feature: MA Experiment 20001908 PARAMETER Experiment Name: At_Drought_Reproduction_P Parameter: Plant Line Value: WS
  misc_feature: MA Experiment 20001908 PARAMETER Experiment Name: At_Drought_Reproduction_P Parameter: Timepoint (day) Value: 10
  misc_feature: MA Experiment 20001908 PARAMETER Experiment Name: At_Drought_Reproduction_P Parameter: Tissue Value: Siliques
  misc_feature: MA Experiment 20001908 PARAMETER Experiment Name: At_Drought_Reproduction_P Parameter: Treatment Value: Drought vs. No Drought
  misc_feature: MA Experiment ID: 20001910 Result: Up-regulated in Transcription
  misc_feature: MA Experiment 20001910 PARAMETER Experiment Name: At_Drought_Reproduction_P Parameter: Age (day) Value: 37
  misc_feature: MA Experiment 20001910 PARAMETER Experiment Name: At_Drought_Reproduction_P Parameter: Organism Value: A. thaliana
  misc_feature: MA Experiment 20001910 PARAMETER Experiment Name: At_Drought_Reproduction_P Parameter: Plant Line Value: WS
  misc_feature: MA Experiment 20001910 PARAMETER Experiment Name: At_Drought_Reproduction_P Parameter: Timepoint (day) Value: 7
  misc_feature: MA Experiment 20001910 PARAMETER Experiment Name: At_Drought_Reproduction_P Parameter: Tissue Value: Flowers
  misc_feature: MA Experiment 20001910 PARAMETER Experiment Name: At_Drought_Reproduction_P Parameter: Treatment Value: Drought vs. No Drought
ccacgtccgatccatcacatctcctcttgcaaaccaacgtaaaacactaactaagagatcaatatggctggagtgatgaagttggcatgcatggtcttggcttgcatgattgtggccggtccaatcacagcgaacgcgcttatgagttgtggcaccgtcaacggcaacctggcagggtgcattgcctacttgacccgaggtgctccacttacccaagggtgctgcaacggcgttactaaccttaaaaacatggccagtacaaccccagaccgtcagcaagcttgccgttgccttcaatctgccgctaaagccgttggtcccggtctcaacactgcccgtgcagctggacttcctagcgcatgcaaagtcaatattccttacaaaatcagcgccagcaccaactgcaacaccgtgaggtgatgagcgacggtcaaatgaagctactagcggatgtttcgaatattatataatcgatgagataatattaaataaagatgttcgaatggctgtactcttttcaatttcctgtctttttttatcgtggcgtttctattatgtgatcgtctgtactatgttcgcaaacaacgttctttgaatttcagacttgaagtttaagtt

SEQ ID NO: 30562 - protein, 118 aa, Arabidopsis thaliana
  peptide (1)..(118): Ceres Seq. ID no. 13497743
  misc_feature (29)..(114): Pfam Name: Protease inhibitor/seed storage/LTP family Pfam Description: Protease inhibitor/seed storage/LTP family
  misc_feature (1)..(118): Homolog of NCBI NO: 2497740 NR Description: Nonspecific lipid-transfer protein D precursor
  misc_feature (1)..(118): Homolog of NCBI NO: 5777389 NR Description: non-specific lipid transfer protein [Brassica
  misc_feature (1)..(118): Homolog of NCBI NO: 2497738 NR Description: NONSPECIFIC LIPID-TRANSFER PROTEIN A PRECURSOR
  misc_feature (1)..(118): Homolog of NCBI NO: 2497737 NR Description: NONSPECIFIC LIPID-TRANSFER PROTEIN 3 PRECURSOR
  misc_feature (1)..(118): Homolog of NCBI NO: 15224899 NR Description: nonspecific lipid transfer protein 1 (LTP 1)
  misc_feature (1)..(118): Homolog of NCBI NO: 11273805 NR Description: lipid transfer protein [imported] - wild cabbage
  misc_feature (1)..(118): Homolog of NCBI NO: 2497739 NR Description: NONSPECIFIC LIPID-TRANSFER PROTEIN B PRECURSOR
  misc_feature (1)..(118): Homolog of NCBI NO: 2497736 NR Description: NONSPECIFIC LIPID-TRANSFER PROTEIN 2 PRECURSOR
  misc_feature (1)..(118): Homolog of NCBI NO: 2497735 NR Description: NONSPECIFIC LIPID-TRANSFER PROTEIN 1 PRECURSOR
  misc_feature (1)..(118): Homolog of NCBI NO: 15224898 NR Description: nonspecific lipid transfer protein 2 (LTP 2)
MAGVMKLACMVLACMIVAGPITANALMSCGTVNGNLAGCIAYLTRGAPLTQGCCNGVTNLKNMASTTPDRQQACRCLQSAAKAVGPGLNTARAAGLPSACKVNIPYKISASTNCNTVR

SEQ ID NO: 30563 - protein, 114 aa, Arabidopsis thaliana
  peptide (1)..(114): Ceres Seq. ID no. 13497744
  misc_feature (25)..(110): Pfam Name: Protease inhibitor/seed storage/LTP family Pfam Description: Protease inhibitor/seed storage/LTP family
  misc_feature (1)..(114): Homolog of NCBI NO: 2497740 NR Description: Nonspecific lipid-transfer protein D precursor
  misc_feature (1)..(114): Homolog of NCBI NO: 5777389 NR Description: non-specific lipid transfer protein [Brassica
  misc_feature (1)..(114): Homolog of NCBI NO: 2497738 NR Description: NONSPECIFIC LIPID-TRANSFER PROTEIN A PRECURSOR
  misc_feature (1)..(114): Homolog of NCBI NO: 2497737 NR Description: NONSPECIFIC LIPID-TRANSFER PROTEIN 3 PRECURSOR
  misc_feature (1)..(114): Homolog of NCBI NO: 15224899 NR Description: nonspecific lipid transfer protein 1 (LTP 1)
  misc_feature (1)..(114): Homolog of NCBI NO: 11273805 NR Description: lipid transfer protein [imported] - wild cabbage
  misc_feature (1)..(114): Homolog of NCBI NO: 2497739 NR Description: NONSPECIFIC LIPID-TRANSFER PROTEIN B PRECURSOR
  misc_feature (1)..(114): Homolog of NCBI NO: 2497736 NR Description: NONSPECIFIC LIPID-TRANSFER PROTEIN 2 PRECURSOR
  misc_feature (1)..(114): Homolog of NCBI NO: 2497735 NR Description: NONSPECIFIC LIPID-TRANSFER PROTEIN 1 PRECURSOR
  misc_feature (1)..(114): Homolog of NCBI NO: 15224898 NR Description: nonspecific lipid transfer protein 2 (LTP 2)
MKLACMVLACMIVAGPITANALMSCGTVNGNLAGCIAYLTRGAPLTQGCCNGVTNLKNMASTTPDRQQACRCLQSAAKAVGPGLNTARAAGLPSACKVNIPYKISASTNCNTVR

SEQ ID NO: 30564 - protein, 109 aa, Arabidopsis thaliana
  peptide (1)..(109): Ceres Seq. ID no. 13497745
  misc_feature (20)..(105): Pfam Name: Protease inhibitor/seed storage/LTP family Pfam Description: Protease inhibitor/seed storage/LTP family
  misc_feature (1)..(109): Homolog of NCBI NO: 2497740 NR Description: Nonspecific lipid-transfer protein D precursor
  misc_feature (1)..(109): Homolog of NCBI NO: 5777389 NR Description: non-specific lipid transfer protein [Brassica
  misc_feature (1)..(109): Homolog of NCBI NO: 2497738 NR Description: NONSPECIFIC LIPID-TRANSFER PROTEIN A PRECURSOR
  misc_feature (1)..(109): Homolog of NCBI NO: 2497737 NR Description: NONSPECIFIC LIPID-TRANSFER PROTEIN 3 PRECURSOR
  misc_feature (1)..(109): Homolog of NCBI NO: 15224899 NR Description: nonspecific lipid transfer protein 1 (LTP 1)
  misc_feature (1)..(109): Homolog of NCBI NO: 11273805 NR Description: lipid transfer protein [imported] - wild cabbage
  misc_feature (1)..(109): Homolog of NCBI NO: 2497739 NR Description: NONSPECIFIC LIPID-TRANSFER PROTEIN B PRECURSOR
  misc_feature (1)..(109): Homolog of NCBI NO: 2497736 NR Description: NONSPECIFIC LIPID-TRANSFER PROTEIN 2 PRECURSOR
  misc_feature (1)..(109): Homolog of NCBI NO: 2497735 NR Description: NONSPECIFIC LIPID-TRANSFER PROTEIN 1 PRECURSOR
  misc_feature (1)..(109): Homolog of NCBI NO: 15224898 NR Description: nonspecific lipid transfer protein 2 (LTP 2)
MVLACMIVAGPITANALMSCGTVNGNLAGCIAYLTRGAPLTQGCCNGVTNLKNMASTTPDRQQACRCLQSAAKAVGPGLNTARAAGLPSACKVNIPYKISASTNCNTVR

SEQ ID NO: 30565 - DNA, 1065 bp, Arabidopsis thaliana
  misc_feature (1)..(1065): Ceres Seq. ID no. 12370948
  misc_feature: MA Experiment ID: 108433 Result: Down-regulated in Transcription
  misc_feature: MA Experiment 108433 PARAMETER Experiment Name: At_rhl_Mutant2_cDNA_P Parameter: Age (day) Value: 7
  misc_feature: MA Experiment 108433 PARAMETER Experiment Name: At_rhl_Mutant2_cDNA_P Parameter: Organism Value: A. thaliana
  misc_feature: MA Experiment 108433 PARAMETER Experiment Name: At_rhl_Mutant2_cDNA_P Parameter: Plant Line Value: rhl Mutant vs. wt landsburg
  misc_feature: MA Experiment 108433 PARAMETER Experiment Name: At_rhl_Mutant2_cDNA_P Parameter: Tissue Value: Roots
  misc_feature: MA Experiment ID: 108434 Result: Up-regulated in Transcription
  misc_feature: MA Experiment 108434 PARAMETER Experiment Name: At_Root_Tips_cDNA_P Parameter: Tissue Value: Root Tips
  misc_feature: MA Experiment ID: 108462 Result: Down-regulated in Transcription
  misc_feature: MA Experiment 108462 PARAMETER Experiment Name: At_Germinating_Seeds_cDNA_P Parameter: Age (day) Value: 2 vs. 0
  misc_feature: MA Experiment 108462 PARAMETER Experiment Name: At_Germinating_Seeds_cDNA_P Parameter: Tissue Value: Germinating Seeds
  misc_feature: MA Experiment ID: 108463 Result: Down-regulated in Transcription
  misc_feature: MA Experiment 108463 PARAMETER Experiment Name: At_Germinating_Seeds_cDNA_P Parameter: Age (day) Value: 3 vs. 0
  misc_feature: MA Experiment 108463 PARAMETER Experiment Name: At_Germinating_Seeds_cDNA_P Parameter: Tissue Value: Germinating Seeds
  misc_feature: MA Experiment ID: 108464 Result: Down-regulated in Transcription
  misc_feature: MA Experiment 108464 PARAMETER Experiment Name: At_Germinating_Seeds_cDNA_P Parameter: Age (day) Value: 4 vs. 0
  misc_feature: MA Experiment 108464 PARAMETER Experiment Name: At_Germinating_Seeds_cDNA_P Parameter: Tissue Value: Germinating Seeds
  misc_feature: MA Experiment ID: 20000117 Result: Down-regulated in Transcription
  misc_feature: MA Experiment 20000117 PARAMETER Experiment Name: At_100uM_ABA_Mutants_cDNA_P Parameter: Plant Line Value: Columbia
  misc_feature: MA Experiment 20000117 PARAMETER Experiment Name: At_100uM_ABA_Mutants_cDNA_P Parameter: Timepoint (hr) Value: 6
  misc_feature: MA Experiment 20000117 PARAMETER Experiment Name: At_100uM_ABA_Mutants_cDNA_P Parameter: Tissue Value: Aerial
  misc_feature: MA Experiment 20000117 PARAMETER Experiment Name: At_100uM_ABA_Mutants_cDNA_P Parameter: Treatment Value: 100uM ABA vs. No Treatment
  misc_feature: MA Experiment ID: 20000234 Result: Up-regulated in Transcription
  misc_feature: MA Experiment 20000234 PARAMETER Experiment Name: At_Siliques_P Parameter: Age (day) Value: 21
  misc_feature: MA Experiment 20000234 PARAMETER Experiment Name: At_Siliques_P Parameter: Organism Value: A. thaliana
  misc_feature: MA Experiment 20000234 PARAMETER Experiment Name: At_Siliques_P Parameter: Plant Line Value: WS
  misc_feature: MA Experiment 20000234 PARAMETER Experiment Name: At_Siliques_P Parameter: Tissue Value: Less Than 5mm Siliques vs. Whole Plant
  misc_feature: MA Experiment ID: 20000235 Result: Up-regulated in Transcription
  misc_feature: MA Experiment 20000235 PARAMETER Experiment Name: At_Siliques_P Parameter: Age (day) Value: 21
  misc_feature: MA Experiment 20000235 PARAMETER Experiment Name: At_Siliques_P Parameter: Organism Value: A. thaliana
  misc_feature: MA Experiment 20000235 PARAMETER Experiment Name: At_Siliques_P Parameter: Plant Line Value: WS
  misc_feature: MA Experiment 20000235 PARAMETER Experiment Name: At_Siliques_P Parameter: Tissue Value: 5-10mm Siliques vs. Whole Plant
  misc_feature: MA Experiment ID: 20000265 Result: Up-regulated in Transcription
  misc_feature: MA Experiment 20000265 PARAMETER Experiment Name: At_Open_Flower_P Parameter: Age (day) Value: 21
  misc_feature: MA Experiment 20000265 PARAMETER Experiment Name: At_Open_Flower_P Parameter: Plant Line Value: WS
  misc_feature: MA Experiment 20000265 PARAMETER Experiment Name: At_Open_Flower_P Parameter: Tissue Value: Closed Flower vs. Whole Plant
  misc_feature: MA Experiment ID: 20000437 Result: Down-regulated in Transcription
  misc_feature: MA Experiment 20000437 PARAMETER Experiment Name: At_Drought_P Parameter: Age (day) Value: 8
  misc_feature: MA Experiment 20000437 PARAMETER Experiment Name: At_Drought_P Parameter: Organism Value: A. thaliana
  misc_feature: MA Experiment 20000437 PARAMETER Experiment Name: At_Drought_P Parameter: Plant Line Value: WS
  misc_feature: MA Experiment 20000437 PARAMETER Experiment Name: At_Drought_P Parameter: Timepoint (hr) Value: 24
  misc_feature: MA Experiment 20000437 PARAMETER Experiment Name: At_Drought_P Parameter: Tissue Value: Whole Plant
  misc_feature: MA Experiment 20000437 PARAMETER Experiment Name: At_Drought_P Parameter: Treatment Value: Drought vs. No Drought
  misc_feature: MA Experiment ID: 20000794 Result: Down-regulated in Transcription
  misc_feature: MA Experiment 20000794 PARAMETER Experiment Name: At_Petals_P Parameter: Age (day) Value: 23-25 days
  misc_feature: MA Experiment 20000794 PARAMETER Experiment Name: At_Petals_P Parameter: Plant Line Value: WS
  misc_feature: MA Experiment 20000794 PARAMETER Experiment Name: At_Petals_P Parameter: Tissue Value: Petals vs. Whole plant
  misc_feature: MA Experiment ID: 20001558 Result: Up-regulated in Transcription
  misc_feature: MA Experiment 20001558 PARAMETER Experiment Name: At_Drought_Soil_Dry_P Parameter: Age (day) Value: 27
  misc_feature: MA Experiment 20001558 PARAMETER Experiment Name: At_Drought_Soil_Dry_P Parameter: Organism Value: A. thaliana
  misc_feature: MA Experiment 20001558 PARAMETER Experiment Name: At_Drought_Soil_Dry_P Parameter: Plant Line Value: WS
  misc_feature: MA Experiment 20001558 PARAMETER Experiment Name: At_Drought_Soil_Dry_P Parameter: Post Timepoint (hr) Value: 6
  misc_feature: MA Experiment 20001558 PARAMETER Experiment Name: At_Drought_Soil_Dry_P Parameter: Post-Treatment Value: Re-Water vs. No Drought
  misc_feature: MA Experiment 20001558 PARAMETER Experiment Name: At_Drought_Soil_Dry_P Parameter: Timepoint (day) Value: 13
  misc_feature: MA Experiment 20001558 PARAMETER Experiment Name: At_Drought_Soil_Dry_P Parameter: Treatment Value: Drought vs. No Drought
  misc_feature: MA Experiment ID: 20001757 Result: Up-regulated in Transcription
  misc_feature: MA Experiment 20001757 PARAMETER Experiment Name: At_50mM_NH4NO3_L-to-H_P Parameter: Timepoint (hr) Value: 6
  misc_feature: MA Experiment 20001757 PARAMETER Experiment Name: At_50mM_NH4NO3_L-to-H_P Parameter: Tissue Value: Leaf
  misc_feature: MA Experiment 20001757 PARAMETER Experiment Name: At_50mM_NH4NO3_L-to-H_P Parameter: Treatment Value: 50mM NH4NO3 vs 100mM Mannitol
  misc_feature: MA Experiment ID: 20001911 Result: Down-regulated in Transcription
  misc_feature: MA Experiment 20001911 PARAMETER Experiment Name: At_Drought_Reproduction_P Parameter: Age (day) Value: 40
  misc_feature: MA Experiment 20001911 PARAMETER Experiment Name: At_Drought_Reproduction_P Parameter: Organism Value: A. thaliana
  misc_feature: MA Experiment 20001911 PARAMETER Experiment Name: At_Drought_Reproduction_P Parameter: Plant Line Value: WS
  misc_feature: MA Experiment 20001911 PARAMETER Experiment Name: At_Drought_Reproduction_P Parameter: Timepoint (day) Value: 10
  misc_feature: MA Experiment 20001911 PARAMETER Experiment Name: At_Drought_Reproduction_P Parameter: Tissue Value: Flowers
  misc_feature: MA Experiment 20001911 PARAMETER Experiment Name: At_Drought_Reproduction_P Parameter: Treatment Value: Drought vs. No Drought
actgtagcttcagatgcaactcctcgaaaacccgtagaaccggcattgagccaatcgtttacattctctgattcatatccttagcgttttcagaaacaaaatggtgggttggaagaggaatttgcagactgttattcgtcaagttggtagaagagtgaagaacagtcacatttctacagcaaattactcttcttctactcggaatttagaatcccctttctcacaaggttacttgcagagtctcctgagaccatcctactcctccagaccactgtatcatcatctacaacaactggggatctctacctcgagacaattgcaggcgagtgaagagcctgtatcatcacctttgtcatctccagctctgttgggtagtggaaaagaagaagagcagaagattatcccaaagcgtcagaaagttcaggctgtcctcaagtctataaagcagagtcctaagaaggtcaacctggttgcagcactagtccgtggcatgcgtgttgaagatgctttgatccaattgcaggtcacagtcaaacgagctgcacaaactgtgtaccgggttatccacgctgcccgggcaaatgctactcataaccatggactagatcctgaccgtctccttgttgcggaagcatttgttgggaagggactgtttgggaagaaggtagcttaccatgcaaaaggaagaagcgggattatatcaataccccggtgtcgcctaacagtcatagttagagagacgactccagaggaagaagctgagattgcaaggctcaaagttcacaattttaagaagaaaagcaaacgggagagacagcttgtaccacacaagctcatcgagacaagtccaatatggaaccgcagaggtaccaaagccaatcatcggtcctcagagttggtacggtcgtctcactagtatctttgttcccgcaattgcaacaagagcttctctgttatggtaaattgcttttttttttggttttggtttgatattgtattggaactctataggacctgtttgcttcttgtattcaataaacatgttcccagagaggaaacttcact

SEQ ID NO: 30566 - protein, 271 aa, Arabidopsis thaliana
  peptide (1)..(271): Ceres Seq. ID no. 12370949
  misc_feature (109)..(213): Pfam Name: Ribosomal protein L22p/L17e Pfam Description: Ribosomal protein L22p/L17e
  misc_feature (102)..(223): Homolog of NCBI NO: 13470556 NR Description: 50S ribosomal protein L22 [Mesorhizobium loti]
  misc_feature (103)..(223): Homolog of NCBI NO: 15889237 NR Description: AGR_C_3548p [Agrobacterium tumefaciens]
  misc_feature (75)..(217): Homolog of NCBI NO: 23010684 NR Description: hypothetical protein [Magnetospirillum
  misc_feature (93)..(220): Homolog of NCBI NO: 15965114 NR Description: PROBABLE 50S RIBOSOMAL PROTEIN L22 [Sinorhizobium
  misc_feature (65)..(267): Homolog of NCBI NO: 25407603 NR Description: copper-binding protein-like [imported] -
  misc_feature (1)..(255): Homolog of NCBI NO: 34912678 NR Description: P0686E09.8 [Oryza sativa (japonica
  misc_feature (65)..(269): Homolog of NCBI NO: 25405544 NR Description: hypothetical protein F19K6.5 [imported] -
  misc_feature (45)..(267): Homolog of NCBI NO: 7485901 NR Description: hypothetical protein F20O9.30 - Arabidopsis
  misc_feature (1)..(269): Homolog of NCBI NO: 22330190 NR Description: chloroplast 50S ribosomal protein L22, putative
  misc_feature (1)..(271): Homolog of NCBI NO: 18417177 NR Description: Expressed protein
MVGWKRNLQTVIRQVGRRVKNSHISTANYSSSTRNLESPFSQGYLQSLLRPSYSSRPLYHHLQQLGISTSRQLQASEEPVSSPLSSPALLGSGKEEEQKIIPKRQKVQAVLKSIKQSPKKVNLVAALVRGMRVEDALIQLQVTVKRAAQTVYRVIHAARANATHNHGLDPDRLLVAEAFVGKGLFGKKVAYHAKGRSGIISIPRCRLTVIVRETTPEEEAEIARLKVHNFKKKSKRERQLVPHKLIETSPIWNRRGTKANHRSSELVRSSH

SEQ ID NO: 30567 - protein, 141 aa, Arabidopsis thaliana
  peptide (1)..(141): Ceres Seq. ID no. 12370950
  misc_feature (1)..(83): Pfam Name: Ribosomal protein L22p/L17e Pfam Description: Ribosomal protein L22p/L17e
  misc_feature (1)..(93): Homolog of NCBI NO: 13470556 NR Description: 50S ribosomal protein L22 [Mesorhizobium loti]
  misc_feature (1)..(93): Homolog of NCBI NO: 15889237 NR Description: AGR_C_3548p [Agrobacterium tumefaciens]
  misc_feature (1)..(87): Homolog of NCBI NO: 23010684 NR Description: hypothetical protein [Magnetospirillum
  misc_feature (1)..(90): Homolog of NCBI NO: 15965114 NR Description: PROBABLE 50S RIBOSOMAL PROTEIN L22 [Sinorhizobium
  misc_feature (1)..(137): Homolog of NCBI NO: 25407603 NR Description: copper-binding protein-like [imported] -
  misc_feature (1)..(125): Homolog of NCBI NO: 34912678 NR Description: P0686E09.8 [Oryza sativa (japonica
  misc_feature (1)..(139): Homolog of NCBI NO: 25405544 NR Description: hypothetical protein F19K6.5 [imported] -
  misc_feature (1)..(137): Homolog of NCBI NO: 7485901 NR Description: hypothetical protein F20O9.30 - Arabidopsis
  misc_feature (1)..(139): Homolog of NCBI NO: 22330190 NR Description: chloroplast 50S ribosomal protein L22, putative
  misc_feature (1)..(141): Homolog of NCBI NO: 18417177 NR Description: Expressed protein
MRVEDALIQLQVTVKRAAQTVYRVIHAARANATHNHGLDPDRLLVAEAFVGKGLFGKKVAYHAKGRSGIISIPRCRLTVIVRETTPEEEAEIARLKVHNFKKKSKRERQLVPHKLIETSPIWNRRGTKANHRSSELVRSSH

SEQ ID NO: 30568 - DNA, 1580 bp, Arabidopsis thaliana
  misc_feature (1)..(1580): Ceres Seq. ID no. 12334488
  misc_feature: MA Experiment ID: 108434 Result: Up-regulated in Transcription
  misc_feature: MA Experiment 108434 PARAMETER Experiment Name: At_Root_Tips_cDNA_P Parameter: Tissue Value: Root Tips
  misc_feature: MA Experiment ID: 108462 Result: Up-regulated in Transcription
  misc_feature: MA Experiment 108462 PARAMETER Experiment Name: At_Germinating_Seeds_cDNA_P Parameter: Age (day) Value: 2 vs. 0
  misc_feature: MA Experiment 108462 PARAMETER Experiment Name: At_Germinating_Seeds_cDNA_P Parameter: Tissue Value: Germinating Seeds
  misc_feature: MA Experiment ID: 108463 Result: Up-regulated in Transcription
  misc_feature: MA Experiment 108463 PARAMETER Experiment Name: At_Germinating_Seeds_cDNA_P Parameter: Age (day) Value: 3 vs. 0
  misc_feature: MA Experiment 108463 PARAMETER Experiment Name: At_Germinating_Seeds_cDNA_P Parameter: Tissue Value: Germinating Seeds
  misc_feature: MA Experiment ID: 20000264 Result: Up-regulated in Transcription
  misc_feature: MA Experiment 20000264 PARAMETER Experiment Name: At_Open_Flower_P Parameter: Age (day) Value: 21
  misc_feature: MA Experiment 20000264 PARAMETER Experiment Name: At_Open_Flower_P Parameter: Plant Line Value: WS
  misc_feature: MA Experiment 20000264 PARAMETER Experiment Name: At_Open_Flower_P Parameter: Tissue Value: Open Flower vs. Whole Plant
  misc_feature: MA Experiment ID: 20000265 Result: Up-regulated in Transcription
  misc_feature: MA Experiment 20000265 PARAMETER Experiment Name: At_Open_Flower_P Parameter: Age (day) Value: 21
  misc_feature: MA Experiment 20000265 PARAMETER Experiment Name: At_Open_Flower_P Parameter: Plant Line Value: WS
  misc_feature: MA Experiment 20000265 PARAMETER Experiment Name: At_Open_Flower_P Parameter: Tissue Value: Closed Flower vs. Whole Plant
  misc_feature: MA Experiment ID: 20000286 Result: Up-regulated in Transcription
  misc_feature: MA Experiment 20000286 PARAMETER Experiment Name: At_Open_Flower_P Parameter: Age (day) Value: 21
  misc_feature: MA Experiment 20000286 PARAMETER Experiment Name: At_Open_Flower_P Parameter: Plant Line Value: WS
  misc_feature: MA Experiment 20000286 PARAMETER Experiment Name: At_Open_Flower_P Parameter: Tissue Value: Half Open vs. Whole Plant
  misc_feature: MA Experiment ID: 20000496 Result: Up-regulated in Transcription
  misc_feature: MA Experiment 20000496 PARAMETER Experiment Name: At_Guard_Cells_P Parameter: Harvest Date Value: 7/19/2002
  misc_feature: MA Experiment 20000496 PARAMETER Experiment Name: At_Guard_Cells_P Parameter: Organism Value: Canola
  misc_feature: MA Experiment 20000496 PARAMETER Experiment Name: At_Guard_Cells_P Parameter: Tissue Value: Guard Cells vs. Leaves
  misc_feature: MA Experiment ID: 20000794 Result: Up-regulated in Transcription
  misc_feature: MA Experiment 20000794 PARAMETER Experiment Name: At_Petals_P Parameter: Age (day) Value: 23-25 days
  misc_feature: MA Experiment 20000794 PARAMETER Experiment Name: At_Petals_P Parameter: Plant Line Value: WS
  misc_feature: MA Experiment 20000794 PARAMETER Experiment Name: At_Petals_P Parameter: Tissue Value: Petals vs. Whole plant
  misc_feature: MA Experiment ID: 20001248 Result: Up-regulated in Transcription
  misc_feature: MA Experiment 20001248 PARAMETER Experiment Name: At_Far-red-induction_P Parameter: Age (day) Value: 7
  misc_feature: MA Experiment 20001248 PARAMETER Experiment Name: At_Far-red-induction_P Parameter: Light Value: Far-red vs. White
  misc_feature: MA Experiment 20001248 PARAMETER Experiment Name: At_Far-red-induction_P Parameter: Organism Value: A. thaliana
  misc_feature: MA Experiment 20001248 PARAMETER Experiment Name: At_Far-red-induction_P Parameter: Plant Line Value: Columbia
  misc_feature: MA Experiment 20001248 PARAMETER Experiment Name: At_Far-red-induction_P Parameter: Timepoint (hr) Value: 4
  misc_feature: MA Experiment 20001248 PARAMETER Experiment Name: At_Far-red-induction_P Parameter: Tissue Value: Whole Plant
aataggttcagtgtttctgacatattgttccctctctgaatgaaactctcccaaatagagaatggcctaaccacctatccaaccgcatcaaggcacttggtttcatccccttgatttctctctttttttcttttcctatcgcaggattttgtgttcttgttttgaatatgaaatgttcgtcgatgtgttgtttgatcctcttggccctttctctcctcaccgccttcactcttgcttcttcgtcaaatggtatagatggacctttctacgactctactgcctacacagagtgtagagccgaagcagagaagccactatacaatggaggaatgctgaaggaccaaaagccttccgtcccaggcaaagactctctcacaggcattggtgctcggttacacaccaacttacatattgcacaatctcacacagaacaccatctattgcttctccatatgggtgaagatagaggctggtgctgcatcagctcatgtaagagcaaggctgagagcagacaacgccacattaaactgcgtcggttctgtaactgccaaacatggttgctggtctttcctcaaaggaggattccttcttgattctccttgtaaacaatccatcctcttctttgagacatcagaggacgatggtaagatccaattacaagtgacgagtgcctctcttcagccattcacgcaggagcaatggaggaacaaccaagattacttcataaataccgcgagaaaacgagcagtgacaattcacgtgtcaaaagaaaacggagagagcgttgaaggagcagaggtgacagtagagcagatctctaaagacttctccattggttctgccatctccaaaactatccttggaaacattccttaccaagaatggttcgtcaagagattcgacgccacggtattcgagaacgagctgaaatggtacgcgacggagcccgatcaaggcaaactcaactacacattggctgataagatgatgaatttcgtcagagccaacagaatcatcgctcgcggtcacaacatattctgggaggatcccaaatacaatcccgattgggttcgtaatctaaccggcgaagatctccggtcggcggttaaccggcgaatcaagagtctgatgactcggtacagaggagagttcgtgcattgggacgtgagcaacgagatgcttcactttgacttctacgagactcgactggggaagaacgcgtcgtacggattcttcgccgcggctcgtgagattgactcattggcgactctgttcttcaatgatttcaacgtggtggagacttgcagcgacgagaagtcaacggttgacgaatacatcgcgagggtgagggaactccaacggtacgacggcgtaaggatggacggaataggtctcgagggtcacttcacgacgccaaacgtagcgctgatgagagccatcctcgataaactcgctacgctccagctcccaatctggctcaccgagattgatatcagcagcagcctcgaccaccgctctcaggcgatttatttggagcaagtgttacgtgaaggattctcgcacccatcggtaaacggtat

SEQ ID NO: 30569 - protein, 198 aa, Arabidopsis thaliana
  peptide (1)..(198): Ceres Seq. ID no. 12334489
  misc_feature (1)..(197): Pfam Name: Glycosyl hydrolase family 10 Pfam Description: Glycosyl hydrolase family 10
  misc_feature (1)..(197): Homolog of NCBI NO: 15235098 NR Description: glycosyl hydrolase family 10; protein id:
  misc_feature (1)..(197): Homolog of NCBI NO: 37533262 NR Description: putative 1,4-beta-xylanase
  misc_feature (1)..(197): Homolog of NCBI NO: 23429644 NR Description: endoxylanase [Carica papaya]
  misc_feature (1)..(197): Homolog of NCBI NO: 30689830 NR Description: glycosyl hydrolase family 10 [Arabidopsis
  misc_feature (1)..(197): Homolog of NCBI NO: 7485619 NR Description: hypothetical protein F17I5.30 - Arabidopsis
  misc_feature (1)..(197): Homolog of NCBI NO: 15235131 NR Description: glycosyl hydrolase family 10; protein id:
  misc_feature (1)..(197): Homolog of NCBI NO: 15235134 NR Description: glycosyl hydrolase family 10; protein id:
  misc_feature (1)..(179): Homolog of NCBI NO: 15233783 NR Description: glycosyl hydrolase family 10; protein id:
  misc_feature (1)..(197): Homolog of NCBI NO: 15233983 NR Description: glycosyl hydrolase family 10; protein id:
  misc_feature (1)..(197): Homolog of NCBI NO: 28416709 NR Description: At4g38650 [Arabidopsis thaliana]
MMNFVRANRIIARGHNIFWEDPKYNPDWVRNLTGEDLRSAVNRRIKSLMTRYRGEFVHWDVSNEMLHFDFYETRLGKNASYGFFAAAREIDSLATLFFNDFNVVETCSDEKSTVDEYIARVRELQRYDGVRMDGIGLEGHFTTPNVALMRAILDKLATLQLPIWLTEIDISSSLDHRSQAIYLEQVLREGFSHPSVNG

SEQ ID NO: 30570 - protein, 197 aa, Arabidopsis thaliana
  peptide (1)..(197): Ceres Seq. ID no. 12334490
  misc_feature (1)..(196): Pfam Name: Glycosyl hydrolase family 10 Pfam Description: Glycosyl hydrolase family 10
  misc_feature (1)..(196): Homolog of NCBI NO: 15235098 NR Description: glycosyl hydrolase family 10; protein id:
  misc_feature (1)..(196): Homolog of NCBI NO: 37533262 NR Description: putative 1,4-beta-xylanase
  misc_feature (1)..(196): Homolog of NCBI NO: 23429644 NR Description: endoxylanase [Carica papaya]
  misc_feature (1)..(196): Homolog of NCBI NO: 30689830 NR Description: glycosyl hydrolase family 10 [Arabidopsis
  misc_feature (1)..(196): Homolog of NCBI NO: 7485619 NR Description: hypothetical protein F17I5.30 - Arabidopsis
  misc_feature (1)..(196): Homolog of NCBI NO: 15235131 NR Description: glycosyl hydrolase family 10; protein id:
  misc_feature (1)..(196): Homolog of NCBI NO: 15235134 NR Description: glycosyl hydrolase family 10; protein id:
  misc_feature (1)..(178): Homolog of NCBI NO: 15233783 NR Description: glycosyl hydrolase family 10; protein id:
  misc_feature (1)..(196): Homolog of NCBI NO: 15233983 NR Description: glycosyl hydrolase family 10; protein id:
  misc_feature (1)..(196): Homolog of NCBI NO: 28416709 NR Description: At4g38650 [Arabidopsis thaliana]
MNFVRANRIIARGHNIFWEDPKYNPDWVRNLTGEDLRSAVNRRIKSLMTRYRGEFVHWDVSNEMLHFDFYETRLGKNASYGFFAAAREIDSLATLFFNDFNVVETCSDEKSTVDEYIARVRELQRYDGVRMDGIGLEGHFTTPNVALMRAILDKLATLQLPIWLTEIDISSSLDHRSQAIYLEQVLREGFSHPSVNG

SEQ ID NO: 30571 - protein, 150 aa, Arabidopsis thaliana
  peptide (1)..(150): Ceres Seq. ID no. 12334491
  misc_feature (1)..(149): Pfam Name: Glycosyl hydrolase family 10 Pfam Description: Glycosyl hydrolase family 10
  misc_feature (1)..(149): Homolog of NCBI NO: 15235098 NR Description: glycosyl hydrolase family 10; protein id:
  misc_feature (1)..(149): Homolog of NCBI NO: 37533262 NR Description: putative 1,4-beta-xylanase
  misc_feature (1)..(149): Homolog of NCBI NO: 23429644 NR Description: endoxylanase [Carica papaya]
  misc_feature (1)..(149): Homolog of NCBI NO: 30689830 NR Description: glycosyl hydrolase family 10 [Arabidopsis
  misc_feature (1)..(149): Homolog of NCBI NO: 7485619 NR Description: hypothetical protein F17I5.30 - Arabidopsis
  misc_feature (1)..(149): Homolog of NCBI NO: 15235131 NR Description: glycosyl hydrolase family 10; protein id:
  misc_feature (1)..(149): Homolog of NCBI NO: 15235134 NR Description: glycosyl hydrolase family 10; protein id:
  misc_feature (1)..(131): Homolog of NCBI NO: 15233783 NR Description: glycosyl hydrolase family 10; protein id:
  misc_feature (1)..(149): Homolog of NCBI NO: 15233983 NR Description: glycosyl hydrolase family 10; protein id:
  misc_feature (1)..(149): Homolog of NCBI NO: 28416709 NR Description: At4g38650 [Arabidopsis thaliana]
MTRYRGEFVHWDVSNEMLHFDFYETRLGKNASYGFFAAAREIDSLATLFFNDFNVVETCSDEKSTVDEYIARVRELQRYDGVRMDGIGLEGHFTTPNVALMRAILDKLATLQLPIWLTEIDISSSLDHRSQAIYLEQVLREGFSHPSVNG

SEQ ID NO: 30572 - DNA, 1205 bp, Arabidopsis thaliana
  misc_feature (1)..(1205): Ceres Seq. ID no. 12348519
  misc_feature: MA Experiment ID: 108461 Result: Up-regulated in Transcription
  misc_feature: MA Experiment 108461 PARAMETER Experiment Name: At_Germinating_Seeds_cDNA_P Parameter: Age (day) Value: 1 vs. 0
  misc_feature: MA Experiment 108461 PARAMETER Experiment Name: At_Germinating_Seeds_cDNA_P Parameter: Tissue Value: Germinating Seeds
  misc_feature: MA Experiment ID: 108462 Result: Up-regulated in Transcription
  misc_feature: MA Experiment 108462 PARAMETER Experiment Name: At_Germinating_Seeds_cDNA_P Parameter: Age (day) Value: 2 vs. 0
  misc_feature: MA Experiment 108462 PARAMETER Experiment Name: At_Germinating_Seeds_cDNA_P Parameter: Tissue Value: Germinating Seeds
  misc_feature: MA Experiment ID: 108463 Result: Up-regulated in Transcription
  misc_feature: MA Experiment 108463 PARAMETER Experiment Name: At_Germinating_Seeds_cDNA_P Parameter: Age (day) Value: 3 vs. 0
  misc_feature: MA Experiment 108463 PARAMETER Experiment Name: At_Germinating_Seeds_cDNA_P Parameter: Tissue Value: Germinating Seeds
  misc_feature: MA Experiment ID: 108464 Result: Up-regulated in Transcription
  misc_feature: MA Experiment 108464 PARAMETER Experiment Name: At_Germinating_Seeds_cDNA_P Parameter: Age (day) Value: 4 vs. 0
  misc_feature: MA Experiment 108464 PARAMETER Experiment Name: At_Germinating_Seeds_cDNA_P Parameter: Tissue Value: Germinating Seeds
  misc_feature: MA Experiment ID: 108473 Result: Down-regulated in Transcription
  misc_feature: MA Experiment 108473 PARAMETER Experiment Name: At_Drought_Flowers_cDNA_P Parameter: Timepoint (hr) Value: 7 d
  misc_feature: MA Experiment 108473 PARAMETER Experiment Name: At_Drought_Flowers_cDNA_P Parameter: Tissue Value: Flower
  misc_feature: MA Experiment 108473 PARAMETER Experiment Name: At_Drought_Flowers_cDNA_P Parameter: Treatment Value: Drought vs. No Drought
  misc_feature: MA Experiment ID: 108573 Result: Down-regulated in Transcription
  misc_feature: MA Experiment 108573 PARAMETER Experiment Name: At_Drought_cDNA_P Parameter: Timepoint (hr) Value: 6
  misc_feature: MA Experiment 108573 PARAMETER Experiment Name: At_Drought_cDNA_P Parameter: Tissue Value: Aerial
  misc_feature: MA Experiment 108573 PARAMETER Experiment Name: At_Drought_cDNA_P Parameter: Treatment Value: Drought vs. No Drought
  misc_feature: MA Experiment ID: 108579 Result: Down-regulated in Transcription
  misc_feature: MA Experiment 108579 PARAMETER Experiment Name: At_4deg_Cold_cDNA_P Parameter: Temperature (deg C) Value: 4 vs. 22
  misc_feature: MA Experiment 108579 PARAMETER Experiment Name: At_4deg_Cold_cDNA_P Parameter: Timepoint (hr) Value: 6
  misc_feature: MA Experiment 108579 PARAMETER Experiment Name: At_4deg_Cold_cDNA_P Parameter: Tissue Value: Aerial
  misc_feature: MA Experiment ID: 108585 Result: Down-regulated in Transcription
  misc_feature: MA Experiment 108585 PARAMETER Experiment Name: At_5mM_NaNP_cDNA_P Parameter: Timepoint (hr) Value: 6
  misc_feature: MA Experiment 108585 PARAMETER Experiment Name: At_5mM_NaNP_cDNA_P Parameter: Tissue Value: Aerial
  misc_feature: MA Experiment 108585 PARAMETER Experiment Name: At_5mM_NaNP_cDNA_P Parameter: Treatment Value: null
  misc_feature: MA Experiment ID: 108595 Result: Down-regulated in Transcription
  misc_feature: MA Experiment 108595 PARAMETER Experiment Name: At_Ler-pi_Ovule_cDNA_P Parameter: Plant Line Value: null
  misc_feature: MA Experiment ID: 20000166 Result: Up-regulated in Transcription
  misc_feature: MA Experiment 20000166 PARAMETER Experiment Name: At_100uM_ABA_P Parameter: Age (day) Value: 14
  misc_feature: MA Experiment 20000166 PARAMETER Experiment Name: At_100uM_ABA_P Parameter: Organism Value: A. thaliana
  misc_feature: MA Experiment 20000166 PARAMETER Experiment Name: At_100uM_ABA_P Parameter: Plant Line Value: WS
  misc_feature: MA Experiment 20000166 PARAMETER Experiment Name: At_100uM_ABA_P Parameter: Timepoint (hr) Value: 1
  misc_feature: MA Experiment 20000166 PARAMETER Experiment Name: At_100uM_ABA_P Parameter: Tissue Value: Aerial
  misc_feature: MA Experiment 20000166 PARAMETER Experiment Name: At_100uM_ABA_P Parameter: Treatment Value: 100uM ABA vs. No Treatment
  misc_feature: MA Experiment ID: 20000173 Result: Down-regulated in Transcription
  misc_feature: MA Experiment 20000173 PARAMETER Experiment Name: At_42deg_Heat_P Parameter: Age (day) Value: 14
  misc_feature: MA Experiment 20000173 PARAMETER Experiment Name: At_42deg_Heat_P Parameter: Organism Value: A. thaliana
  misc_feature: MA Experiment 20000173 PARAMETER Experiment Name: At_42deg_Heat_P Parameter: Plant Line Value: WS
  misc_feature: MA Experiment 20000173 PARAMETER Experiment Name: At_42deg_Heat_P Parameter: Temperature (deg C) Value: 42 vs. 22
  misc_feature: MA Experiment 20000173 PARAMETER Experiment Name: At_42deg_Heat_P Parameter: Timepoint (hr) Value: 6
  misc_feature: MA Experiment 20000173 PARAMETER Experiment Name: At_42deg_Heat_P Parameter: Tissue Value: Aerial
  misc_feature: MA Experiment ID: 20000180 Result: Up-regulated in Transcription
  misc_feature: MA Experiment 20000180 PARAMETER Experiment Name: At_Germinating_Seeds_P Parameter: Age (hr) Value: 24 vs. 0
  misc_feature: MA Experiment 20000180 PARAMETER Experiment Name: At_Germinating_Seeds_P Parameter: Tissue Value: Germinating Seeds
  misc_feature: MA Experiment ID: 20000185 Result: Down-regulated in Transcription
  misc_feature: MA Experiment 20000185 PARAMETER Experiment Name: At_Roots__P Parameter: Age (day) Value: 7 vs. 21
  misc_feature: MA Experiment 20000185 PARAMETER Experiment Name: At_Roots__P Parameter: Organism Value: A. thaliana
  misc_feature: MA Experiment 20000185 PARAMETER Experiment Name: At_Roots__P Parameter: Tissue Value: Roots vs. Whole Plant
  misc_feature: MA Experiment ID: 20000234 Result: Up-regulated in Transcription
  misc_feature: MA Experiment 20000234 PARAMETER Experiment Name: At_Siliques_P Parameter: Age (day) Value: 21
  misc_feature: MA Experiment 20000234 PARAMETER Experiment Name: At_Siliques_P Parameter: Organism Value: A. thaliana
  misc_feature: MA Experiment 20000234 PARAMETER Experiment Name: At_Siliques_P Parameter: Plant Line Value: WS
  misc_feature: MA Experiment 20000234 PARAMETER Experiment Name: At_Siliques_P Parameter: Tissue Value: Less Than 5mm Siliques vs. Whole Plant
  misc_feature: MA Experiment ID: 20000265 Result: Up-regulated in Transcription
  misc_feature: MA Experiment 20000265 PARAMETER Experiment Name: At_Open_Flower_P Parameter: Age (day) Value: 21
  misc_feature: MA Experiment 20000265 PARAMETER Experiment Name: At_Open_Flower_P Parameter: Plant Line Value: WS
  misc_feature: MA Experiment 20000265 PARAMETER Experiment Name: At_Open_Flower_P Parameter: Tissue Value: Closed Flower vs. Whole Plant
  misc_feature: MA Experiment ID: 20000437 Result: Down-regulated in Transcription
  misc_feature: MA Experiment 20000437 PARAMETER Experiment Name: At_Drought_P Parameter: Age (day) Value: 8
  misc_feature: MA Experiment 20000437 PARAMETER Experiment Name: At_Drought_P Parameter: Organism Value: A. thaliana
  misc_feature: MA Experiment 20000437 PARAMETER Experiment Name: At_Drought_P Parameter: Plant Line Value: WS
  misc_feature: MA Experiment 20000437 PARAMETER Experiment Name: At_Drought_P Parameter: Timepoint (hr) Value: 24
  misc_feature: MA Experiment 20000437 PARAMETER Experiment Name: At_Drought_P Parameter: Tissue Value: Whole Plant
  misc_feature: MA Experiment 20000437 PARAMETER Experiment Name: At_Drought_P Parameter: Treatment Value: Drought vs. No Drought
  misc_feature: MA Experiment ID: 20000439 Result: Down-regulated in Transcription
  misc_feature: MA Experiment 20000439 PARAMETER Experiment Name: At_Roots__P Parameter: Age (day) Value: 14 vs. 21
  misc_feature: MA Experiment 20000439 PARAMETER Experiment Name: At_Roots__P Parameter: Organism Value: A. thaliana
  misc_feature: MA Experiment 20000439 PARAMETER Experiment Name: At_Roots__P Parameter: Tissue Value: Roots vs. Whole Plant
  misc_feature: MA Experiment ID: 20000495 Result: Up-regulated in Transcription
  misc_feature: MA Experiment 20000495 PARAMETER Experiment Name: At_Guard_Cells_P Parameter: Harvest Date Value: 8/2/2002
  misc_feature: MA Experiment 20000495 PARAMETER Experiment Name: At_Guard_Cells_P Parameter: Organism Value: A. thaliana
  misc_feature: MA Experiment 20000495 PARAMETER Experiment Name: At_Guard_Cells_P Parameter: Tissue Value: Guard Cells vs. Leaves
  misc_feature: MA Experiment ID: 20001248 Result: Down-regulated in Transcription
  misc_feature: MA Experiment 20001248 PARAMETER Experiment Name: At_Far-red-induction_P Parameter: Age (day) Value: 7
  misc_feature: MA Experiment 20001248 PARAMETER Experiment Name: At_Far-red-induction_P Parameter: Light Value: Far-red vs. White
  misc_feature: MA Experiment 20001248 PARAMETER Experiment Name: At_Far-red-induction_P Parameter: Organism Value: A. thaliana
  misc_feature: MA Experiment 20001248 PARAMETER Experiment Name: At_Far-red-induction_P Parameter: Plant Line Value: Columbia
  misc_feature: MA Experiment 20001248 PARAMETER Experiment Name: At_Far-red-induction_P Parameter: Timepoint (hr) Value: 4
  misc_feature: MA Experiment 20001248 PARAMETER Experiment Name: At_Far-red-induction_P Parameter: Tissue Value: Whole Plant
  misc_feature: MA Experiment ID: 20001451 Result: Up-regulated in Transcription
  misc_feature: MA Experiment 20001451 PARAMETER Experiment Name: At_Far-red-induction_P Parameter: Age (day) Value: 7
  misc_feature: MA Experiment 20001451 PARAMETER Experiment Name: At_Far-red-induction_P Parameter: Light Value: Far-red vs. White
  misc_feature: MA Experiment 20001451 PARAMETER Experiment Name: At_Far-red-induction_P Parameter: Organism Value: A. thaliana
  misc_feature: MA Experiment 20001451 PARAMETER Experiment Name: At_Far-red-induction_P Parameter: Plant Line Value: Columbia
  misc_feature: MA Experiment 20001451 PARAMETER Experiment Name: At_Far-red-induction_P Parameter: Timepoint (hr) Value: 24
  misc_feature: MA Experiment 20001451 PARAMETER Experiment Name: At_Far-red-induction_P Parameter: Tissue Value: Whole Plant
  misc_feature: MA Experiment ID: 20001757 Result: Up-regulated in Transcription
  misc_feature: MA Experiment 20001757 PARAMETER Experiment Name: At_50mM_NH4NO3_L-to-H_P Parameter: Timepoint (hr) Value: 6
  misc_feature: MA Experiment 20001757 PARAMETER Experiment Name: At_50mM_NH4NO3_L-to-H_P Parameter: Tissue Value: Leaf
  misc_feature: MA Experiment 20001757 PARAMETER Experiment Name: At_50mM_NH4NO3_L-to-H_P Parameter: Treatment Value: 50mM NH4NO3 vs 100mM Mannitol
  misc_feature: MA Experiment ID: 20001904 Result: Down-regulated in Transcription
  misc_feature: MA Experiment 20001904 PARAMETER Experiment Name: At_Drought_Reproduction_P Parameter: Age (day) Value: 37
  misc_feature: MA Experiment 20001904 PARAMETER Experiment Name: At_Drought_Reproduction_P Parameter: Organism Value: A. thaliana
  misc_feature: MA Experiment 20001904 PARAMETER Experiment Name: At_Drought_Reproduction_P Parameter: Plant Line Value: WS
  misc_feature: MA Experiment 20001904 PARAMETER Experiment Name: At_Drought_Reproduction_P Parameter: Timepoint (day) Value: 7
  misc_feature: MA Experiment 20001904 PARAMETER Experiment Name: At_Drought_Reproduction_P Parameter: Tissue Value: Rosettes
  misc_feature: MA Experiment 20001904 PARAMETER Experiment Name: At_Drought_Reproduction_P Parameter: Treatment Value: Drought vs. No Drought
  misc_feature: MA Experiment ID: 20001905 Result: Down-regulated in Transcription
  misc_feature: MA Experiment 20001905 PARAMETER Experiment Name: At_Drought_Reproduction_P Parameter: Age (day) Value: 40
  misc_feature: MA Experiment 20001905 PARAMETER Experiment Name: At_Drought_Reproduction_P Parameter: Organism Value: A. thaliana
  misc_feature: MA Experiment 20001905 PARAMETER Experiment Name: At_Drought_Reproduction_P Parameter: Plant Line Value: WS
  misc_feature: MA Experiment 20001905 PARAMETER Experiment Name: At_Drought_Reproduction_P Parameter: Timepoint (day) Value: 10
  misc_feature: MA Experiment 20001905 PARAMETER Experiment Name: At_Drought_Reproduction_P Parameter: Tissue Value: Rosettes
  misc_feature: MA Experiment 20001905 PARAMETER Experiment Name: At_Drought_Reproduction_P Parameter: Treatment Value: Drought vs. No Drought
  misc_feature: MA Experiment ID: 20001906 Result: Down-regulated in Transcription
  misc_feature: MA Experiment 20001906 PARAMETER Experiment Name: At_Drought_Reproduction_P Parameter: Age (day) Value: 35
  misc_feature: MA Experiment 20001906 PARAMETER Experiment Name: At_Drought_Reproduction_P Parameter: Organism Value: A. thaliana
  misc_feature: MA Experiment 20001906 PARAMETER Experiment Name: At_Drought_Reproduction_P Parameter: Plant Line Value: WS
  misc_feature: MA Experiment 20001906 PARAMETER Experiment Name: At_Drought_Reproduction_P Parameter: Timepoint (day) Value: 5
  misc_feature: MA Experiment 20001906 PARAMETER Experiment Name: At_Drought_Reproduction_P Parameter: Tissue Value: Siliques
  misc_feature: MA Experiment 20001906 PARAMETER Experiment Name: At_Drought_Reproduction_P Parameter: Treatment Value: Drought vs. No Drought
  misc_feature: MA Experiment ID: 20001908 Result: Down-regulated in Transcription
  misc_feature: MA Experiment 20001908 PARAMETER Experiment Name: At_Drought_Reproduction_P Parameter: Age (day) Value: 40
  misc_feature: MA Experiment 20001908 PARAMETER Experiment Name: At_Drought_Reproduction_P Parameter: Organism Value: A. thaliana
  misc_feature: MA Experiment 20001908 PARAMETER Experiment Name: At_Drought_Reproduction_P Parameter: Plant Line Value: WS
  misc_feature: MA Experiment 20001908 PARAMETER Experiment Name: At_Drought_Reproduction_P Parameter: Timepoint (day) Value: 10
  misc_feature: MA Experiment 20001908 PARAMETER Experiment Name: At_Drought_Reproduction_P Parameter: Tissue Value: Siliques
  misc_feature: MA Experiment 20001908 PARAMETER Experiment Name: At_Drought_Reproduction_P Parameter: Treatment Value: Drought vs. No Drought
  misc_feature: MA Experiment ID: 20001911 Result: Down-regulated in Transcription
  misc_feature: MA Experiment 20001911 PARAMETER Experiment Name: At_Drought_Reproduction_P Parameter: Age (day) Value: 40
  misc_feature: MA Experiment 20001911 PARAMETER Experiment Name: At_Drought_Reproduction_P Parameter: Organism Value: A. thaliana
  misc_feature: MA Experiment 20001911 PARAMETER Experiment Name: At_Drought_Reproduction_P Parameter: Plant Line Value: WS
  misc_feature: MA Experiment 20001911 PARAMETER Experiment Name: At_Drought_Reproduction_P Parameter: Timepoint (day) Value: 10
  misc_feature: MA Experiment 20001911 PARAMETER Experiment Name: At_Drought_Reproduction_P Parameter: Tissue Value: Flowers
  misc_feature: MA Experiment 20001911 PARAMETER Experiment Name: At_Drought_Reproduction_P Parameter: Treatment Value: Drought vs. No Drought
cacttgtaacatttccacaactgtagccaaacttttgtgttctgatagtgatgatcatgatcatcacatgaataagtagaagatatctcttaccttctccttcttctaataagatcagagttttggttcttatttctttgctctcaaaacaatgggtagatcaccgtgttgtgacaaattgggtttgaagaaaggaccttggacaccagaggaggatcagaaacttttagcttatattgaagaacatggtcatggaagttggcgttcattgcctgagaaagctggtctccatcgatgcggaaagagttgtagactaagatggactaactacctaagacctgacatcaaaagaggcaaattcaacttacaagaagaacaaaccattatccaactccatgctctgttaggaaacagatggtcagcgattgctactcatttgccaaagagaacagacaacgagatcaagaactattggaacactcatttgaagaaacggttagtgaaaatggggattgatccagtgactcataaacccaaaaacgagactcctttatcttctcttggtctatccaagaacgcagctatacttagccacactgcaatgggaaagtgcaatgcttgaagctgaagcaagactagctagagaatcaaagcttcttcatttacaacattaccaaaccaaaacatcatctcaacctcatcatcatcatggattcactcacaagtcattgttacctaattggacaacaaaaccacacgaagtgtcattctctgagatgaaggaatcaatcccggcgaagatagagtttgtcggatcatcaactggtgtgactctgatgaaagaacctgaacacgattggatcaattcaacgatgcacgagtttgaaactacgcagatgggagaaggaatcgaagaagggttcacgggtctcttgctcggtggtgattcaatcgaccggagtttctccggcgataaaaacgagacggccggcgagagtagtggtggtgactgcaactactatgaggacaacaagaactacttggacagcatttttaactttgtagatccttcaccgtcggattcaccgatgttctgaatctaagggttgatatttgttgggaatgtttttgattcttttttagtttctagtttttgtgcttaaactctgattagacaatttttaaactaatccaatttttgcgcc

SEQ ID NO: 30573 - protein, 160 aa, Arabidopsis thaliana
  peptide (1)..(160): Ceres Seq. ID no. 12348520
  misc_feature (1)..(30): Homolog of NCBI NO: 15233066 NR Description: myb DNA-binding protein (MYB17); protein id:
  misc_feature (1)..(47): Homolog of NCBI NO: 4886264 NR Description: Myb-related transcription factor mixta-like 1
  misc_feature (1)..(14): Homolog of NCBI NO: 28628947 NR Description: MYB1 [Dendrobium sp. XMW-2002-1]
  misc_feature (1)..(159): Homolog of NCBI NO: 38344966 NR Description: OSJNBa0072F16.11 [Oryza sativa (japonica
  misc_feature (1)..(160): Homolog of NCBI NO: 20340243 NR Description: myb-related protein-like protein [Thellungiella
  misc_feature (68)..(160): Homolog of NCBI NO: 282964 NR Description: myb-related protein 1 - garden petunia
  misc_feature (1)..(65): Homolog of NCBI NO: 15232045 NR Description: myb family transcription factor
  misc_feature (61)..(160): Homolog of NCBI NO: 15232045 NR Description: myb family transcription factor
  misc_feature (1)..(160): Homolog of NCBI NO: 15242272 NR Description: myb family transcription factor
MLEAEARLARESKLLHLQHYQTKTSSQPHHHHGFTHKSLLPNWTTKPHEVSFSEMKESIPAKIEFVGSSTGVTLMKEPEHDWINSTMHEFETTQMGEGIEEGFTGLLLGGDSIDRSFSGDKNETAGESSGGDCNYYEDNKNYLDSIFNFVDPSPSDSPMF

SEQ ID NO: 30574 - protein, 156 aa, Arabidopsis thaliana
  peptide (1)..(156): Ceres Seq. ID no. 12348521
  misc_feature (14)..(61): Pfam Name: Myb-like DNA-binding domain Pfam Description: Myb-like DNA-binding domain
  misc_feature (1)..(150): Homolog of NCBI NO: 629737 NR Description: myb-related protein MIXTA - garden snapdragon
  misc_feature (1)..(156): Homolog of NCBI NO: 27125807 NR Description: MYB27 protein [Oryza sativa (japonica
  misc_feature (1)..(150): Homolog of NCBI NO: 13346188 NR Description: GHMYB25 [Gossypium hirsutum]
  misc_feature (1)..(150): Homolog of NCBI NO: 4886264 NR Description: Myb-related transcription factor mixta-like 1
  misc_feature (1)..(150): Homolog of NCBI NO: 28628947 NR Description: MYB1 [Dendrobium sp. XMW-2002-1]
  misc_feature (1)..(131): Homolog of NCBI NO: 38344966 NR Description: OSJNBa0072F16.11 [Oryza sativa (japonica
  misc_feature (119)..(150): Homolog of NCBI NO: 20340243 NR Description: myb-related protein-like protein [Thellungiella
  misc_feature (1)..(156): Homolog of NCBI NO: 282964 NR Description: myb-related protein 1 - garden petunia
  misc_feature (1)..(150): Homolog of NCBI NO: 15232045 NR Description: myb family transcription factor
  misc_feature (1)..(150): Homolog of NCBI NO: 15242272 NR Description: myb family transcription factor
MGRSPCCDKLGLKKGPWTPEEDQKLLAYIEEHGHGSWRSLPEKAGLHRCGKSCRLRWTNYLRPDIKRGKFNLQEEQTIIQLHALLGNRWSAIATHLPKRTDNEIKNYWNTHLKKRLVKMGIDPVTHKPKNETPLSSLGLSKNAAILSHTAMGKCNA

SEQ ID NO: 30575 - protein, 106 aa, Arabidopsis thaliana
  peptide (1)..(106): Ceres Seq. ID no. 12348522
  misc_feature (1)..(105): Homolog of NCBI NO: 38344966 NR Description: OSJNBa0072F16.11 [Oryza sativa (japonica
  misc_feature (1)..(106): Homolog of NCBI NO: 20340243 NR Description: myb-related protein-like protein [Thellungiella
  misc_feature (14)..(106): Homolog of NCBI NO: 282964 NR Description: myb-related protein 1 - garden petunia
  misc_feature (1)..(11): Homolog of NCBI NO: 15232045 NR Description: myb family transcription factor
  misc_feature (7)..(106): Homolog of NCBI NO: 15232045 NR Description: myb family transcription factor
  misc_feature (1)..(106): Homolog of NCBI NO: 15242272 NR Description: myb family transcription factor
MKESIPAKIEFVGSSTGVTLMKEPEHDWINSTMHEFETTQMGEGIEEGFTGLLLGGDSIDRSFSGDKNETAGESSGGDCNYYEDNKNYLDSIFNFVDPSPSDSPMF

SEQ ID NO: 30576 - DNA, 1812 bp, Arabidopsis thaliana
  misc_feature (1)..(1812): Ceres Seq. ID no. 12327219
  misc_feature: MA Experiment ID: 108576 Result: Up-regulated in Transcription
  misc_feature: MA Experiment 108576 PARAMETER Experiment Name: At_42deg_Heat_cDNA_P Parameter: Temperature (deg C) Value: 42 vs. 22
  misc_feature: MA Experiment 108576 PARAMETER Experiment Name: At_42deg_Heat_cDNA_P Parameter: Timepoint (hr) Value: 1
  misc_feature: MA Experiment 108576 PARAMETER Experiment Name: At_42deg_Heat_cDNA_P Parameter: Tissue Value: Aerial
atccgaagctaaaagaaaacactagaggaggtgaagatttttaaaaatgtcattcttatcattttctcctatttctctggacttattatctagtaatgtcttcttaaccattctagcgattatcatatccggtttacttaaaaccattacgtaccggaaacacaattcgaaccatttaaatctcccgcccggcccaccaggatggccggtgatcggaaacttatttcagttcacgcgctccgggaaacagtttttcgagtacgtcgaggatctcgtaaagatctacggtccgattcttactctcaggcttggtactcgaacaatgatcatcatctccgacgccagtctcgcccacgaagcgttaatcgaacgtggagcacaattcgcgacccgacccgttgaaactccgacccggaaaatcttcagctccagtgaaatcacagttcattccgctatgtatggacctgtgtggaggtcattgagacggaacatggttcagaacatgcttagctcgaatcggctcaaggagtttggttctgttagaaaatccgccatggataaactcatcgagagaatcaaatctgaagctagagacaacgatggactcgtctgggttctgcaaaacagcagatacgctgcgttttgtgttttattagatatctgttttggagttgagatggaagaggaatcaattgagaagatggatcagttgatgacggcgatattaaacgccgttgatccaaaactccacgattaccttccgatcttaacgccgtttaactacaatgagagaaatcgtgctcttaagcttcgtcgggaacttgtagatttcgtcgtcggattcatcgagaaacgacggaaggcgattcggaccgcaacggtatcgtctttctcgtatcttgatacactctttgatcttagaatcatcgaaggaagtgaaacgacgccgtctgatgaagatcttgtaacgctctgttcggagtttctcaatgccggtacggacacgactggggcggcgatcgagtgtgaatcgcagagttgatagcgaatcccgagattcaatctcgactgtacgatgagattaaatcaacggttggagatcgtgcggtcgatgaaagagacgtggacaaaatggtcttgttacaagctgtagtcaaagagattctccggcgacatccaccgacttactttacattaagtcacggtgtaacggaaccaacgactctctctggctataacatccctgtcggggtcaacattgagttttatcttcccggaattagtgaagacccgaagatctggtcagagccaaaaaagttcgaccctgaccggttcttatcagggcgggaagacgccgatataacaggagttgctggagtgaagatgatgccttttggtgttggccgtaggatctgtccggggatgggaatggcgacggtacatgtgcatttgatgatagcgaggatggttcaagagttcgagtggttagcctatccaccgcagagcgagatggattttgccgggaagttggtgtttgcggttgtgatgaagaagccgttgagggccatggtgagacctagggtacaatgaaagccgcaggtttgtagcatatccaacttttaaaaatgaataaatgctgtatggaatacatgcataaactgataaacactctcatgtaaaaatgaatacaagaagcatattggtactcaagtcatgttttccattaagaatcttttagaattctgttatctttgagggtaaaaacttaactatgtttgtaataaaagcttagaatgagaatttggtaaaact

SEQ ID NO: 30577 - protein, 331 aa, Arabidopsis thaliana
  peptide (1)..(331): Ceres Seq. ID no. 12327220
  misc_feature (47)..(326): Pfam Name: Cytochrome P450 Pfam Description: Cytochrome P450
  misc_feature (1)..(326): Homolog of NCBI NO: 28393336 NR Description: putative cytochrome p450 [Arabidopsis thaliana]
  misc_feature (1)..(326): Homolog of NCBI NO: 15228331 NR Description: cytochrome p450, putative; protein id:
  misc_feature (4)..(326): Homolog of NCBI NO: 21595357 NR Description: cytochrom P450-like protein [Arabidopsis thaliana]
  misc_feature (4)..(326): Homolog of NCBI NO: 15238249 NR Description: cytochrome p450, putative
  misc_feature (19)..(326): Homolog of NCBI NO: 15238242 NR Description: cytochrome p450 monooxygenase, putative; protein
  misc_feature (1)..(326): Homolog of NCBI NO: 15228330 NR Description: cytochrome P450 monooxygenase, putative; protein
MSFLSFSPISLDLLSSNVFLTILAIIISGLLKTITYRKHNSNHLNLPPGPPGWPVIGNLFQFTRSGKQFFEYVEDLVKIYGPILTLRLGTRTMIIISDASLAHEALIERGAQFATRPVETPTRKIFSSSEITVHSAMYGPVWRSLRRNMVQNMLSSNRLKEFGSVRKSAMDKLIERIKSEARDNDGLVWVLQNSRYAAFCVLLDICFGVEMEEESIEKMDQLMTAILNAVDPKLHDYLPILTPFNYNERNRALKLRRELVDFVVGFIEKRRKAIRTATVSSFSYLDTLFDLRIIEGSETTPSDEDLVTLCSEFLNAGTDTTGAAIECESQS

SEQ ID NO: 30578 - protein, 239 aa, Arabidopsis thaliana
  peptide (1)..(239): Ceres Seq. ID no. 12327221
  misc_feature (1)..(234): Pfam Name: Cytochrome P450 Pfam Description: Cytochrome P450
  misc_feature (1)..(234): Homolog of NCBI NO: 28393336 NR Description: putative cytochrome p450 [Arabidopsis thaliana]
  misc_feature (1)..(234): Homolog of NCBI NO: 15228331 NR Description: cytochrome p450, putative; protein id:
  misc_feature (1)..(234): Homolog of NCBI NO: 21595357 NR Description: cytochrom P450-like protein [Arabidopsis thaliana]
  misc_feature (1)..(234): Homolog of NCBI NO: 15238249 NR Description: cytochrome p450, putative
  misc_feature (1)..(234): Homolog of NCBI NO: 15238242 NR Description: cytochrome p450 monooxygenase, putative; protein
  misc_feature (1)..(234): Homolog of NCBI NO: 15228330 NR Description: cytochrome P450 monooxygenase, putative; protein
MIIISDASLAHEALIERGAQFATRPVETPTRKIFSSSEITVHSAMYGPVWRSLRRNMVQNMLSSNRLKEFGSVRKSAMDKLIERIKSEARDNDGLVWVLQNSRYAAFCVLLDICFGVEMEEESIEKMDQLMTAILNAVDPKLHDYLPILTPFNYNERNRALKLRRELVDFVVGFIEKRRKAIRTATVSSFSYLDTLFDLRIIEGSETTPSDEDLVTLCSEFLNAGTDTTGAAIECESQS

SEQ ID NO: 30579 - protein, 195 aa, Arabidopsis thaliana
  peptide (1)..(195): Ceres Seq. ID no. 12327222
  misc_feature (1)..(190): Pfam Name: Cytochrome P450 Pfam Description: Cytochrome P450
  misc_feature (1)..(190): Homolog of NCBI NO: 28393336 NR Description: putative cytochrome p450 [Arabidopsis thaliana]
  misc_feature (1)..(190): Homolog of NCBI NO: 15228331 NR Description: cytochrome p450, putative; protein id:
  misc_feature (1)..(190): Homolog of NCBI NO: 21595357 NR Description: cytochrom P450-like protein [Arabidopsis thaliana]
  misc_feature (1)..(190): Homolog of NCBI NO: 15238249 NR Description: cytochrome p450, putative
  misc_feature (1)..(190): Homolog of NCBI NO: 15238242 NR Description: cytochrome p450 monooxygenase, putative; protein
  misc_feature (1)..(190): Homolog of NCBI NO: 15228330 NR Description: cytochrome P450 monooxygenase, putative; protein
MYGPVWRSLRRNMVQNMLSSNRLKEFGSVRKSAMDKLIERIKSEARDNDGLVWVLQNSRYAAFCVLLDICFGVEMEEESIEKMDQLMTAILNAVDPKLHDYLPILTPFNYNERNRALKLRRELVDFVVGFIEKRRKAIRTATVSSFSYLDTLFDLRIIEGSETTPSDEDLVTLCSEFLNAGTDTTGAAIECESQS

SEQ ID NO: 30580 - DNA, 1370 bp, Arabidopsis thaliana
  misc_feature (1)..(1370): Ceres Seq. ID no. 13574978
  misc_feature: MA Experiment ID: 20000171 Result: Down-regulated in Transcription
  misc_feature: MA Experiment 20000171 PARAMETER Experiment Name: At_42deg_Heat_P Parameter: Age (day) Value: 14
  misc_feature: MA Experiment 20000171 PARAMETER Experiment Name: At_42deg_Heat_P Parameter: Organism Value: A. thaliana
  misc_feature: MA Experiment 20000171 PARAMETER Experiment Name: At_42deg_Heat_P Parameter: Plant Line Value: WS
  misc_feature: MA Experiment 20000171 PARAMETER Experiment Name: At_42deg_Heat_P Parameter: Temperature (deg C) Value: 42 vs. 22
  misc_feature: MA Experiment 20000171 PARAMETER Experiment Name: At_42deg_Heat_P Parameter: Timepoint (hr) Value: 1
  misc_feature: MA Experiment 20000171 PARAMETER Experiment Name: At_42deg_Heat_P Parameter: Tissue Value: Aerial
  misc_feature: MA Experiment ID: 20000173 Result: Down-regulated in Transcription
  misc_feature: MA Experiment 20000173 PARAMETER Experiment Name: At_42deg_Heat_P Parameter: Age (day) Value: 14
  misc_feature: MA Experiment 20000173 PARAMETER Experiment Name: At_42deg_Heat_P Parameter: Organism Value: A. thaliana
  misc_feature: MA Experiment 20000173 PARAMETER Experiment Name: At_42deg_Heat_P Parameter: Plant Line Value: WS
  misc_feature: MA Experiment 20000173 PARAMETER Experiment Name: At_42deg_Heat_P Parameter: Temperature (deg C) Value: 42 vs. 22
  misc_feature: MA Experiment 20000173 PARAMETER Experiment Name: At_42deg_Heat_P Parameter: Timepoint (hr) Value: 6
  misc_feature: MA Experiment 20000173 PARAMETER Experiment Name: At_42deg_Heat_P Parameter: Tissue Value: Aerial
  misc_feature: MA Experiment ID: 20000179 Result: Up-regulated in Transcription
  misc_feature: MA Experiment 20000179 PARAMETER Experiment Name: At_Germinating_Seeds_P Parameter: Age (hr) Value: 6 vs. 0
  misc_feature: MA Experiment 20000179 PARAMETER Experiment Name: At_Germinating_Seeds_P Parameter: Tissue Value: Germinating Seeds
  misc_feature: MA Experiment ID: 20000182 Result: Down-regulated in Transcription
  misc_feature: MA Experiment 20000182 PARAMETER Experiment Name: At_2mM_SA_P Parameter: Age (day) Value: 14
  misc_feature: MA Experiment 20000182 PARAMETER Experiment Name: At_2mM_SA_P Parameter: Organism Value: A. thaliana
  misc_feature: MA Experiment 20000182 PARAMETER Experiment Name: At_2mM_SA_P Parameter: Plant Line Value: WS
  misc_feature: MA Experiment 20000182 PARAMETER Experiment Name: At_2mM_SA_P Parameter: Timepoint (hr) Value: 6
  misc_feature: MA Experiment 20000182 PARAMETER Experiment Name: At_2mM_SA_P Parameter: Tissue Value: Aerial
  misc_feature: MA Experiment 20000182 PARAMETER Experiment Name: At_2mM_SA_P Parameter: Treatment Value: 2mM SA vs. No Treatment
  misc_feature: MA Experiment ID: 20000184 Result: Up-regulated in Transcription
  misc_feature: MA Experiment 20000184 PARAMETER Experiment Name: At_Shoots__P Parameter: Age (day) Value: 7
  misc_feature: MA Experiment 20000184 PARAMETER Experiment Name: At_Shoots__P Parameter: Tissue Value: Shoots vs. Whole Plant
  misc_feature: MA Experiment ID: 20000185 Result: Down-regulated in Transcription
  misc_feature: MA Experiment 20000185 PARAMETER Experiment Name: At_Roots__P Parameter: Age (day) Value: 7 vs. 21
  misc_feature: MA Experiment 20000185 PARAMETER Experiment Name: At_Roots__P Parameter: Organism Value: A. thaliana
  misc_feature: MA Experiment 20000185 PARAMETER Experiment Name: At_Roots__P Parameter: Tissue Value: Roots vs. Whole Plant
  misc_feature: MA Experiment ID: 20000234 Result: Up-regulated in Transcription
  misc_feature: MA Experiment 20000234 PARAMETER Experiment Name: At_Siliques_P Parameter: Age (day) Value: 21
  misc_feature: MA Experiment 20000234 PARAMETER Experiment Name: At_Siliques_P Parameter: Organism Value: A. thaliana
  misc_feature: MA Experiment 20000234 PARAMETER Experiment Name: At_Siliques_P Parameter: Plant Line Value: WS
  misc_feature: MA Experiment 20000234 PARAMETER Experiment Name: At_Siliques_P Parameter: Tissue Value: Less Than 5mm Siliques vs. Whole Plant
  misc_feature: MA Experiment ID: 20000264 Result: Up-regulated in Transcription
  misc_feature: MA Experiment 20000264 PARAMETER Experiment Name: At_Open_Flower_P Parameter: Age (day) Value: 21
  misc_feature: MA Experiment 20000264 PARAMETER Experiment Name: At_Open_Flower_P Parameter: Plant Line Value: WS
  misc_feature: MA Experiment 20000264 PARAMETER Experiment Name: At_Open_Flower_P Parameter: Tissue Value: Open Flower vs. Whole Plant
  misc_feature: MA Experiment ID: 20000265 Result: Up-regulated in Transcription
  misc_feature: MA Experiment 20000265 PARAMETER Experiment Name: At_Open_Flower_P Parameter: Age (day) Value: 21
  misc_feature: MA Experiment 20000265 PARAMETER Experiment Name: At_Open_Flower_P Parameter: Plant Line Value: WS
  misc_feature: MA Experiment 20000265 PARAMETER Experiment Name: At_Open_Flower_P Parameter: Tissue Value: Closed Flower vs. Whole Plant
  misc_feature: MA Experiment ID: 20000286 Result: Up-regulated in Transcription
  misc_feature: MA Experiment 20000286 PARAMETER Experiment Name: At_Open_Flower_P Parameter: Age (day) Value: 21
  misc_feature: MA Experiment 20000286 PARAMETER Experiment Name: At_Open_Flower_P Parameter: Plant Line Value: WS
  misc_feature: MA Experiment 20000286 PARAMETER Experiment Name: At_Open_Flower_P Parameter: Tissue Value: Half Open vs. Whole Plant
  misc_feature: MA Experiment ID: 20000436 Result: Down-regulated in Transcription
  misc_feature: MA Experiment 20000436 PARAMETER Experiment Name: At_Drought_P Parameter: Age (day) Value: 7
  misc_feature: MA Experiment 20000436 PARAMETER Experiment Name: At_Drought_P Parameter: Organism Value: A. thaliana
  misc_feature: MA Experiment 20000436 PARAMETER Experiment Name: At_Drought_P Parameter: Plant Line Value: WS
  misc_feature: MA Experiment 20000436 PARAMETER Experiment Name: At_Drought_P Parameter: Timepoint (hr) Value: 12
  misc_feature: MA Experiment 20000436 PARAMETER Experiment Name: At_Drought_P Parameter: Tissue Value: Whole Plant
  misc_feature: MA Experiment 20000436 PARAMETER Experiment Name: At_Drought_P Parameter: Treatment Value: Drought vs. No Drought
  misc_feature: MA Experiment ID: 20000437 Result: Down-regulated in Transcription
  misc_feature: MA Experiment 20000437 PARAMETER Experiment Name: At_Drought_P Parameter: Age (day) Value: 8
  misc_feature: MA Experiment 20000437 PARAMETER Experiment Name: At_Drought_P Parameter: Organism Value: A. thaliana
  misc_feature: MA Experiment 20000437 PARAMETER Experiment Name: At_Drought_P Parameter: Plant Line Value: WS
  misc_feature: MA Experiment 20000437 PARAMETER Experiment Name: At_Drought_P Parameter: Timepoint (hr) Value: 24
  misc_feature: MA Experiment 20000437 PARAMETER Experiment Name: At_Drought_P Parameter: Tissue Value: Whole Plant
  misc_feature: MA Experiment 20000437 PARAMETER Experiment Name: At_Drought_P Parameter: Treatment Value: Drought vs. No Drought
  misc_feature: MA Experiment ID: 20000438 Result: Up-regulated in Transcription
  misc_feature: MA Experiment 20000438 PARAMETER Experiment Name: At_Shoots__P Parameter: Age (day) Value: 14
  misc_feature: MA Experiment 20000438 PARAMETER Experiment Name: At_Shoots__P Parameter: Tissue Value: Shoots vs. Whole Plant
  misc_feature: MA Experiment ID: 20000439 Result: Down-regulated in Transcription
  misc_feature: MA Experiment 20000439 PARAMETER Experiment Name: At_Roots__P Parameter: Age (day) Value: 14 vs. 21
  misc_feature: MA Experiment 20000439 PARAMETER Experiment Name: At_Roots__P Parameter: Organism Value: A. thaliana
  misc_feature: MA Experiment 20000439 PARAMETER Experiment Name: At_Roots__P Parameter: Tissue Value: Roots vs. Whole Plant
  misc_feature: MA Experiment ID: 20000445 Result: Down-regulated in Transcription
  misc_feature: MA Experiment 20000445 PARAMETER Experiment Name: At_100uM_NAA__P Parameter: Age (day) Value: 14
  misc_feature: MA Experiment 20000445 PARAMETER Experiment Name: At_100uM_NAA__P Parameter: Organism Value: A. thaliana
  misc_feature: MA Experiment 20000445 PARAMETER Experiment Name: At_100uM_NAA__P Parameter: Plant Line Value: WS
  misc_feature: MA Experiment 20000445 PARAMETER Experiment Name: At_100uM_NAA__P Parameter: Timepoint (hr) Value: 6
  misc_feature: MA Experiment 20000445 PARAMETER Experiment Name: At_100uM_NAA__P Parameter: Tissue Value: Aerial
  misc_feature: MA Experiment 20000445 PARAMETER Experiment Name: At_100uM_NAA__P Parameter: Treatment Value: 100uM NAA vs. No Treatment
  misc_feature: MA Experiment ID: 20000451 Result: Up-regulated in Transcription
  misc_feature: MA Experiment 20000451 PARAMETER Experiment Name: At_CS6879_Shoots-Roots_P Parameter: Age (day) Value: 14
  misc_feature: MA Experiment 20000451 PARAMETER Experiment Name: At_CS6879_Shoots-Roots_P Parameter: Organism Value: A. thaliana
  misc_feature: MA Experiment 20000451 PARAMETER Experiment Name: At_CS6879_Shoots-Roots_P Parameter: Plant Line Value: CS6879 vs. WS
  misc_feature: MA Experiment 20000451 PARAMETER Experiment Name: At_CS6879_Shoots-Roots_P Parameter: Tissue Value: Roots
  misc_feature: MA Experiment ID: 20000453 Result: Down-regulated in Transcription
  misc_feature: MA Experiment 20000453 PARAMETER Experiment Name: At_100uM_ABA_P Parameter: Age (day) Value: 15
  misc_feature: MA Experiment 20000453 PARAMETER Experiment Name: At_100uM_ABA_P Parameter: Organism Value: A. thaliana
  misc_feature: MA Experiment 20000453 PARAMETER Experiment Name: At_100uM_ABA_P Parameter: Plant Line Value: WS
  misc_feature: MA Experiment 20000453 PARAMETER Experiment Name: At_100uM_ABA_P Parameter: Timepoint (hr) Value: 24
  misc_feature: MA Experiment 20000453 PARAMETER Experiment Name: At_100uM_ABA_P Parameter: Tissue Value: Aerial
  misc_feature: MA Experiment 20000453 PARAMETER Experiment Name: At_100uM_ABA_P Parameter: Treatment Value: 100uM ABA vs. No Treatment
  misc_feature: MA Experiment ID: 20000573 Result: Down-regulated in Transcription
  misc_feature: MA Experiment 20000573 PARAMETER Experiment Name: At_100uM_ABA_Mutants__P Parameter: Organism Value: A. thaliana
  misc_feature: MA Experiment 20000573 PARAMETER Experiment Name: At_100uM_ABA_Mutants__P Parameter: Plant Line Value: CS22 vs. Ler wt
  misc_feature: MA Experiment 20000573 PARAMETER Experiment Name: At_100uM_ABA_Mutants__P Parameter: Timepoint (hr) Value: N/A
  misc_feature: MA Experiment 20000573 PARAMETER Experiment Name: At_100uM_ABA_Mutants__P Parameter: Tissue Value: Whole Plant
  misc_feature: MA Experiment 20000573 PARAMETER Experiment Name: At_100uM_ABA_Mutants__P Parameter: Treatment Value: None
  misc_feature: MA Experiment ID: 20000574 Result: Down-regulated in Transcription
  misc_feature: MA Experiment 20000574 PARAMETER Experiment Name: At_100uM_ABA_Mutants__P Parameter: Organism Value: A. thaliana
  misc_feature: MA Experiment 20000574 PARAMETER Experiment Name: At_100uM_ABA_Mutants__P Parameter: Plant Line Value: CS23 vs. Ler wt
  misc_feature: MA Experiment 20000574 PARAMETER Experiment Name: At_100uM_ABA_Mutants__P Parameter: Timepoint (hr) Value: N/A
  misc_feature: MA Experiment 20000574 PARAMETER Experiment Name: At_100uM_ABA_Mutants__P Parameter: Tissue Value: Whole Plant
  misc_feature: MA Experiment 20000574 PARAMETER Experiment Name: At_100uM_ABA_Mutants__P Parameter: Treatment Value: None
  misc_feature: MA Experiment ID: 20000794 Result: Down-regulated in Transcription
  misc_feature: MA Experiment 20000794 PARAMETER Experiment Name: At_Petals_P Parameter: Age (day) Value: 23-25 days
  misc_feature: MA Experiment 20000794 PARAMETER Experiment Name: At_Petals_P Parameter: Plant Line Value: WS
  misc_feature: MA Experiment 20000794 PARAMETER Experiment Name: At_Petals_P Parameter: Tissue Value: Petals vs. Whole plant
  misc_feature: MA Experiment ID: 20001248 Result: Down-regulated in Transcription
  misc_feature: MA Experiment 20001248 PARAMETER Experiment Name: At_Far-red-induction_P Parameter: Age (day) Value: 7
  misc_feature: MA Experiment 20001248 PARAMETER Experiment Name: At_Far-red-induction_P Parameter: Light Value: Far-red vs. White
  misc_feature: MA Experiment 20001248 PARAMETER Experiment Name: At_Far-red-induction_P Parameter: Organism Value: A. thaliana
  misc_feature: MA Experiment 20001248 PARAMETER Experiment Name: At_Far-red-induction_P Parameter: Plant Line Value: Columbia
  misc_feature: MA Experiment 20001248 PARAMETER Experiment Name: At_Far-red-induction_P Parameter: Timepoint (hr) Value: 4
  misc_feature: MA Experiment 20001248 PARAMETER Experiment Name: At_Far-red-induction_P Parameter: Tissue Value: Whole Plant
  misc_feature: MA Experiment ID: 20001457 Result: Up-regulated in Transcription
  misc_feature: MA Experiment 20001457 PARAMETER Experiment Name: At_50mM_NH4NO3_L-to-H_P Parameter: Age (day) Value: Undefined
  misc_feature: MA Experiment 20001457 PARAMETER Experiment Name: At_50mM_NH4NO3_L-to-H_P Parameter: Organism Value: Undefined
  misc_feature: MA Experiment 20001457 PARAMETER Experiment Name: At_50mM_NH4NO3_L-to-H_P Parameter: Plant Line Value: Undefined
  misc_feature: MA Experiment 20001457 PARAMETER Experiment Name: At_50mM_NH4NO3_L-to-H_P Parameter: Timepoint (hr) Value: 0.5
  misc_feature: MA Experiment 20001457 PARAMETER Experiment Name: At_50mM_NH4NO3_L-to-H_P Parameter: Tissue Value: Siliques
  misc_feature: MA Experiment 20001457 PARAMETER Experiment Name: At_50mM_NH4NO3_L-to-H_P Parameter: Treatment Value: 50mM NH4NO3 vs. 100mM Manitol
  misc_feature: MA Experiment ID: 20001555 Result: Down-regulated in Transcription
  misc_feature: MA Experiment 20001555 PARAMETER Experiment Name: At_Drought_Soil_Dry_P Parameter: Age (day) Value: 24
  misc_feature: MA Experiment 20001555 PARAMETER Experiment Name: At_Drought_Soil_Dry_P Parameter: Organism Value: A. thaliana
  misc_feature: MA Experiment 20001555 PARAMETER Experiment Name: At_Drought_Soil_Dry_P Parameter: Plant Line Value: WS
  misc_feature: MA Experiment 20001555 PARAMETER Experiment Name: At_Drought_Soil_Dry_P Parameter: Post Timepoint (hr) Value: None
  misc_feature: MA Experiment 20001555 PARAMETER Experiment Name: At_Drought_Soil_Dry_P Parameter: Post-Treatment Value: None
  misc_feature: MA Experiment 20001555 PARAMETER Experiment Name: At_Drought_Soil_Dry_P Parameter: Timepoint (day) Value: 10
  misc_feature: MA Experiment 20001555 PARAMETER Experiment Name: At_Drought_Soil_Dry_P Parameter: Treatment Value: Drought vs. No Drought
  misc_feature: MA Experiment ID: 20001556 Result: Down-regulated in Transcription
  misc_feature: MA Experiment 20001556 PARAMETER Experiment Name: At_Drought_Soil_Dry_P Parameter: Age (day) Value: 26
  misc_feature: MA Experiment 20001556 PARAMETER Experiment Name: At_Drought_Soil_Dry_P Parameter: Organism Value: A. thaliana
  misc_feature: MA Experiment 20001556 PARAMETER Experiment Name: At_Drought_Soil_Dry_P Parameter: Plant Line Value: WS
  misc_feature: MA Experiment 20001556 PARAMETER Experiment Name: At_Drought_Soil_Dry_P Parameter: Post Timepoint (hr) Value: None
  misc_feature: MA Experiment 20001556 PARAMETER Experiment Name: At_Drought_Soil_Dry_P Parameter: Post-Treatment Value: None
  misc_feature: MA Experiment 20001556 PARAMETER Experiment Name: At_Drought_Soil_Dry_P Parameter: Timepoint (day) Value: 12
  misc_feature: MA Experiment 20001556 PARAMETER Experiment Name: At_Drought_Soil_Dry_P Parameter: Treatment Value: Drought vs. No Drought
  misc_feature: MA Experiment ID: 20001557 Result: Up-regulated in Transcription
  misc_feature: MA Experiment 20001557 PARAMETER Experiment Name: At_Drought_Soil_Dry_P Parameter: Age (day) Value: 27
  misc_feature: MA Experiment 20001557 PARAMETER Experiment Name: At_Drought_Soil_Dry_P Parameter: Organism Value: A. thaliana
  misc_feature: MA Experiment 20001557 PARAMETER Experiment Name: At_Drought_Soil_Dry_P Parameter: Plant Line Value: WS
  misc_feature: MA Experiment 20001557 PARAMETER Experiment Name: At_Drought_Soil_Dry_P Parameter: Post Timepoint (hr) Value: 3
  misc_feature: MA Experiment 20001557 PARAMETER Experiment Name: At_Drought_Soil_Dry_P Parameter: Post-Treatment Value: Re-Water vs. No Drought
  misc_feature: MA Experiment 20001557 PARAMETER Experiment Name: At_Drought_Soil_Dry_P Parameter: Timepoint (day) Value: 13
  misc_feature: MA Experiment 20001557 PARAMETER Experiment Name: At_Drought_Soil_Dry_P Parameter: Treatment Value: Drought vs. No Drought
  misc_feature: MA Experiment ID: 20001558 Result: Up-regulated in Transcription
  misc_feature: MA Experiment 20001558 PARAMETER Experiment Name: At_Drought_Soil_Dry_P Parameter: Age (day) Value: 27
  misc_feature: MA Experiment 20001558 PARAMETER Experiment Name: At_Drought_Soil_Dry_P Parameter: Organism Value: A. thaliana
  misc_feature: MA Experiment 20001558 PARAMETER Experiment Name: At_Drought_Soil_Dry_P Parameter: Plant Line Value: WS
  misc_feature: MA Experiment 20001558 PARAMETER Experiment Name: At_Drought_Soil_Dry_P Parameter: Post Timepoint (hr) Value: 6
  misc_feature: MA Experiment 20001558 PARAMETER Experiment Name: At_Drought_Soil_Dry_P Parameter: Post-Treatment Value: Re-Water vs. No Drought
  misc_feature: MA Experiment 20001558 PARAMETER Experiment Name: At_Drought_Soil_Dry_P Parameter: Timepoint (day) Value: 13
  misc_feature: MA Experiment 20001558 PARAMETER Experiment Name: At_Drought_Soil_Dry_P Parameter: Treatment Value: Drought vs. No Drought
  misc_feature: MA Experiment ID: 20001560 Result: Up-regulated in Transcription
  misc_feature: MA Experiment 20001560 PARAMETER Experiment Name: At_Drought_Soil_Dry_P Parameter: Age (day) Value: 28
  misc_feature: MA Experiment 20001560 PARAMETER Experiment Name: At_Drought_Soil_Dry_P Parameter: Organism Value: A. thaliana
  misc_feature: MA Experiment 20001560 PARAMETER Experiment Name: At_Drought_Soil_Dry_P Parameter: Plant Line Value: WS
  misc_feature: MA Experiment 20001560 PARAMETER Experiment Name: At_Drought_Soil_Dry_P Parameter: Post Timepoint (hr) Value: None
  misc_feature: MA Experiment 20001560 PARAMETER Experiment Name: At_Drought_Soil_Dry_P Parameter: Post-Treatment Value: None
  misc_feature: MA Experiment 20001560 PARAMETER Experiment Name: At_Drought_Soil_Dry_P Parameter: Timepoint (day) Value: 14
  misc_feature: MA Experiment 20001560 PARAMETER Experiment Name: At_Drought_Soil_Dry_P Parameter: Treatment Value: Drought vs. No Drought
  misc_feature: MA Experiment ID: 20001757 Result: Up-regulated in Transcription
  misc_feature: MA Experiment 20001757 PARAMETER Experiment Name: At_50mM_NH4NO3_L-to-H_P Parameter: Timepoint (hr) Value: 6
  misc_feature: MA Experiment 20001757 PARAMETER Experiment Name: At_50mM_NH4NO3_L-to-H_P Parameter: Tissue Value: Leaf
  misc_feature: MA Experiment 20001757 PARAMETER Experiment Name: At_50mM_NH4NO3_L-to-H_P Parameter: Treatment Value: 50mM NH4NO3 vs 100mM Mannitol
  misc_feature: MA Experiment ID: 20001911 Result: Down-regulated in Transcription
  misc_feature: MA Experiment 20001911 PARAMETER Experiment Name: At_Drought_Reproduction_P Parameter: Age (day) Value: 40
  misc_feature: MA Experiment 20001911 PARAMETER Experiment Name: At_Drought_Reproduction_P Parameter: Organism Value: A. thaliana
  misc_feature: MA Experiment 20001911 PARAMETER Experiment Name: At_Drought_Reproduction_P Parameter: Plant Line Value: WS
  misc_feature: MA Experiment 20001911 PARAMETER Experiment Name: At_Drought_Reproduction_P Parameter: Timepoint (day) Value: 10
  misc_feature: MA Experiment 20001911 PARAMETER Experiment Name: At_Drought_Reproduction_P Parameter: Tissue Value: Flowers
  misc_feature: MA Experiment 20001911 PARAMETER Experiment Name: At_Drought_Reproduction_P Parameter: Treatment Value: Drought vs. No Drought
aaaactatattatataaacacatttttcgtttcttcacattcacaaaacatctctctctttcttctcccattcactcactatcttgctcctagaaaaagatggcgagaatgagtttgatgatcatgatgattatggttgctgtgaccatgattaacattgctaagagtgatcccattgcaccatgttacttcatatttggtgactctttggttgataatggcaacaataatcagcttcagtcattagctagagctaattactttccttacggtattgactttgctgccggtccaaccggtcggtttagcaacggcttaaccactgtcgatgttatcgctcagcttttgggtttcgaggactacattacaccttacgcttctgcaagaggacaagacattctccgaggagttaactatgcttccgctgctgccggaatccgagacgaaaccggcagacaattgggaggtcgaatagcatttgcagggcaagtagcaaatcacgtgaacactgtgtcacaagtagtgaacatacttggtgatcaaaacgaagcctcgaattacctcagcaaatgcatttactctatcggattaggcagtaacgattatcttaacaactacttcatgcctactttttactctaccggtaaccagttctcccccgaatcctatgccgacgatctcgttgcccgttacaccgaacaactcagggtactgtataccaatggagcgaggaagtttgcgttgataggagtcggggcaatcggttgcagcccgaacgagctagctcaaaacagcagagacggaagaacgtgtgacgaaagaatcaactcagcgaacagaatctttaacagcaaactcatatctatagtcgacgcttttaaccagaacacaccagatgcaaaattcacttacatcaacgcttatggcatcttccaagacattattacaaaccctgctcgctacgggtttagagtgacaaatgcaggatgttgtggagttgggaggaacaatggacagataacttgtcttccaggtcaagcaccatgtctaaataggaatgagtatgtgttttgggatgcgtttcatcccggtgaagctgcgaatattgttattggaagacgatcttttaagcgagaagctgcttctgatgctcatccttatgatattcagcagctagcatctctctaaagagagaaagatcttttggttgtctaagtattttgatagttcttcaatggcagctgagttttggactcaagaagaagtgatttggtttgtgttgtgtgatgtcataactgtttatgtaatgatttggagttactgtttatctctttttctcttaacagttttataaatttgattctttcact

SEQ ID NO: 30581 - protein, 362 aa, Arabidopsis thaliana
  peptide (1)..(362): Ceres Seq. ID no. 13574979
  misc_feature (30)..(342): Pfam Name: GDSL-like Lipase/Acylhydrolase Pfam Description: GDSL-like Lipase/Acylhydrolase
  misc_feature (30)..(342): Pfam Name: GDSL-like Lipase/Acylhydrolase Pfam Description: GDSL-like Lipase/Acylhydrolase
  misc_feature (1)..(362): Homolog of NCBI NO: 34910808 NR Description: GDSL-motif lipase/hydrolase-like protein
  misc_feature (10)..(362): Homolog of NCBI NO: 21594055 NR Description: lipase/hydrolase, putative [Arabidopsis thaliana]
  misc_feature (10)..(362): Homolog of NCBI NO: 15220512 NR Description: GDSL-motif lipase/hydrolase protein [Arabidopsis
  misc_feature (1)..(362): Homolog of NCBI NO: 21592417 NR Description: lipase/hydrolase, putative [Arabidopsis thaliana]
  misc_feature (1)..(362): Homolog of NCBI NO: 15220514 NR Description: GDSL-motif lipase/hydrolase protein [Arabidopsis
  misc_feature (1)..(362): Homolog of NCBI NO: 34910808 NR Description: GDSL-motif lipase/hydrolase-like protein
  misc_feature (10)..(362): Homolog of NCBI NO: 15220512 NR Description: GDSL-motif lipase/hydrolase protein [Arabidopsis
  misc_feature (1)..(362): Homolog of NCBI NO: 15220514 NR Description: GDSL-motif lipase/hydrolase protein [Arabidopsis
  misc_feature (1)..(362): Homolog of NCBI NO: 15242458 NR Description: GDSL-motif lipase/hydrolase protein [Arabidopsis
  misc_feature (1)..(362): Homolog of NCBI NO: 21553940 NR Description: GDSL-motif lipase/hydrolase-like protein
  misc_feature (1)..(362): Homolog of NCBI NO: 7485419 NR Description: hypothetical protein F13C5.140 - Arabidopsis
  misc_feature (1)..(362): Homolog of NCBI NO: 18415211 NR Description: GDSL-motif lipase/hydrolase protein [Arabidopsis
  misc_feature (1)..(362): Homolog of NCBI NO: 21618199 NR Description: GDSL-motif lipase/hydrolase-like protein
  misc_feature (1)..(362): Homolog of NCBI NO: 21592417 NR Description: lipase/hydrolase, putative [Arabidopsis thaliana]
  misc_feature (10)..(362): Homolog of NCBI NO: 21594055 NR Description: lipase/hydrolase, putative [Arabidopsis thaliana]
  misc_feature (1)..(362): Homolog of NCBI NO: 21618199 NR Description: GDSL-motif lipase/hydrolase-like protein
  misc_feature (1)..(362): Homolog of NCBI NO: 18415211 NR Description: GDSL-motif lipase/hydrolase protein [Arabidopsis
  misc_feature (1)..(362): Homolog of NCBI NO: 7485419 NR Description: hypothetical protein F13C5.140 - Arabidopsis
  misc_feature (1)..(362): Homolog of NCBI NO: 21553940 NR Description: GDSL-motif lipase/hydrolase-like protein
  misc_feature (1)..(362): Homolog of NCBI NO: 15242458 NR Description: GDSL-motif lipase/hydrolase protein [Arabidopsis
MARMSLMIMMIMVAVTMINIAKSDPIAPCYFIFGDSLVDNGNNNQLQSLARANYFPYGIDFAAGPTGRFSNGLTTVDVIAQLLGFEDYITPYASARGQDILRGVNYASAAAGIRDETGRQLGGRIAFAGQVANHVNTVSQVVNILGDQNEASNYLSKCIYSIGLGSNDYLNNYFMPTFYSTGNQFSPESYADDLVARYTEQLRVLYTNGARKFALIGVGAIGCSPNELAQNSRDGRTCDERINSANRIFNSKLISIVDAFNQNTPDAKFTYINAYGIFQDIITNPARYGFRVTNAGCCGVGRNNGQITCLPGQAPCLNRNEYVFWDAFHPGEAANIVIGRRSFKREAASDAHPYDIQQLASL

SEQ ID NO: 30582 - protein, 359 aa, Arabidopsis thaliana
  peptide (1)..(359): Ceres Seq. ID no. 13574980
  misc_feature (27)..(339): Pfam Name: GDSL-like Lipase/Acylhydrolase Pfam Description: GDSL-like Lipase/Acylhydrolase
  misc_feature (27)..(339): Pfam Name: GDSL-like Lipase/Acylhydrolase Pfam Description: GDSL-like Lipase/Acylhydrolase
  misc_feature (1)..(359): Homolog of NCBI NO: 34910808 NR Description: GDSL-motif lipase/hydrolase-like protein
  misc_feature (7)..(359): Homolog of NCBI NO: 21594055 NR Description: lipase/hydrolase, putative [Arabidopsis thaliana]
  misc_feature (7)..(359): Homolog of NCBI NO: 15220512 NR Description: GDSL-motif lipase/hydrolase protein [Arabidopsis
  misc_feature (1)..(359): Homolog of NCBI NO: 21592417 NR Description: lipase/hydrolase, putative [Arabidopsis thaliana]
  misc_feature (1)..(359): Homolog of NCBI NO: 15220514 NR Description: GDSL-motif lipase/hydrolase protein [Arabidopsis
  misc_feature (1)..(359): Homolog of NCBI NO: 34910808 NR Description: GDSL-motif lipase/hydrolase-like protein
  misc_feature (7)..(359): Homolog of NCBI NO: 15220512 NR Description: GDSL-motif lipase/hydrolase protein [Arabidopsis
  misc_feature (1)..(359): Homolog of NCBI NO: 15220514 NR Description: GDSL-motif lipase/hydrolase protein [Arabidopsis
  misc_feature (1)..(359): Homolog of NCBI NO: 15242458 NR Description: GDSL-motif lipase/hydrolase protein [Arabidopsis
  misc_feature (1)..(359): Homolog of NCBI NO: 21553940 NR Description: GDSL-motif lipase/hydrolase-like protein
  misc_feature (1)..(359): Homolog of NCBI NO: 7485419 NR Description: hypothetical protein F13C5.140 - Arabidopsis
  misc_feature (1)..(359): Homolog of NCBI NO: 18415211 NR Description: GDSL-motif lipase/hydrolase protein [Arabidopsis
  misc_feature (1)..(359): Homolog of NCBI NO: 21618199 NR Description: GDSL-motif lipase/hydrolase-like protein
  misc_feature (1)..(359): Homolog of NCBI NO: 21592417 NR Description: lipase/hydrolase, putative [Arabidopsis thaliana]
  misc_feature (7)..(359): Homolog of NCBI NO: 21594055 NR Description: lipase/hydrolase, putative [Arabidopsis thaliana]
  misc_feature (1)..(359): Homolog of NCBI NO: 21618199 NR Description: GDSL-motif lipase/hydrolase-like protein
  misc_feature (1)..(359): Homolog of NCBI NO: 18415211 NR Description: GDSL-motif lipase/hydrolase protein [Arabidopsis
  misc_feature (1)..(359): Homolog of NCBI NO: 7485419 NR Description: hypothetical protein F13C5.140 - Arabidopsis
  misc_feature (1)..(359): Homolog of NCBI NO: 21553940 NR Description: GDSL-motif lipase/hydrolase-like protein
  misc_feature (1)..(359): Homolog of NCBI NO: 15242458 NR Description: GDSL-motif lipase/hydrolase protein [Arabidopsis
MSLMIMMIMVAVTMINIAKSDPIAPCYFIFGDSLVDNGNNNQLQSLARANYFPYGIDFAAGPTGRFSNGLTTVDVIAQLLGFEDYITPYASARGQDILRGVNYASAAAGIRDETGRQLGGRIAFAGQVANHVNTVSQVVNILGDQNEASNYLSKCIYSIGLGSNDYLNNYFMPTFYSTGNQFSPESYADDLVARYTEQLRVLYTNGARKFALIGVGAIGCSPNELAQNSRDGRTCDERINSANRIFNSKLISIVDAFNQNTPDAKFTYINAYGIFQDIITNPARYGFRVTNAGCCGVGRNNGQITCLPGQAPCLNRNEYVFWDAFHPGEAANIVIGRRSFKREAASDAHPYDIQQLASL

SEQ ID NO: 30583 - protein, 356 aa, Arabidopsis thaliana
  peptide (1)..(356): Ceres Seq. ID no. 13574981
  misc_feature (24)..(336): Pfam Name: GDSL-like Lipase/Acylhydrolase Pfam Description: GDSL-like Lipase/Acylhydrolase
  misc_feature (24)..(336): Pfam Name: GDSL-like Lipase/Acylhydrolase Pfam Description: GDSL-like Lipase/Acylhydrolase
  misc_feature (1)..(356): Homolog of NCBI NO: 34910808 NR Description: GDSL-motif lipase/hydrolase-like protein
  misc_feature (4)..(356): Homolog of NCBI NO: 21594055 NR Description: lipase/hydrolase, putative [Arabidopsis thaliana]
  misc_feature (4)..(356): Homolog of NCBI NO: 15220512 NR Description: GDSL-motif lipase/hydrolase protein [Arabidopsis
  misc_feature (1)..(356): Homolog of NCBI NO: 21592417 NR Description: lipase/hydrolase, putative [Arabidopsis thaliana]
  misc_feature (1)..(356): Homolog of NCBI NO: 15220514 NR Description: GDSL-motif lipase/hydrolase protein [Arabidopsis
  misc_feature (1)..(356): Homolog of NCBI NO: 34910808 NR Description: GDSL-motif lipase/hydrolase-like protein
  misc_feature (4)..(356): Homolog of NCBI NO: 15220512 NR Description: GDSL-motif lipase/hydrolase protein [Arabidopsis
  misc_feature (1)..(356): Homolog of NCBI NO: 15220514 NR Description: GDSL-motif lipase/hydrolase protein [Arabidopsis
  misc_feature (1)..(356): Homolog of NCBI NO: 15242458 NR Description: GDSL-motif lipase/hydrolase protein [Arabidopsis
  misc_feature (1)..(356): Homolog of NCBI NO: 21553940 NR Description: GDSL-motif lipase/hydrolase-like protein
  misc_feature (1)..(356): Homolog of NCBI NO: 7485419 NR Description: hypothetical protein F13C5.140 - Arabidopsis
  misc_feature (1)..(356): Homolog of NCBI NO: 18415211 NR Description: GDSL-motif lipase/hydrolase protein [Arabidopsis
  misc_feature (1)..(356): Homolog of NCBI NO: 21618199 NR Description: GDSL-motif lipase/hydrolase-like protein
  misc_feature (1)..(356): Homolog of NCBI NO: 21592417 NR Description: lipase/hydrolase, putative [Arabidopsis thaliana]
  misc_feature (4)..(356): Homolog of NCBI NO: 21594055 NR Description: lipase/hydrolase, putative [Arabidopsis thaliana]
  misc_feature (1)..(356): Homolog of NCBI NO: 21618199 NR Description: GDSL-motif lipase/hydrolase-like protein
  misc_feature (1)..(356): Homolog of NCBI NO: 18415211 NR Description: GDSL-motif lipase/hydrolase protein [Arabidopsis
  misc_feature (1)..(356): Homolog of NCBI NO: 7485419 NR Description: hypothetical protein F13C5.140 - Arabidopsis
  misc_feature (1)..(356): Homolog of NCBI NO: 21553940 NR Description: GDSL-motif lipase/hydrolase-like protein
  misc_feature (1)..(356): Homolog of NCBI NO: 15242458 NR Description: GDSL-motif lipase/hydrolase protein [Arabidopsis
MIMMIMVAVTMINIAKSDPIAPCYFIFGDSLVDNGNNNQLQSLARANYFPYGIDFAAGPTGRFSNGLTTVDVIAQLLGFEDYITPYASARGQDILRGVNYASAAAGIRDETGRQLGGRIAFAGQVANHVNTVSQVVNILGDQNEASNYLSKCIYSIGLGSNDYLNNYFMPTFYSTGNQFSPESYADDLVARYTEQLRVLYTNGARKFALIGVGAIGCSPNELAQNSRDGRTCDERINSANRIFNSKLISIVDAFNQNTPDAKFTYINAYGIFQDIITNPARYGFRVTNAGCCGVGRNNGQITCLPGQAPCLNRNEYVFWDAFHPGEAANIVIGRRSFKREAASDAHPYDIQQLASL

SEQ ID NO: 30584 - DNA, 1592 bp, Arabidopsis thaliana
  misc_feature (1)..(1592): Ceres Seq. ID no. 13487835
  misc_feature: MA Experiment ID: 108434 Result: Up-regulated in Transcription
  misc_feature: MA Experiment 108434 PARAMETER Experiment Name: At_Root_Tips_cDNA_P Parameter: Tissue Value: Root Tips
  misc_feature: MA Experiment ID: 20000179 Result: Up-regulated in Transcription
  misc_feature: MA Experiment 20000179 PARAMETER Experiment Name: At_Germinating_Seeds_P Parameter: Age (hr) Value: 6 vs. 0
  misc_feature: MA Experiment 20000179 PARAMETER Experiment Name: At_Germinating_Seeds_P Parameter: Tissue Value: Germinating Seeds
  misc_feature: MA Experiment ID: 20000180 Result: Up-regulated in Transcription
  misc_feature: MA Experiment 20000180 PARAMETER Experiment Name: At_Germinating_Seeds_P Parameter: Age (hr) Value: 24 vs. 0
  misc_feature: MA Experiment 20000180 PARAMETER Experiment Name: At_Germinating_Seeds_P Parameter: Tissue Value: Germinating Seeds
  misc_feature: MA Experiment ID: 20000185 Result: Up-regulated in Transcription
  misc_feature: MA Experiment 20000185 PARAMETER Experiment Name: At_Roots__P Parameter: Age (day) Value: 7 vs. 21
  misc_feature: MA Experiment 20000185 PARAMETER Experiment Name: At_Roots__P Parameter: Organism Value: A. thaliana
  misc_feature: MA Experiment 20000185 PARAMETER Experiment Name: At_Roots__P Parameter: Tissue Value: Roots vs. Whole Plant
  misc_feature: MA Experiment ID: 20000227 Result: Up-regulated in Transcription
  misc_feature: MA Experiment 20000227 PARAMETER Experiment Name: At_Root-Tips-vs-Tops_P Parameter: Tissue Value: Root Tips vs. Root Tops
  misc_feature: MA Experiment ID: 20001451 Result: Down-regulated in Transcription
  misc_feature: MA Experiment 20001451 PARAMETER Experiment Name: At_Far-red-induction_P Parameter: Age (day) Value: 7
  misc_feature: MA Experiment 20001451 PARAMETER Experiment Name: At_Far-red-induction_P Parameter: Light Value: Far-red vs. White
  misc_feature: MA Experiment 20001451 PARAMETER Experiment Name: At_Far-red-induction_P Parameter: Organism Value: A. thaliana
  misc_feature: MA Experiment 20001451 PARAMETER Experiment Name: At_Far-red-induction_P Parameter: Plant Line Value: Columbia
  misc_feature: MA Experiment 20001451 PARAMETER Experiment Name: At_Far-red-induction_P Parameter: Timepoint (hr) Value: 24
  misc_feature: MA Experiment 20001451 PARAMETER Experiment Name: At_Far-red-induction_P Parameter: Tissue Value: Whole Plant
atcgccgagtctgcttcttcttctctctctctctctctagtggtcacactcacttcacacccgtgaaaaaaccctaggaaccaaatatggtgaacctctcgagatccgtcgcgttgatctctgtattcctccttcctttacttagcttctctttctccgtcgataatccgacggatcggcgtgttcttgttcttctcgatgatttatcactcaaatcctctcattctatcttcttcaacactctcaagtctcgtggattcgatctcgatttcaagttagctgaagattcgaagcttgcgcttcaacgatacggccagtacttgtacgatgggttgatcatcttcgccccatcaacagaacggtttggaggatccttggattcgaaatccattgctgattttgttgattccggtcgtgacttgatcttatcggcggatactgctgcatctgatttgattaggggtattgccacagagtgtggggttgatttcgatgaggattcttcagctatggttattgatcatactagcttctccgtctctgatgttgacggcgaccacaccttgattgctgccgacgatttagtgaaatccgatgtcattttgggaaaaaccaagattgaggctcccgtgctcttcagaggagttgcacattcgttgaaccctactaacaatctggttttgaaagttctttcagcctctccatcagcttattctgctaacccaagctcgaagttgtctagtcccccccagctcactgggtcttcaatttcgctagtctcggtcatgcaggccaggaacaatgctagggttgtgatctcaggctcagtgcagttgtttagcgataggttaatcagatctggtgtccagaaagcagggagtccgaaccaatacgaaaaatctggcaacgaacagtttgtgactgaactaagcaaatgggtcttccacgaaaggggccatctgaaggctggtaatcttgtacaccatagggttggagaaacagatgagccagctatatataggataaaggatgacctggaattttctgtagagatatatgagtggtcaggaaagagctgggagccgtatgttgctaacgatgtgcaggttcagttttacatgatgagcccgtatgtgttgaaaaccctgtcaacagacaagaagggtctgtttcatacatctttcaaggttcctgatgtctacggtgtattccagtttaaggttgaatatgaaaagctaggctacactacattatctctttcgaagcagattccggtgcggccttacagacacaatgagtatgagagatttatcccaactgcgtatccttattatggagcctgctttacgacgatggctggtttcttcgtcttcagcttcgtctacctctaccataagtagaatcccttaaatggtggccaagtcccataaagtaagccaaacctccatatttagatgagaaaaaacaactttcgaactagagaccaatatttttgggcagcaaggttttcatatgtttctagttttagccaaacagttgcaaccttctttttgtttcccagatatttctatgttaacgtaactttacacccc

SEQ ID NO: 30585 - protein, 437 aa, Arabidopsis thaliana; identical to SEQ ID NO: 23044
  peptide (1)..(437): Ceres Seq. ID no. 13487836
  misc_feature (8)..(437): Pfam Name: Dolichyl-diphosphooligosaccharide-protein Pfam Description: Dolichyl-diphosphooligosaccharide-protein
  misc_feature (1)..(437): Homolog of NCBI NO: 730241 NR Description: Dolichyl-diphosphooligosaccharide--protein
  misc_feature (1)..(437): Homolog of NCBI NO: 2662375 NR Description: oligosaccharyltransferase [Homo sapiens]
  misc_feature (1)..(437): Homolog of NCBI NO: 30584753 NR Description: Homo sapiens
  misc_feature (1)..(437): Homolog of NCBI NO: 21104416 NR Description: dolichyl-diphosphooligosaccharide-protein
  misc_feature (1)..(437): Homolog of NCBI NO: 20070197 NR Description: dolichyl-diphosphooligosaccharide-protein
  misc_feature (1)..(437): Homolog of NCBI NO: 38175467 NR Description: putative dolichyl-di-phosphooligosaccharide-
  misc_feature (1)..(437): Homolog of NCBI NO: 8843726 NR Description: dolichyl-di-phosphooligosaccharide-protein
  misc_feature (1)..(437): Homolog of NCBI NO: 14334506 NR Description: putative
  misc_feature (1)..(437): Homolog of NCBI NO: 21553942 NR Description: dolichyl-di-phosphooligosaccharide-protein
  misc_feature (1)..(437): Homolog of NCBI NO: 18425101 NR Description: dolichyl-di-phosphooligosaccharide-protein

SEQ ID NO: 30586 - protein, 296 aa, Arabidopsis thaliana; identical to SEQ ID NO: 23045
  peptide (1)..(296): Ceres Seq. ID no. 13487837
  misc_feature (1)..(296): Pfam Name: Dolichyl-diphosphooligosaccharide-protein Pfam Description: Dolichyl-diphosphooligosaccharide-protein
  misc_feature (1)..(296): Homolog of NCBI NO: 730241 NR Description: Dolichyl-diphosphooligosaccharide--protein
  misc_feature (1)..(296): Homolog of NCBI NO: 2662375 NR Description: oligosaccharyltransferase [Homo sapiens]
  misc_feature (1)..(296): Homolog of NCBI NO: 30584753 NR Description: Homo sapiens
  misc_feature (1)..(296): Homolog of NCBI NO: 21104416 NR Description: dolichyl-diphosphooligosaccharide-protein
  misc_feature (1)..(296): Homolog of NCBI NO: 20070197 NR Description: dolichyl-diphosphooligosaccharide-protein
  misc_feature (1)..(296): Homolog of NCBI NO: 38175467 NR Description: putative dolichyl-di-phosphooligosaccharide-
  misc_feature (1)..(296): Homolog of NCBI NO: 8843726 NR Description: dolichyl-di-phosphooligosaccharide-protein
  misc_feature (1)..(296): Homolog of NCBI NO: 14334506 NR Description: putative
  misc_feature (1)..(296): Homolog of NCBI NO: 21553942 NR Description: dolichyl-di-phosphooligosaccharide-protein
  misc_feature (1)..(296): Homolog of NCBI NO: 18425101 NR Description: dolichyl-di-phosphooligosaccharide-protein

SEQ ID NO: 30587 - DNA, 1337 bp, Arabidopsis thaliana
  misc_feature (1)..(1337): Ceres Seq. ID no. 12396217
  misc_feature: MA Experiment ID: 20001451 Result: Down-regulated in Transcription
  misc_feature: MA Experiment 20001451 PARAMETER Experiment Name: At_Far-red-induction_P Parameter: Age (day) Value: 7
  misc_feature: MA Experiment 20001451 PARAMETER Experiment Name: At_Far-red-induction_P Parameter: Light Value: Far-red vs. White
  misc_feature: MA Experiment 20001451 PARAMETER Experiment Name: At_Far-red-induction_P Parameter: Organism Value: A. thaliana
  misc_feature: MA Experiment 20001451 PARAMETER Experiment Name: At_Far-red-induction_P Parameter: Plant Line Value: Columbia
  misc_feature: MA Experiment 20001451 PARAMETER Experiment Name: At_Far-red-induction_P Parameter: Timepoint (hr) Value: 24
  misc_feature: MA Experiment 20001451 PARAMETER Experiment Name: At_Far-red-induction_P Parameter: Tissue Value: Whole Plant
gactactcatatgtgtcgcccagatttgaagatcggagatatgaatctcttctttctctggatttgaaagttcgataaaaatctactgatacatcgacttctggaagcgatctcgatctctctagaattgtttcgacgacgaagatgaagaagattcaaattggtgcggtggcgctattggtgtttctatctgtggtctctctctttgaaatcggattggcttctccgaacacagttcctgctttcctctggtctccgcatctccagtctgctaatggtgaattggatgaggctgtaaattatcaggtcatgtctgcaaaggatctagttggttctgttttcactcaaggaggttggtcaaactttctgtgctcagagaagaagcttgagcaacctgttgatgttgcacttgtgttcataggcagagagttactgtcttctgatgtttcttcaaaaaggaactcagatcctgcccttgttaacacattgaataatctatttacagcttccaacttctcattggcattcccatatattgctgctccagaggaagaaaggatggagaatttgttactttcagggcttaaagaagcttgtcccaacaatgtaggagtcagcaatatcgtgttctcagattcgtgctttgttgaggatggaacaattcagaaactttcagacttgcagtctttcaaagatcatttgcttgctagaagagaaacaaggaaagaaggagaaactgacttggttgtgctctgttccgagggttctgaatcgaatagtcaagctggacagtcacattcagagcgtgaaagcatcttggaacttgttagttctgtagaacaatccggcagtaaatatacagctctttatgtttctgatccttattggtacacatcttacaaaactctccaaaggtttctagctgaaactgctaaaggaaacagtactcctgaaattgctactggctgtgatgaactctgcaaatttaagtcatcacttttggagggcatactagtgggaatcgtttttcttctcatcttgatcagtggactttgctgtatggcgggtatcgatacaccgactagattcgagactcctcaagattcttaagctgttgaccttaagagccatccccaccttttgctttgcttttgacgagtcttttcttgtgcatagtgcgcattgtggaaggtacttcaatgtcgatttgttacattattacttcaaaacaaaatctgcatatgccataaaatccccttgtatcatttattcatcttgtttgtgagtctttcttaaacgtcataaattaataatggagaacgagtaaaaaaccagag

SEQ ID NO: 30588 - protein, 321 aa, Arabidopsis thaliana
  peptide (1)..(321): Ceres Seq. ID no. 12396218
  misc_feature (56)..(118): Homolog of NCBI NO: 25405838 NR Description: hypothetical protein T5A14.4 [imported] -
  misc_feature (119)..(321): Homolog of NCBI NO: 21618303 NR Description: unknown [Arabidopsis thaliana]
  misc_feature (1)..(321): Homolog of NCBI NO: 30682651 NR Description: expressed protein [Arabidopsis thaliana]
  misc_feature (1)..(321): Homolog of NCBI NO: 24417230 NR Description: unknown [Arabidopsis thaliana]
MKKIQIGAVALLVFLSVVSLFEIGLASPNTVPAFLWSPHLQSANGELDEAVNYQVMSAKDLVGSVFTQGGWSNFLCSEKKLEQPVDVALVFIGRELLSSDVSSKRNSDPALVNTLNNLFTASNFSLAFPYIAAPEEERMENLLLSGLKEACPNNVGVSNIVFSDSCFVEDGTIQKLSDLQSFKDHLLARRETRKEGETDLVVLCSEGSESNSQAGQSHSERESILELVSSVEQSGSKYTALYVSDPYWYTSYKTLQRFLAETAKGNSTPEIATGCDELCKFKSSLLEGILVGIVFLLILISGLCCMAGIDTPTRFETPQDS

SEQ ID NO: 30589 - protein, 266 aa, Arabidopsis thaliana
  peptide (1)..(266): Ceres Seq. ID no. 12396219
  misc_feature (1)..(63): Homolog of NCBI NO: 25405838 NR Description: hypothetical protein T5A14.4 [imported] -
  misc_feature (64)..(266): Homolog of NCBI NO: 21618303 NR Description: unknown [Arabidopsis thaliana]
  misc_feature (1)..(266): Homolog of NCBI NO: 30682651 NR Description: expressed protein [Arabidopsis thaliana]
  misc_feature (1)..(266): Homolog of NCBI NO: 24417230 NR Description: unknown [Arabidopsis thaliana]
MSAKDLVGSVFTQGGWSNFLCSEKKLEQPVDVALVFIGRELLSSDVSSKRNSDPALVNTLNNLFTASNFSLAFPYIAAPEEERMENLLLSGLKEACPNNVGVSNIVFSDSCFVEDGTIQKLSDLQSFKDHLLARRETRKEGETDLVVLCSEGSESNSQAGQSHSERESILELVSSVEQSGSKYTALYVSDPYWYTSYKTLQRFLAETAKGNSTPEIATGCDELCKFKSSLLEGILVGIVFLLILISGLCCMAGIDTPTRFETPQDS

SEQ ID NO: 30590 - protein, 183 aa, Arabidopsis thaliana
  peptide (1)..(183): Ceres Seq. ID no. 12396220
  misc_feature (1)..(183): Homolog of NCBI NO: 21618303 NR Description: unknown [Arabidopsis thaliana]
  misc_feature (1)..(183): Homolog of NCBI NO: 30682651 NR Description: expressed protein [Arabidopsis thaliana]
  misc_feature (1)..(183): Homolog of NCBI NO: 24417230 NR Description: unknown [Arabidopsis thaliana]
MENLLLSGLKEACPNNVGVSNIVFSDSCFVEDGTIQKLSDLQSFKDHLLARRETRKEGETDLVVLCSEGSESNSQAGQSHSERESILELVSSVEQSGSKYTALYVSDPYWYTSYKTLQRFLAETAKGNSTPEIATGCDELCKFKSSLLEGILVGIVFLLILISGLCCMAGIDTPTRFETPQDS

SEQ ID NO: 30591 - DNA, 1378 bp, Arabidopsis thaliana
  misc_feature (1)..(1378): Ceres Seq. ID no. 12738505
  misc_feature: MA Experiment ID: 108435 Result: Down-regulated in Transcription
  misc_feature: MA Experiment 108435 PARAMETER Experiment Name: At_stm_Mutants_cDNA_P Parameter: Plant Line Value: wt Landsburg vs stm
  misc_feature: MA Experiment 108435 PARAMETER Experiment Name: At_stm_Mutants_cDNA_P Parameter: Tissue Value: Shoot Apical Meristem Region
  misc_feature: MA Experiment ID: 108463 Result: Up-regulated in Transcription
  misc_feature: MA Experiment 108463 PARAMETER Experiment Name: At_Germinating_Seeds_cDNA_P Parameter: Age (day) Value: 3 vs. 0
  misc_feature: MA Experiment 108463 PARAMETER Experiment Name: At_Germinating_Seeds_cDNA_P Parameter: Tissue Value: Germinating Seeds
  misc_feature: MA Experiment ID: 108464 Result: Up-regulated in Transcription
  misc_feature: MA Experiment 108464 PARAMETER Experiment Name: At_Germinating_Seeds_cDNA_P Parameter: Age (day) Value: 4 vs. 0
  misc_feature: MA Experiment 108464 PARAMETER Experiment Name: At_Germinating_Seeds_cDNA_P Parameter: Tissue Value: Germinating Seeds
  misc_feature: MA Experiment ID: 108573 Result: Up-regulated in Transcription
  misc_feature: MA Experiment 108573 PARAMETER Experiment Name: At_Drought_cDNA_P Parameter: Timepoint (hr) Value: 6
  misc_feature: MA Experiment 108573 PARAMETER Experiment Name: At_Drought_cDNA_P Parameter: Tissue Value: Aerial
  misc_feature: MA Experiment 108573 PARAMETER Experiment Name: At_Drought_cDNA_P Parameter: Treatment Value: Drought vs. No Drought
  misc_feature: MA Experiment ID: 108595 Result: Down-regulated in Transcription
  misc_feature: MA Experiment 108595 PARAMETER Experiment Name: At_Ler-pi_Ovule_cDNA_P Parameter: Plant Line Value: null
  misc_feature: MA Experiment ID: 20000113 Result: Up-regulated in Transcription
  misc_feature: MA Experiment 20000113 PARAMETER Experiment Name: At_42deg_Heat_cDNA_P Parameter: Temperature (deg C) Value: 42 vs. 22
  misc_feature: MA Experiment 20000113 PARAMETER Experiment Name: At_42deg_Heat_cDNA_P Parameter: Timepoint (hr) Value: 8
  misc_feature: MA Experiment 20000113 PARAMETER Experiment Name: At_42deg_Heat_cDNA_P Parameter: Tissue Value: Aerial
  misc_feature: MA Experiment ID: 20000227 Result: Down-regulated in Transcription
  misc_feature: MA Experiment 20000227 PARAMETER Experiment Name: At_Root-Tips-vs-Tops_P Parameter: Tissue Value: Root Tips vs. Root Tops
  misc_feature: MA Experiment ID: 20000234 Result: Down-regulated in Transcription
  misc_feature: MA Experiment 20000234 PARAMETER Experiment Name: At_Siliques_P Parameter: Age (day) Value: 21
  misc_feature: MA Experiment 20000234 PARAMETER Experiment Name: At_Siliques_P Parameter: Organism Value: A. thaliana
  misc_feature: MA Experiment 20000234 PARAMETER Experiment Name: At_Siliques_P Parameter: Plant Line Value: WS
  misc_feature: MA Experiment 20000234 PARAMETER Experiment Name: At_Siliques_P Parameter: Tissue Value: Less Than 5mm Siliques vs. Whole Plant
  misc_feature: MA Experiment ID: 20000235 Result: Down-regulated in Transcription
  misc_feature: MA Experiment 20000235 PARAMETER Experiment Name: At_Siliques_P Parameter: Age (day) Value: 21
  misc_feature: MA Experiment 20000235 PARAMETER Experiment Name: At_Siliques_P Parameter: Organism Value: A. thaliana
  misc_feature: MA Experiment 20000235 PARAMETER Experiment Name: At_Siliques_P Parameter: Plant Line Value: WS
  misc_feature: MA Experiment 20000235 PARAMETER Experiment Name: At_Siliques_P Parameter: Tissue Value: 5-10mm Siliques vs. Whole Plant
  misc_feature: MA Experiment ID: 20000264 Result: Down-regulated in Transcription
  misc_feature: MA Experiment 20000264 PARAMETER Experiment Name: At_Open_Flower_P Parameter: Age (day) Value: 21
  misc_feature: MA Experiment 20000264 PARAMETER Experiment Name: At_Open_Flower_P Parameter: Plant Line Value: WS
  misc_feature: MA Experiment 20000264 PARAMETER Experiment Name: At_Open_Flower_P Parameter: Tissue Value: Open Flower vs. Whole Plant
  misc_feature: MA Experiment ID: 20000265 Result: Down-regulated in Transcription
  misc_feature: MA Experiment 20000265 PARAMETER Experiment Name: At_Open_Flower_P Parameter: Age (day) Value: 21
  misc_feature: MA Experiment 20000265 PARAMETER Experiment Name: At_Open_Flower_P Parameter: Plant Line Value: WS
  misc_feature: MA Experiment 20000265 PARAMETER Experiment Name: At_Open_Flower_P Parameter: Tissue Value: Closed Flower vs. Whole Plant
  misc_feature: MA Experiment ID: 20000286 Result: Down-regulated in Transcription
  misc_feature: MA Experiment 20000286 PARAMETER Experiment Name: At_Open_Flower_P Parameter: Age (day) Value: 21
  misc_feature: MA Experiment 20000286 PARAMETER Experiment Name: At_Open_Flower_P Parameter: Plant Line Value: WS
  misc_feature: MA Experiment 20000286 PARAMETER Experiment Name: At_Open_Flower_P Parameter: Tissue Value: Half Open vs. Whole Plant
  misc_feature: MA Experiment ID: 20000439 Result: Down-regulated in Transcription
  misc_feature: MA Experiment 20000439 PARAMETER Experiment Name: At_Roots__P Parameter: Age (day) Value: 14 vs. 21
  misc_feature: MA Experiment 20000439 PARAMETER Experiment Name: At_Roots__P Parameter: Organism Value: A. thaliana
  misc_feature: MA Experiment 20000439 PARAMETER Experiment Name: At_Roots__P Parameter: Tissue Value: Roots vs. Whole Plant
  misc_feature: MA Experiment ID: 20000794 Result: Down-regulated in Transcription
  misc_feature: MA Experiment 20000794 PARAMETER Experiment Name: At_Petals_P Parameter: Age (day) Value: 23-25 days
  misc_feature: MA Experiment 20000794 PARAMETER Experiment Name: At_Petals_P Parameter: Plant Line Value: WS
  misc_feature: MA Experiment 20000794 PARAMETER Experiment Name: At_Petals_P Parameter: Tissue Value: Petals vs. Whole plant
  misc_feature: MA Experiment ID: 20001557 Result: Down-regulated in Transcription
  misc_feature: MA Experiment 20001557 PARAMETER Experiment Name: At_Drought_Soil_Dry_P Parameter: Age (day) Value: 27
  misc_feature: MA Experiment 20001557 PARAMETER Experiment Name: At_Drought_Soil_Dry_P Parameter: Organism Value: A. thaliana
  misc_feature: MA Experiment 20001557 PARAMETER Experiment Name: At_Drought_Soil_Dry_P Parameter: Plant Line Value: WS
  misc_feature: MA Experiment 20001557 PARAMETER Experiment Name: At_Drought_Soil_Dry_P Parameter: Post Timepoint (hr) Value: 3
  misc_feature: MA Experiment 20001557 PARAMETER Experiment Name: At_Drought_Soil_Dry_P Parameter: Post-Treatment Value: Re-Water vs. No Drought
  misc_feature: MA Experiment 20001557 PARAMETER Experiment Name: At_Drought_Soil_Dry_P Parameter: Timepoint (day) Value: 13
  misc_feature: MA Experiment 20001557 PARAMETER Experiment Name: At_Drought_Soil_Dry_P Parameter: Treatment Value: Drought vs. No Drought
  misc_feature: MA Experiment ID: 20001558 Result: Down-regulated in Transcription
  misc_feature: MA Experiment 20001558 PARAMETER Experiment Name: At_Drought_Soil_Dry_P Parameter: Age (day) Value: 27
  misc_feature: MA Experiment 20001558 PARAMETER Experiment Name: At_Drought_Soil_Dry_P Parameter: Organism Value: A. thaliana
  misc_feature: MA Experiment 20001558 PARAMETER Experiment Name: At_Drought_Soil_Dry_P Parameter: Plant Line Value: WS
  misc_feature: MA Experiment 20001558 PARAMETER Experiment Name: At_Drought_Soil_Dry_P Parameter: Post Timepoint (hr) Value: 6
  misc_feature: MA Experiment 20001558 PARAMETER Experiment Name: At_Drought_Soil_Dry_P Parameter: Post-Treatment Value: Re-Water vs. No Drought
  misc_feature: MA Experiment 20001558 PARAMETER Experiment Name: At_Drought_Soil_Dry_P Parameter: Timepoint (day) Value: 13
  misc_feature: MA Experiment 20001558 PARAMETER Experiment Name: At_Drought_Soil_Dry_P Parameter: Treatment Value: Drought vs. No Drought
  misc_feature: MA Experiment ID: 20001560 Result: Down-regulated in Transcription
  misc_feature: MA Experiment 20001560 PARAMETER Experiment Name: At_Drought_Soil_Dry_P Parameter: Age (day) Value: 28
  misc_feature: MA Experiment 20001560 PARAMETER Experiment Name: At_Drought_Soil_Dry_P Parameter: Organism Value: A. thaliana
  misc_feature: MA Experiment 20001560 PARAMETER Experiment Name: At_Drought_Soil_Dry_P Parameter: Plant Line Value: WS
  misc_feature: MA Experiment 20001560 PARAMETER Experiment Name: At_Drought_Soil_Dry_P Parameter: Post Timepoint (hr) Value: None
  misc_feature: MA Experiment 20001560 PARAMETER Experiment Name: At_Drought_Soil_Dry_P Parameter: Post-Treatment Value: None
  misc_feature: MA Experiment 20001560 PARAMETER Experiment Name: At_Drought_Soil_Dry_P Parameter: Timepoint (day) Value: 14
  misc_feature: MA Experiment 20001560 PARAMETER Experiment Name: At_Drought_Soil_Dry_P Parameter: Treatment Value: Drought vs. No Drought
  misc_feature: MA Experiment ID: 20001905 Result: Down-regulated in Transcription
  misc_feature: MA Experiment 20001905 PARAMETER Experiment Name: At_Drought_Reproduction_P Parameter: Age (day) Value: 40
  misc_feature: MA Experiment 20001905 PARAMETER Experiment Name: At_Drought_Reproduction_P Parameter: Organism Value: A. thaliana
  misc_feature: MA Experiment 20001905 PARAMETER Experiment Name: At_Drought_Reproduction_P Parameter: Plant Line Value: WS
  misc_feature: MA Experiment 20001905 PARAMETER Experiment Name: At_Drought_Reproduction_P Parameter: Timepoint (day) Value: 10
  misc_feature: MA Experiment 20001905 PARAMETER Experiment Name: At_Drought_Reproduction_P Parameter: Tissue Value: Rosettes
  misc_feature: MA Experiment 20001905 PARAMETER Experiment Name: At_Drought_Reproduction_P Parameter: Treatment Value: Drought vs. No Drought
cttcttcctcgattcaatcggagatttcgaagtctcactatcacttcttcttctacaacttcttcaaacaatttcagtagtaattgtggcgatgatggcttctctctcgatgatttcactctccattctgattctcgatcacctaaaaaatgtgtcctttctgatcttatacaagagattgagccattagatgtgagtttgattcagaaggatgttccagtgactactttggatgcaatgaaaagaacaatctcaggcatgttgggtcttcttccatctgataggtttcaggttcatattgagtcactttgggaacctttgtctaagcttttggtatcttcaatgatgactgggtatacattgaggaatgctgaatatcggctttttcttgaaaaaaaccttgatatgagtggtggaggcttggacagccacgcttcggaaaacactgaatatgatatggaagggacgtttcctgatgaagatcatgtttcatccaaaagggatagcagaactcagaacctttctgaaacgattgatgaagaaggtttgggcagagtatcctctgaagctcaagaatatatcttacgtttgcagtcacaattgtcttctgtgaaaaaggaattacaagaaatgagacgaaagaacgctgccctacaaatgcaacaatttgttggcgaagagaagaatgatttgttggactatttacgatctttgcaacctgagaaggtagctgagttgtcagaacctgcggctcctgaggtgaaagagactattcattctgttgttcacggtcttttggcaactctatcaccgaagatgcactctaagtttccagcatcagaagttccacctactgaaacggtgaaagcaaaaagtgatgaagattgtgctgaacttgtagagaacacttcgttgcagtttcagcctcttatctcactgactcgagactaccttgctcgtcttctcttctggtgcatgctattgggacattatctcagaggtttggaatatcgaatggaactgatggaggtcctgtctttgacatgcgatgccaatgggtctgagaacgtcgcttgaagctatctttatacatctcaacattgtcttacatgcgtatcagcggccttgacactcttaaaccaacaaagtgggcaagtgactaggagacaggccagcctttgagctttagctcttgcacatatatgcagctttgtgctggcctgaaaattcatgggcgaggtaaagtgtaacataagaaatcacttctactaaaattatttttcgttgcattatcgtgtgatggatctgcaaagcaataaagctaagtgtaattgtattcaggaatatactcgtttggtcattaagtatagtttgtcct

SEQ ID NO: 30592 - protein, 358 aa, Arabidopsis thaliana
  peptide (1)..(358): Ceres Seq. ID no. 12738506
  misc_feature (1)..(358): Homolog of NCBI NO: 15226027 NR Description: unknown protein
LLPRFNRRFRSLTITSSSTTSSNNFSSNCGDDGFSLDDFTLHSDSRSPKKCVLSDLIQEIEPLDVSLIQKDVPVTTLDAMKRTISGMLGLLPSDRFQVHIESLWEPLSKLLVSSMMTGYTLRNAEYRLFLEKNLDMSGGGLDSHASENTEYDMEGTFPDEDHVSSKRDSRTQNLSETIDEEGLGRVSSEAQEYILRLQSQLSSVKKELQEMRRKNAALQMQQFVGEEKNDLLDYLRSLQPEKVAELSEPAAPEVKETIHSVVHGLLATLSPKMHSKFPASEVPPTETVKAKSDEDCAELVENTSLQFQPLISLTRDYLARLLFWCMLLGHYLRGLEYRMELMEVLSLTCDANGSENVA

SEQ ID NO: 30593 - protein, 279 aa, Arabidopsis thaliana
  peptide (1)..(279): Ceres Seq. ID no. 12738507
  misc_feature (1)..(279): Homolog of NCBI NO: 15226027 NR Description: unknown protein
MKRTISGMLGLLPSDRFQVHIESLWEPLSKLLVSSMMTGYTLRNAEYRLFLEKNLDMSGGGLDSHASENTEYDMEGTFPDEDHVSSKRDSRTQNLSETIDEEGLGRVSSEAQEYILRLQSQLSSVKKELQEMRRKNAALQMQQFVGEEKNDLLDYLRSLQPEKVAELSEPAAPEVKETIHSVVHGLLATLSPKMHSKFPASEVPPTETVKAKSDEDCAELVENTSLQFQPLISLTRDYLARLLFWCMLLGHYLRGLEYRMELMEVLSLTCDANGSENVA

SEQ ID NO: 30594 - protein, 272 aa, Arabidopsis thaliana
  peptide (1)..(272): Ceres Seq. ID no. 12738508
  misc_feature (1)..(272): Homolog of NCBI NO: 15226027 NR Description: unknown protein
MLGLLPSDRFQVHIESLWEPLSKLLVSSMMTGYTLRNAEYRLFLEKNLDMSGGGLDSHASENTEYDMEGTFPDEDHVSSKRDSRTQNLSETIDEEGLGRVSSEAQEYILRLQSQLSSVKKELQEMRRKNAALQMQQFVGEEKNDLLDYLRSLQPEKVAELSEPAAPEVKETIHSVVHGLLATLSPKMHSKFPASEVPPTETVKAKSDEDCAELVENTSLQFQPLISLTRDYLARLLFWCMLLGHYLRGLEYRMELMEVLSLTCDANGSENVA

SEQ ID NO: 30595 - DNA, 843 bp, Arabidopsis thaliana
  misc_feature (1)..(843): Ceres Seq. ID no. 12338037
  misc_feature: MA Experiment ID: 108464 Result: Down-regulated in Transcription
  misc_feature: MA Experiment 108464 PARAMETER Experiment Name: At_Germinating_Seeds_cDNA_P Parameter: Age (day) Value: 4 vs. 0
  misc_feature: MA Experiment 108464 PARAMETER Experiment Name: At_Germinating_Seeds_cDNA_P Parameter: Tissue Value: Germinating Seeds
  misc_feature: MA Experiment ID: 108573 Result: Down-regulated in Transcription
  misc_feature: MA Experiment 108573 PARAMETER Experiment Name: At_Drought_cDNA_P Parameter: Timepoint (hr) Value: 6
  misc_feature: MA Experiment 108573 PARAMETER Experiment Name: At_Drought_cDNA_P Parameter: Tissue Value: Aerial
  misc_feature: MA Experiment 108573 PARAMETER Experiment Name: At_Drought_cDNA_P Parameter: Treatment Value: Drought vs. No Drought
  misc_feature: MA Experiment ID: 108585 Result: Down-regulated in Transcription
  misc_feature: MA Experiment 108585 PARAMETER Experiment Name: At_5mM_NaNP_cDNA_P Parameter: Timepoint (hr) Value: 6
  misc_feature: MA Experiment 108585 PARAMETER Experiment Name: At_5mM_NaNP_cDNA_P Parameter: Tissue Value: Aerial
  misc_feature: MA Experiment 108585 PARAMETER Experiment Name: At_5mM_NaNP_cDNA_P Parameter: Treatment Value: null
  misc_feature: MA Experiment ID: 108595 Result: Down-regulated in Transcription
  misc_feature: MA Experiment 108595 PARAMETER Experiment Name: At_Ler-pi_Ovule_cDNA_P Parameter: Plant Line Value: null
  misc_feature: MA Experiment ID: 20000180 Result: Up-regulated in Transcription
  misc_feature: MA Experiment 20000180 PARAMETER Experiment Name: At_Germinating_Seeds_P Parameter: Age (hr) Value: 24 vs. 0
  misc_feature: MA Experiment 20000180 PARAMETER Experiment Name: At_Germinating_Seeds_P Parameter: Tissue Value: Germinating Seeds
  misc_feature: MA Experiment ID: 20000437 Result: Down-regulated in Transcription
  misc_feature: MA Experiment 20000437 PARAMETER Experiment Name: At_Drought_P Parameter: Age (day) Value: 8
  misc_feature: MA Experiment 20000437 PARAMETER Experiment Name: At_Drought_P Parameter: Organism Value: A. thaliana
  misc_feature: MA Experiment 20000437 PARAMETER Experiment Name: At_Drought_P Parameter: Plant Line Value: WS
  misc_feature: MA Experiment 20000437 PARAMETER Experiment Name: At_Drought_P Parameter: Timepoint (hr) Value: 24
  misc_feature: MA Experiment 20000437 PARAMETER Experiment Name: At_Drought_P Parameter: Tissue Value: Whole Plant
  misc_feature: MA Experiment 20000437 PARAMETER Experiment Name: At_Drought_P Parameter: Treatment Value: Drought vs. No Drought
  misc_feature: MA Experiment ID: 20001557 Result: Up-regulated in Transcription
  misc_feature: MA Experiment 20001557 PARAMETER Experiment Name: At_Drought_Soil_Dry_P Parameter: Age (day) Value: 27
  misc_feature: MA Experiment 20001557 PARAMETER Experiment Name: At_Drought_Soil_Dry_P Parameter: Organism Value: A. thaliana
  misc_feature: MA Experiment 20001557 PARAMETER Experiment Name: At_Drought_Soil_Dry_P Parameter: Plant Line Value: WS
  misc_feature: MA Experiment 20001557 PARAMETER Experiment Name: At_Drought_Soil_Dry_P Parameter: Post Timepoint (hr) Value: 3
  misc_feature: MA Experiment 20001557 PARAMETER Experiment Name: At_Drought_Soil_Dry_P Parameter: Post-Treatment Value: Re-Water vs. No Drought
  misc_feature: MA Experiment 20001557 PARAMETER Experiment Name: At_Drought_Soil_Dry_P Parameter: Timepoint (day) Value: 13
  misc_feature: MA Experiment 20001557 PARAMETER Experiment Name: At_Drought_Soil_Dry_P Parameter: Treatment Value: Drought vs. No Drought
  misc_feature: MA Experiment ID: 20001558 Result: Up-regulated in Transcription
  misc_feature: MA Experiment 20001558 PARAMETER Experiment Name: At_Drought_Soil_Dry_P Parameter: Age (day) Value: 27
  misc_feature: MA Experiment 20001558 PARAMETER Experiment Name: At_Drought_Soil_Dry_P Parameter: Organism Value: A. thaliana
  misc_feature: MA Experiment 20001558 PARAMETER Experiment Name: At_Drought_Soil_Dry_P Parameter: Plant Line Value: WS
  misc_feature: MA Experiment 20001558 PARAMETER Experiment Name: At_Drought_Soil_Dry_P Parameter: Post Timepoint (hr) Value: 6
  misc_feature: MA Experiment 20001558 PARAMETER Experiment Name: At_Drought_Soil_Dry_P Parameter: Post-Treatment Value: Re-Water vs. No Drought
  misc_feature: MA Experiment 20001558 PARAMETER Experiment Name: At_Drought_Soil_Dry_P Parameter: Timepoint (day) Value: 13
  misc_feature: MA Experiment 20001558 PARAMETER Experiment Name: At_Drought_Soil_Dry_P Parameter: Treatment Value: Drought vs. No Drought
tgataatgaagatgaagatgatgatgacagcgaagaagatgaaagaccgactaagctgaagaattggcagcttaaaagattggcttatgcattgaaagctgggcgccgtaaaactagtattaaaaatctggcagctgaagtttgtcttgacagggcttatgttcttgaattgcttcgtgacccgcctccaaagctgctaatgctaagtgctacattaccagatgaaaaaccaccagtagcagcacctgagaactcctcacctgatccaagtcctgtggaatcatcatcagctgaagatgttgtggtcgaacctaaggaaaaagtaaaagatgaagcagtccatgtgatgcaacagagatggtctgctcagaaaagagtgaagaaagctcacattgaaacgctagagaaagtttacagaagatcaaaacgacccactaatgctgtggttagcagcattgttcaagtgaccaatcttccaaggaagcgagttttgaagtggtttgaagataaaagagcagaagacggagttccagataagcgagctccatatcaagctccggtttgatctaatattaacgttgagatgggcaatgattttgtatacttgattctcagaaactcatcaacattgtcgtcaaggacaatttgttttggtgatacgaggagtctttatattagtagattctgtccgaatccaatggtgtggctggatatgttagagtactactgtacttaagaaattttaggatatcttgtattcagtttttagttatttccttgctgagattgtgtcttgtagaaaaccgtttcaactttgtttggtttatggcggctataaagttt

SEQ ID NO: 30596 - protein, 187 aa, Arabidopsis thaliana
  peptide (1)..(187): Ceres Seq. ID no. 12338038
  misc_feature (6)..(184): Homolog of NCBI NO: 29367497 NR Description: unknown [Oryza sativa (japonica cultivar-group)]
  misc_feature (1)..(187): Homolog of NCBI NO: 30683552 NR Description: expressed protein [Arabidopsis thaliana]
  misc_feature (1)..(187): Homolog of NCBI NO: 8953389 NR Description: putative protein [Arabidopsis thaliana]
DNEDEDDDDSEEDERPTKLKNWQLKRLAYALKAGRRKTSIKNLAAEVCLDRAYVLELLRDPPPKLLMLSATLPDEKPPVAAPENSSPDPSPVESSSAEDVVVEPKEKVKDEAVHVMQQRWSAQKRVKKAHIETLEKVYRRSKRPTNAVVSSIVQVTNLPRKRVLKWFEDKRAEDGVPDKRAPYQAPV

SEQ ID NO: 30597 - protein, 121 aa, Arabidopsis thaliana
  peptide (1)..(121): Ceres Seq. ID no. 12338039
  misc_feature (1)..(118): Homolog of NCBI NO: 29367497 NR Description: unknown [Oryza sativa (japonica cultivar-group)]
  misc_feature (1)..(121): Homolog of NCBI NO: 30683552 NR Description: expressed protein [Arabidopsis thaliana]
  misc_feature (1)..(121): Homolog of NCBI NO: 8953389 NR Description: putative protein [Arabidopsis thaliana]
MLSATLPDEKPPVAAPENSSPDPSPVESSSAEDVVVEPKEKVKDEAVHVMQQRWSAQKRVKKAHIETLEKVYRRSKRPTNAVVSSIVQVTNLPRKRVLKWFEDKRAEDGVPDKRAPYQAPV

SEQ ID NO: 30598 - DNA, 1262 bp, Arabidopsis thaliana
  misc_feature (1)..(1262): Ceres Seq. ID no. 12395955
  misc_feature: MA Experiment ID: 108594 Result: Down-regulated in Transcription
  misc_feature: MA Experiment 108594 PARAMETER Experiment Name: At_Ler-rhl_Root_cDNA_P Parameter: Plant Line Value: null
  misc_feature: MA Experiment ID: 108595 Result: Down-regulated in Transcription
  misc_feature: MA Experiment 108595 PARAMETER Experiment Name: At_Ler-pi_Ovule_cDNA_P Parameter: Plant Line Value: null
  misc_feature: MA Experiment ID: 20000179 Result: Up-regulated in Transcription
  misc_feature: MA Experiment 20000179 PARAMETER Experiment Name: At_Germinating_Seeds_P Parameter: Age (hr) Value: 6 vs. 0
  misc_feature: MA Experiment 20000179 PARAMETER Experiment Name: At_Germinating_Seeds_P Parameter: Tissue Value: Germinating Seeds
  misc_feature: MA Experiment ID: 20000180 Result: Up-regulated in Transcription
  misc_feature: MA Experiment 20000180 PARAMETER Experiment Name: At_Germinating_Seeds_P Parameter: Age (hr) Value: 24 vs. 0
  misc_feature: MA Experiment 20000180 PARAMETER Experiment Name: At_Germinating_Seeds_P Parameter: Tissue Value: Germinating Seeds
  misc_feature: MA Experiment ID: 20000184 Result: Down-regulated in Transcription
  misc_feature: MA Experiment 20000184 PARAMETER Experiment Name: At_Shoots__P Parameter: Age (day) Value: 7
  misc_feature: MA Experiment 20000184 PARAMETER Experiment Name: At_Shoots__P Parameter: Tissue Value: Shoots vs. Whole Plant
  misc_feature: MA Experiment ID: 20000234 Result: Down-regulated in Transcription
  misc_feature: MA Experiment 20000234 PARAMETER Experiment Name: At_Siliques_P Parameter: Age (day) Value: 21
  misc_feature: MA Experiment 20000234 PARAMETER Experiment Name: At_Siliques_P Parameter: Organism Value: A. thaliana
  misc_feature: MA Experiment 20000234 PARAMETER Experiment Name: At_Siliques_P Parameter: Plant Line Value: WS
  misc_feature: MA Experiment 20000234 PARAMETER Experiment Name: At_Siliques_P Parameter: Tissue Value: Less Than 5mm Siliques vs. Whole Plant
  misc_feature: MA Experiment ID: 20000235 Result: Down-regulated in Transcription
  misc_feature: MA Experiment 20000235 PARAMETER Experiment Name: At_Siliques_P Parameter: Age (day) Value: 21
  misc_feature: MA Experiment 20000235 PARAMETER Experiment Name: At_Siliques_P Parameter: Organism Value: A. thaliana
  misc_feature: MA Experiment 20000235 PARAMETER Experiment Name: At_Siliques_P Parameter: Plant Line Value: WS
  misc_feature: MA Experiment 20000235 PARAMETER Experiment Name: At_Siliques_P Parameter: Tissue Value: 5-10mm Siliques vs. Whole Plant
  misc_feature: MA Experiment ID: 20000286 Result: Down-regulated in Transcription
  misc_feature: MA Experiment 20000286 PARAMETER Experiment Name: At_Open_Flower_P Parameter: Age (day) Value: 21
  misc_feature: MA Experiment 20000286 PARAMETER Experiment Name: At_Open_Flower_P Parameter: Plant Line Value: WS
  misc_feature: MA Experiment 20000286 PARAMETER Experiment Name: At_Open_Flower_P Parameter: Tissue Value: Half Open vs. Whole Plant
  misc_feature: MA Experiment ID: 20001451 Result: Down-regulated in Transcription
  misc_feature: MA Experiment 20001451 PARAMETER Experiment Name: At_Far-red-induction_P Parameter: Age (day) Value: 7
  misc_feature: MA Experiment 20001451 PARAMETER Experiment Name: At_Far-red-induction_P Parameter: Light Value: Far-red vs. White
  misc_feature: MA Experiment 20001451 PARAMETER Experiment Name: At_Far-red-induction_P Parameter: Organism Value: A. thaliana
  misc_feature: MA Experiment 20001451 PARAMETER Experiment Name: At_Far-red-induction_P Parameter: Plant Line Value: Columbia
  misc_feature: MA Experiment 20001451 PARAMETER Experiment Name: At_Far-red-induction_P Parameter: Timepoint (hr) Value: 24
  misc_feature: MA Experiment 20001451 PARAMETER Experiment Name: At_Far-red-induction_P Parameter: Tissue Value: Whole Plant
  misc_feature: MA Experiment ID: 20001557 Result: Down-regulated in Transcription
  misc_feature: MA Experiment 20001557 PARAMETER Experiment Name: At_Drought_Soil_Dry_P Parameter: Age (day) Value: 27
  misc_feature: MA Experiment 20001557 PARAMETER Experiment Name: At_Drought_Soil_Dry_P Parameter: Organism Value: A. thaliana
  misc_feature: MA Experiment 20001557 PARAMETER Experiment Name: At_Drought_Soil_Dry_P Parameter: Plant Line Value: WS
  misc_feature: MA Experiment 20001557 PARAMETER Experiment Name: At_Drought_Soil_Dry_P Parameter: Post Timepoint (hr) Value: 3
  misc_feature: MA Experiment 20001557 PARAMETER Experiment Name: At_Drought_Soil_Dry_P Parameter: Post-Treatment Value: Re-Water vs. No Drought
  misc_feature: MA Experiment 20001557 PARAMETER Experiment Name: At_Drought_Soil_Dry_P Parameter: Timepoint (day) Value: 13
  misc_feature: MA Experiment 20001557 PARAMETER Experiment Name: At_Drought_Soil_Dry_P Parameter: Treatment Value: Drought vs. No Drought
  misc_feature: MA Experiment ID: 20001558 Result: Down-regulated in Transcription
  misc_feature: MA Experiment 20001558 PARAMETER Experiment Name: At_Drought_Soil_Dry_P Parameter: Age (day) Value: 27
  misc_feature: MA Experiment 20001558 PARAMETER Experiment Name: At_Drought_Soil_Dry_P Parameter: Organism Value: A. thaliana
  misc_feature: MA Experiment 20001558 PARAMETER Experiment Name: At_Drought_Soil_Dry_P Parameter: Plant Line Value: WS
  misc_feature: MA Experiment 20001558 PARAMETER Experiment Name: At_Drought_Soil_Dry_P Parameter: Post Timepoint (hr) Value: 6
  misc_feature: MA Experiment 20001558 PARAMETER Experiment Name: At_Drought_Soil_Dry_P Parameter: Post-Treatment Value: Re-Water vs. No Drought
  misc_feature: MA Experiment 20001558 PARAMETER Experiment Name: At_Drought_Soil_Dry_P Parameter: Timepoint (day) Value: 13
  misc_feature: MA Experiment 20001558 PARAMETER Experiment Name: At_Drought_Soil_Dry_P Parameter: Treatment Value: Drought vs. No Drought
  misc_feature: MA Experiment ID: 20001560 Result: Down-regulated in Transcription
  misc_feature: MA Experiment 20001560 PARAMETER Experiment Name: At_Drought_Soil_Dry_P Parameter: Age (day) Value: 28
  misc_feature: MA Experiment 20001560 PARAMETER Experiment Name: At_Drought_Soil_Dry_P Parameter: Organism Value: A. thaliana
  misc_feature: MA Experiment 20001560 PARAMETER Experiment Name: At_Drought_Soil_Dry_P Parameter: Plant Line Value: WS
  misc_feature: MA Experiment 20001560 PARAMETER Experiment Name: At_Drought_Soil_Dry_P Parameter: Post Timepoint (hr) Value: None
  misc_feature: MA Experiment 20001560 PARAMETER Experiment Name: At_Drought_Soil_Dry_P Parameter: Post-Treatment Value: None
  misc_feature: MA Experiment 20001560 PARAMETER Experiment Name: At_Drought_Soil_Dry_P Parameter: Timepoint (day) Value: 14
  misc_feature: MA Experiment 20001560 PARAMETER Experiment Name: At_Drought_Soil_Dry_P Parameter: Treatment Value: Drought vs. No Drought
agattcagagataaggctcattaaaatcacctgcttcacccatcacgctaagatcgtggaatcttatatcactagactctcccagatcatgacacgtcatcatcttcatcatgagacccataattttttgaaactgttttatttcactccccaataatattttctgcttttagctctttttaaggctcttcaaaaatctccgtcaacgtcgagaacaaaatttggagaaatcgaacagacgatcgagatcgaggaaaatggcgtcgtggaattcgattccgctggagatctcgtacgaaatcgttggatggatcgcgtttgcttcgtggtcaattagcttttacccacagctgattttgaatttccgtaggagaagtgttgttggattgaacttcgacttcgtgatgttgaatttgacaaagcactcgtcgtatatgatctacaatgtctgcctctactttagtcctgttattcaaaagcagtactttgacacttatggcgataaagagatgatacctgtggctgcaaatgatgttgcattctcgatccatgcagttgtaatgacagctgttacactgttccagatctttatctatgaacgtggacctcaaaaagtatccagacttgctataggtattgtggttgttgtgtggggatttgcagctatctgtttcttcatagcattacctacacactcttggctatggctcatttcaatcttcaattcgattcaggtcttcatgacatgcgtcaagtacatcccacaggcaaagatgaacttcactaggaagagcacagtcgggtggagcatcgggaatattcttctcgattttactggaggacttgctaactatctgcaaatggttatacaatctattgaccaaaattcttggaagaatttctatgggaacatgggaaagactcttctctcacttatatcaatatttttcgacatcctcttcatgtttcaacactatgtgttatacccagagaagaaagtctcaaaatctccggaaactggtgaggaatcgaacgaaccactcattgattcttctcatgaacatgtttaaagatcagattctcaagagtcattagtttcagcgttcccactgtatatgtttatatcacaaaaaggtacaaatgtgagaactcttcagattgtcgtaatatcagtctaatgtatcaaatcaattatcacagaaacagcaaatgtataatacaatgttcgatcttgggttatattttaagaaacaagatgaaag

SEQ ID NO: 30599 - protein, 270 aa, Arabidopsis thaliana
  peptide (1)..(270): Ceres Seq. ID no. 12395956
  misc_feature (9)..(75): Pfam Name: PQ loop repeat Pfam Description: PQ loop repeat
  misc_feature (14)..(246): Homolog of NCBI NO: 34872731 NR Description: similar to cystinosin [Rattus norvegicus]
  misc_feature (150)..(270): Homolog of NCBI NO: 7497270 NR Description: hypothetical protein C41C4.7 - Caenorhabditis
  misc_feature (9)..(170): Homolog of NCBI NO: 7497270 NR Description: hypothetical protein C41C4.7 - Caenorhabditis
  misc_feature (6)..(246): Homolog of NCBI NO: 4826682 NR Description: cystinosis, nephropathic; Cystinosis [Homo
  misc_feature (9)..(254): Homolog of NCBI NO: 32565006 NR Description: Cystinosin/ERS1p repeat (42.2 kD) (2I426)
  misc_feature (9)..(270): Homolog of NCBI NO: 39587268 NR Description: Hypothetical protein CBG00747 [Caenorhabditis
  misc_feature (6)..(258): Homolog of NCBI NO: 23273064 NR Description: cystinosis, nephropathic [Homo sapiens]
  misc_feature (9)..(270): Homolog of NCBI NO: 17532373 NR Description: Cystinosis nephropathic (45.4 kD) [Caenorhabditis
  misc_feature (1)..(270): Homolog of NCBI NO: 21553944 NR Description: unknown [Arabidopsis thaliana]
  misc_feature (1)..(270): Homolog of NCBI NO: 15237468 NR Description: putative protein
MASWNSIPLEISYEIVGWIAFASWSISFYPQLILNFRRRSVVGLNFDFVMLNLTKHSSYMIYNVCLYFSPVIQKQYFDTYGDKEMIPVAANDVAFSIHAVVMTAVTLFQIFIYERGPQKVSRLAIGIVVVVWGFAAICFFIALPTHSWLWLISIFNSIQVFMTCVKYIPQAKMNFTRKSTVGWSIGNILLDFTGGLANYLQMVIQSIDQNSWKNFYGNMGKTLLSLISIFFDILFMFQHYVLYPEKKVSKSPETGEESNEPLIDSSHEHV

SEQ ID NO: 30600 - protein, 221 aa, Arabidopsis thaliana
  peptide (1)..(221): Ceres Seq. ID no. 12395957
  misc_feature (1)..(197): Homolog of NCBI NO: 34872731 NR Description: similar to cystinosin [Rattus norvegicus]
  misc_feature (101)..(221): Homolog of NCBI NO: 7497270 NR Description: hypothetical protein C41C4.7 - Caenorhabditis
  misc_feature (1)..(121): Homolog of NCBI NO: 7497270 NR Description: hypothetical protein C41C4.7 - Caenorhabditis
  misc_feature (1)..(197): Homolog of NCBI NO: 4826682 NR Description: cystinosis, nephropathic; Cystinosis [Homo
  misc_feature (1)..(205): Homolog of NCBI NO: 32565006 NR Description: Cystinosin/ERS1p repeat (42.2 kD) (2I426)
  misc_feature (1)..(221): Homolog of NCBI NO: 39587268 NR Description: Hypothetical protein CBG00747 [Caenorhabditis
  misc_feature (1)..(209): Homolog of NCBI NO: 23273064 NR Description: cystinosis, nephropathic [Homo sapiens]
  misc_feature (1)..(221): Homolog of NCBI NO: 17532373 NR Description: Cystinosis nephropathic (45.4 kD) [Caenorhabditis
  misc_feature (1)..(221): Homolog of NCBI NO: 21553944 NR Description: unknown [Arabidopsis thaliana]
  misc_feature (1)..(221): Homolog of NCBI NO: 15237468 NR Description: putative protein
MLNLTKHSSYMIYNVCLYFSPVIQKQYFDTYGDKEMIPVAANDVAFSIHAVVMTAVTLFQIFIYERGPQKVSRLAIGIVVVVWGFAAICFFIALPTHSWLWLISIFNSIQVFMTCVKYIPQAKMNFTRKSTVGWSIGNILLDFTGGLANYLQMVIQSIDQNSWKNFYGNMGKTLLSLISIFFDILFMFQHYVLYPEKKVSKSPETGEESNEPLIDSSHEHV

SEQ ID NO: 30601 - protein, 211 aa, Arabidopsis thaliana
  peptide (1)..(211): Ceres Seq. ID no. 12395958
  misc_feature (1)..(187): Homolog of NCBI NO: 34872731 NR Description: similar to cystinosin [Rattus norvegicus]
  misc_feature (91)..(211): Homolog of NCBI NO: 7497270 NR Description: hypothetical protein C41C4.7 - Caenorhabditis
  misc_feature (1)..(111): Homolog of NCBI NO: 7497270 NR Description: hypothetical protein C41C4.7 - Caenorhabditis
  misc_feature (1)..(187): Homolog of NCBI NO: 4826682 NR Description: cystinosis, nephropathic; Cystinosis [Homo
  misc_feature (1)..(195): Homolog of NCBI NO: 32565006 NR Description: Cystinosin/ERS1p repeat (42.2 kD) (2I426)
  misc_feature (1)..(211): Homolog of NCBI NO: 39587268 NR Description: Hypothetical protein CBG00747 [Caenorhabditis
  misc_feature (1)..(199): Homolog of NCBI NO: 23273064 NR Description: cystinosis, nephropathic [Homo sapiens]
  misc_feature (1)..(211): Homolog of NCBI NO: 17532373 NR Description: Cystinosis nephropathic (45.4 kD) [Caenorhabditis
  misc_feature (1)..(211): Homolog of NCBI NO: 21553944 NR Description: unknown [Arabidopsis thaliana]
  misc_feature (1)..(211): Homolog of NCBI NO: 15237468 NR Description: putative protein
MIYNVCLYFSPVIQKQYFDTYGDKEMIPVAANDVAFSIHAVVMTAVTLFQIFIYERGPQKVSRLAIGIVVVVWGFAAICFFIALPTHSWLWLISIFNSIQVFMTCVKYIPQAKMNFTRKSTVGWSIGNILLDFTGGLANYLQMVIQSIDQNSWKNFYGNMGKTLLSLISIFFDILFMFQHYVLYPEKKVSKSPETGEESNEPLIDSSHEHV

SEQ ID NO: 30602 - DNA, 756 bp, Arabidopsis thaliana
  misc_feature (1)..(756): Ceres Seq. ID no. 12562490
  misc_feature: MA Experiment ID: 108434 Result: Up-regulated in Transcription
  misc_feature: MA Experiment 108434 PARAMETER Experiment Name: At_Root_Tips_cDNA_P Parameter: Tissue Value: Root Tips
  misc_feature: MA Experiment ID: 108462 Result: Down-regulated in Transcription
  misc_feature: MA Experiment 108462 PARAMETER Experiment Name: At_Germinating_Seeds_cDNA_P Parameter: Age (day) Value: 2 vs. 0
  misc_feature: MA Experiment 108462 PARAMETER Experiment Name: At_Germinating_Seeds_cDNA_P Parameter: Tissue Value: Germinating Seeds
  misc_feature: MA Experiment ID: 108463 Result: Down-regulated in Transcription
  misc_feature: MA Experiment 108463 PARAMETER Experiment Name: At_Germinating_Seeds_cDNA_P Parameter: Age (day) Value: 3 vs. 0
  misc_feature: MA Experiment 108463 PARAMETER Experiment Name: At_Germinating_Seeds_cDNA_P Parameter: Tissue Value: Germinating Seeds
  misc_feature: MA Experiment ID: 108464 Result: Down-regulated in Transcription
  misc_feature: MA Experiment 108464 PARAMETER Experiment Name: At_Germinating_Seeds_cDNA_P Parameter: Age (day) Value: 4 vs. 0
  misc_feature: MA Experiment 108464 PARAMETER Experiment Name: At_Germinating_Seeds_cDNA_P Parameter: Tissue Value: Germinating Seeds
  misc_feature: MA Experiment ID: 108561 Result: Down-regulated in Transcription
  misc_feature: MA Experiment 108561 PARAMETER Experiment Name: At_100uM_ABA_cDNA_P Parameter: Timepoint (hr) Value: 6
  misc_feature: MA Experiment 108561 PARAMETER Experiment Name: At_100uM_ABA_cDNA_P Parameter: Tissue Value: Aerial
  misc_feature: MA Experiment 108561 PARAMETER Experiment Name: At_100uM_ABA_cDNA_P Parameter: Treatment Value: 100uM ABA vs. No Treatment
  misc_feature: MA Experiment ID: 108573 Result: Down-regulated in Transcription
  misc_feature: MA Experiment 108573 PARAMETER Experiment Name: At_Drought_cDNA_P Parameter: Timepoint (hr) Value: 6
  misc_feature: MA Experiment 108573 PARAMETER Experiment Name: At_Drought_cDNA_P Parameter: Tissue Value: Aerial
  misc_feature: MA Experiment 108573 PARAMETER Experiment Name: At_Drought_cDNA_P Parameter: Treatment Value: Drought vs. No Drought
  misc_feature: MA Experiment ID: 108576 Result: Down-regulated in Transcription
  misc_feature: MA Experiment 108576 PARAMETER Experiment Name: At_42deg_Heat_cDNA_P Parameter: Temperature (deg C) Value: 42 vs. 22
  misc_feature: MA Experiment 108576 PARAMETER Experiment Name: At_42deg_Heat_cDNA_P Parameter: Timepoint (hr) Value: 1
  misc_feature: MA Experiment 108576 PARAMETER Experiment Name: At_42deg_Heat_cDNA_P Parameter: Tissue Value: Aerial
  misc_feature: MA Experiment ID: 108577 Result: Down-regulated in Transcription
  misc_feature: MA Experiment 108577 PARAMETER Experiment Name: At_42deg_Heat_cDNA_P Parameter: Temperature (deg C) Value: 42 vs. 22
  misc_feature: MA Experiment 108577 PARAMETER Experiment Name: At_42deg_Heat_cDNA_P Parameter: Timepoint (hr) Value: 6
  misc_feature: MA Experiment 108577 PARAMETER Experiment Name: At_42deg_Heat_cDNA_P Parameter: Tissue Value: Aerial
  misc_feature: MA Experiment ID: 108579 Result: Up-regulated in Transcription
  misc_feature: MA Experiment 108579 PARAMETER Experiment Name: At_4deg_Cold_cDNA_P Parameter: Temperature (deg C) Value: 4 vs. 22
  misc_feature: MA Experiment 108579 PARAMETER Experiment Name: At_4deg_Cold_cDNA_P Parameter: Timepoint (hr) Value: 6
  misc_feature: MA Experiment 108579 PARAMETER Experiment Name: At_4deg_Cold_cDNA_P Parameter: Tissue Value: Aerial
  misc_feature: MA Experiment ID: 108585 Result: Down-regulated in Transcription
  misc_feature: MA Experiment 108585 PARAMETER Experiment Name: At_5mM_NaNP_cDNA_P Parameter: Timepoint (hr) Value: 6
  misc_feature: MA Experiment 108585 PARAMETER Experiment Name: At_5mM_NaNP_cDNA_P Parameter: Tissue Value: Aerial
  misc_feature: MA Experiment 108585 PARAMETER Experiment Name: At_5mM_NaNP_cDNA_P Parameter: Treatment Value: null
  misc_feature: MA Experiment ID: 108595 Result: Down-regulated in Transcription
  misc_feature: MA Experiment 108595 PARAMETER Experiment Name: At_Ler-pi_Ovule_cDNA_P Parameter: Plant Line Value: null
  misc_feature: MA Experiment ID: 108609 Result: Down-regulated in Transcription
  misc_feature: MA Experiment 108609 PARAMETER Experiment Name: At_100uM_ABA_cDNA_P Parameter: Timepoint (hr) Value: 24
  misc_feature: MA Experiment 108609 PARAMETER Experiment Name: At_100uM_ABA_cDNA_P Parameter: Tissue Value: Aerial
  misc_feature: MA Experiment 108609 PARAMETER Experiment Name: At_100uM_ABA_cDNA_P Parameter: Treatment Value: 100uM ABA vs. No Treatment
  misc_feature: MA Experiment ID: 20000069 Result: Down-regulated in Transcription
  misc_feature: MA Experiment 20000069 PARAMETER Experiment Name: At_100uM_ABA_Mutants_cDNA_P Parameter: Plant Line Value: CS23
  misc_feature: MA Experiment 20000069 PARAMETER Experiment Name: At_100uM_ABA_Mutants_cDNA_P Parameter: Timepoint (hr) Value: 6
  misc_feature: MA Experiment 20000069 PARAMETER Experiment Name: At_100uM_ABA_Mutants_cDNA_P Parameter: Tissue Value: Aerial
  misc_feature: MA Experiment 20000069 PARAMETER Experiment Name: At_100uM_ABA_Mutants_cDNA_P Parameter: Treatment Value: 100uM ABA vs. No Treatment
  misc_feature: MA Experiment ID: 20000070 Result: Down-regulated in Transcription
  misc_feature: MA Experiment 20000070 PARAMETER Experiment Name: At_100uM_ABA_Mutants_cDNA_P Parameter: Plant Line Value: CS24
  misc_feature: MA Experiment 20000070 PARAMETER Experiment Name: At_100uM_ABA_Mutants_cDNA_P Parameter: Timepoint (hr) Value: 6
  misc_feature: MA Experiment 20000070 PARAMETER Experiment Name: At_100uM_ABA_Mutants_cDNA_P Parameter: Tissue Value: Aerial
  misc_feature: MA Experiment 20000070 PARAMETER Experiment Name: At_100uM_ABA_Mutants_cDNA_P Parameter: Treatment Value: 100uM ABA vs. No Treatment
  misc_feature: MA Experiment ID: 20000071 Result: Down-regulated in Transcription
  misc_feature: MA Experiment 20000071 PARAMETER Experiment Name: At_100uM_ABA_Mutants_cDNA_P Parameter: Plant Line Value: CS8104
  misc_feature: MA Experiment 20000071 PARAMETER Experiment Name: At_100uM_ABA_Mutants_cDNA_P Parameter: Timepoint (hr) Value: 6
  misc_feature: MA Experiment 20000071 PARAMETER Experiment Name: At_100uM_ABA_Mutants_cDNA_P Parameter: Tissue Value: Aerial
  misc_feature: MA Experiment 20000071 PARAMETER Experiment Name: At_100uM_ABA_Mutants_cDNA_P Parameter: Treatment Value: 100uM ABA vs. No Treatment
  misc_feature: MA Experiment ID: 20000087 Result: Down-regulated in Transcription
  misc_feature: MA Experiment 20000087 PARAMETER Experiment Name: At_100uM_ABA_Mutants_cDNA_P Parameter: Plant Line Value: WS
  misc_feature: MA Experiment 20000087 PARAMETER Experiment Name: At_100uM_ABA_Mutants_cDNA_P Parameter: Timepoint (hr) Value: 6
  misc_feature: MA Experiment 20000087 PARAMETER Experiment Name: At_100uM_ABA_Mutants_cDNA_P Parameter: Tissue Value: Aerial
  misc_feature: MA Experiment 20000087 PARAMETER Experiment Name: At_100uM_ABA_Mutants_cDNA_P Parameter: Treatment Value: 100uM ABA vs. No Treatment
  misc_feature: MA Experiment ID: 20000090 Result: Up-regulated in Transcription
  misc_feature: MA Experiment ID: 20000112 Result: Down-regulated in Transcription
  misc_feature: MA Experiment 20000112 PARAMETER Experiment Name: At_42deg_Heat_cDNA_P Parameter: Temperature (deg C) Value: 42 vs. 22
  misc_feature: MA Experiment 20000112 PARAMETER Experiment Name: At_42deg_Heat_cDNA_P Parameter: Timepoint (hr) Value: 2
  misc_feature: MA Experiment 20000112 PARAMETER Experiment Name: At_42deg_Heat_cDNA_P Parameter: Tissue Value: Aerial
  misc_feature: MA Experiment ID: 20000113 Result: Down-regulated in Transcription
  misc_feature: MA Experiment 20000113 PARAMETER Experiment Name: At_42deg_Heat_cDNA_P Parameter: Temperature (deg C) Value: 42 vs. 22
  misc_feature: MA Experiment 20000113 PARAMETER Experiment Name: At_42deg_Heat_cDNA_P Parameter: Timepoint (hr) Value: 8
  misc_feature: MA Experiment 20000113 PARAMETER Experiment Name: At_42deg_Heat_cDNA_P Parameter: Tissue Value: Aerial
  misc_feature: MA Experiment ID: 20000117 Result: Down-regulated in Transcription
  misc_feature: MA Experiment 20000117 PARAMETER Experiment Name: At_100uM_ABA_Mutants_cDNA_P Parameter: Plant Line Value: Columbia
  misc_feature: MA Experiment 20000117 PARAMETER Experiment Name: At_100uM_ABA_Mutants_cDNA_P Parameter: Timepoint (hr) Value: 6
  misc_feature: MA Experiment 20000117 PARAMETER Experiment Name: At_100uM_ABA_Mutants_cDNA_P Parameter: Tissue Value: Aerial
  misc_feature: MA Experiment 20000117 PARAMETER Experiment Name: At_100uM_ABA_Mutants_cDNA_P Parameter: Treatment Value: 100uM ABA vs. No Treatment
  misc_feature: MA Experiment ID: 20000144 Result: Down-regulated in Transcription
  misc_feature: MA Experiment 20000144 PARAMETER Experiment Name: At_42deg_Heat_cDNA_P Parameter: Temperature (deg C) Value: 42 vs. 22
  misc_feature: MA Experiment 20000144 PARAMETER Experiment Name: At_42deg_Heat_cDNA_P Parameter: Timepoint (hr) Value: 1
  misc_feature: MA Experiment 20000144 PARAMETER Experiment Name: At_42deg_Heat_cDNA_P Parameter: Tissue Value: Aerial
  misc_feature: MA Experiment ID: 20001560 Result: Up-regulated in Transcription
  misc_feature: MA Experiment 20001560 PARAMETER Experiment Name: At_Drought_Soil_Dry_P Parameter: Age (day) Value: 28
  misc_feature: MA Experiment 20001560 PARAMETER Experiment Name: At_Drought_Soil_Dry_P Parameter: Organism Value: A. thaliana
  misc_feature: MA Experiment 20001560 PARAMETER Experiment Name: At_Drought_Soil_Dry_P Parameter: Plant Line Value: WS
  misc_feature: MA Experiment 20001560 PARAMETER Experiment Name: At_Drought_Soil_Dry_P Parameter: Post Timepoint (hr) Value: None
  misc_feature: MA Experiment 20001560 PARAMETER Experiment Name: At_Drought_Soil_Dry_P Parameter: Post-Treatment Value: None
  misc_feature: MA Experiment 20001560 PARAMETER Experiment Name: At_Drought_Soil_Dry_P Parameter: Timepoint (day) Value: 14
  misc_feature: MA Experiment 20001560 PARAMETER Experiment Name: At_Drought_Soil_Dry_P Parameter: Treatment Value: Drought vs. No Drought
aatcacaacaacaacaattcgacctcaattgaaattagggtttctctgcaactccacaaacatacgcctaacaaaacttcgcttcccaatttcaacaatggcttgcgtaaacgaaccatcacctaaactccaaaagctcgaccgaaacggaatccatggcgattcatcaccatcaccattcttcaaagtgaagaaactctccgagaaagctgttataccaacacgcggctcaccactctccgctggatacgatctctcaagtgcggtggattcaaaagttccagcgagaggtaaagcgcttatcccaacggatctaagtatcgctgttcccgaaggaacttacgcgagaattgcgccgagatctggtttggcttggaaacattcgattgatgttggtgctggtgtgattgatgctgattatagaggacctgttggtgtgattttgtttaatcattctgatgctgattttgaggttaagttcggtgatcgaatcgcgcagttgattatcgagaagattgtgactcctgatgttgttgaggttgatgatttggatgagactgttcgtggtgatggtggttttggttctactggtgtctaagtgataatcatcttcttcgtttatgaatgtgttttggttttttaatttcgtcgaacagtttgtgggcattattattgtactacctctttgcttcatctttagacaattcaaacaaatttcaccaaacaaactctcacttttttttttttttgggctac

SEQ ID NO: 30603 - protein, 198 aa, Arabidopsis thaliana
  peptide (1)..(198): Ceres Seq. ID no. 12562491
  misc_feature (68)..(197): Pfam Name: dUTPase Pfam Description: dUTPase
  misc_feature (62)..(197): Homolog of NCBI NO: 1169437 NR Description: Deoxyuridine 5'-triphosphate nucleotidohydrolase
  misc_feature (65)..(198): Homolog of NCBI NO: 38047903 NR Description: similar to Drosophila melanogaster BcDNA:LD08534
  misc_feature (65)..(198): Homolog of NCBI NO: 24583610 NR Description: CG4584-PB [Drosophila melanogaster]
  misc_feature (65)..(198): Homolog of NCBI NO: 19921126 NR Description: CG4584-PA [Drosophila melanogaster]
  misc_feature (55)..(197): Homolog of NCBI NO: 40746988 NR Description: hypothetical protein AN0271.2 [Aspergillus
  misc_feature (61)..(198): Homolog of NCBI NO: 19114785 NR Description: deoxyuridine 5'-triphosphate nucleotidohydrolase
  misc_feature (54)..(198): Homolog of NCBI NO: 38566986 NR Description: probable dUTP pyrophosphatase [Neurospora crassa]
  misc_feature (52)..(198): Homolog of NCBI NO: 31126720 NR Description: putative deoxyuridine triphosphatase
  misc_feature (36)..(198): Homolog of NCBI NO: 416922 NR Description: Deoxyuridine 5'-triphosphate nucleotidohydrolase
  misc_feature (33)..(198): Homolog of NCBI NO: 15232681 NR Description: dUTP pyrophosphatase-like protein
ITTTTIRPQLKLGFLCNSTNIRLTKLRFPISTMACVNEPSPKLQKLDRNGIHGDSSPSPFFKVKKLSEKAVIPTRGSPLSAGYDLSSAVDSKVPARGKALIPTDLSIAVPEGTYARIAPRSGLAWKHSIDVGAGVIDADYRGPVGVILFNHSDADFEVKFGDRIAQLIIEKIVTPDVVEVDDLDETVRGDGGFGSTGV

SEQ ID NO: 30604 - protein, 166 aa, Arabidopsis thaliana
  peptide (1)..(166): Ceres Seq. ID no. 12562492
  misc_feature (36)..(165): Pfam Name: dUTPase Pfam Description: dUTPase
  misc_feature (30)..(165): Homolog of NCBI NO: 1169437 NR Description: Deoxyuridine 5'-triphosphate nucleotidohydrolase
  misc_feature (33)..(166): Homolog of NCBI NO: 38047903 NR Description: similar to Drosophila melanogaster BcDNA:LD08534
  misc_feature (33)..(166): Homolog of NCBI NO: 24583610 NR Description: CG4584-PB [Drosophila melanogaster]
  misc_feature (33)..(166): Homolog of NCBI NO: 19921126 NR Description: CG4584-PA [Drosophila melanogaster]
  misc_feature (23)..(165): Homolog of NCBI NO: 40746988 NR Description: hypothetical protein AN0271.2 [Aspergillus
  misc_feature (29)..(166): Homolog of NCBI NO: 19114785 NR Description: deoxyuridine 5'-triphosphate nucleotidohydrolase
  misc_feature (22)..(166): Homolog of NCBI NO: 38566986 NR Description: probable dUTP pyrophosphatase [Neurospora crassa]
  misc_feature (20)..(166): Homolog of NCBI NO: 31126720 NR Description: putative deoxyuridine triphosphatase
  misc_feature (4)..(166): Homolog of NCBI NO: 416922 NR Description: Deoxyuridine 5'-triphosphate nucleotidohydrolase
  misc_feature (1)..(166): Homolog of NCBI NO: 15232681 NR Description: dUTP pyrophosphatase-like protein
MACVNEPSPKLQKLDRNGIHGDSSPSPFFKVKKLSEKAVIPTRGSPLSAGYDLSSAVDSKVPARGKALIPTDLSIAVPEGTYARIAPRSGLAWKHSIDVGAGVIDADYRGPVGVILFNHSDADFEVKFGDRIAQLIIEKIVTPDVVEVDDLDETVRGDGGFGSTGV

SEQ ID NO: 30605 - DNA, 1086 bp, Arabidopsis thaliana
  misc_feature (1)..(1086): Ceres Seq. ID no. 12333091
  misc_feature: MA Experiment ID: 108434 Result: Up-regulated in Transcription
  misc_feature: MA Experiment 108434 PARAMETER Experiment Name: At_Root_Tips_cDNA_P Parameter: Tissue Value: Root Tips
  misc_feature: MA Experiment ID: 108461 Result: Up-regulated in Transcription
  misc_feature: MA Experiment 108461 PARAMETER Experiment Name: At_Germinating_Seeds_cDNA_P Parameter: Age (day) Value: 1 vs. 0
  misc_feature: MA Experiment 108461 PARAMETER Experiment Name: At_Germinating_Seeds_cDNA_P Parameter: Tissue Value: Germinating Seeds
  misc_feature: MA Experiment ID: 108489 Result: Down-regulated in Transcription
  misc_feature: MA Experiment ID: 20000179 Result: Up-regulated in Transcription
  misc_feature: MA Experiment 20000179 PARAMETER Experiment Name: At_Germinating_Seeds_P Parameter: Age (hr) Value: 6 vs. 0
  misc_feature: MA Experiment 20000179 PARAMETER Experiment Name: At_Germinating_Seeds_P Parameter: Tissue Value: Germinating Seeds
  misc_feature: MA Experiment ID: 20000180 Result: Up-regulated in Transcription
  misc_feature: MA Experiment 20000180 PARAMETER Experiment Name: At_Germinating_Seeds_P Parameter: Age (hr) Value: 24 vs. 0
  misc_feature: MA Experiment 20000180 PARAMETER Experiment Name: At_Germinating_Seeds_P Parameter: Tissue Value: Germinating Seeds
  misc_feature: MA Experiment ID: 20000184 Result: Down-regulated in Transcription
  misc_feature: MA Experiment 20000184 PARAMETER Experiment Name: At_Shoots__P Parameter: Age (day) Value: 7
  misc_feature: MA Experiment 20000184 PARAMETER Experiment Name: At_Shoots__P Parameter: Tissue Value: Shoots vs. Whole Plant
  misc_feature: MA Experiment ID: 20000227 Result: Up-regulated in Transcription
  misc_feature: MA Experiment 20000227 PARAMETER Experiment Name: At_Root-Tips-vs-Tops_P Parameter: Tissue Value: Root Tips vs. Root Tops
  misc_feature: MA Experiment ID: 20000495 Result: Up-regulated in Transcription
  misc_feature: MA Experiment 20000495 PARAMETER Experiment Name: At_Guard_Cells_P Parameter: Harvest Date Value: 8/2/2002
  misc_feature: MA Experiment 20000495 PARAMETER Experiment Name: At_Guard_Cells_P Parameter: Organism Value: A. thaliana
  misc_feature: MA Experiment 20000495 PARAMETER Experiment Name: At_Guard_Cells_P Parameter: Tissue Value: Guard Cells vs. Leaves
  misc_feature: MA Experiment ID: 20000709 Result: Down-regulated in Transcription
  misc_feature: MA Experiment 20000709 PARAMETER Experiment Name: At_15mM_NH4NO3_L-to-H_P Parameter: Age (hr) Value: 14
  misc_feature: MA Experiment 20000709 PARAMETER Experiment Name: At_15mM_NH4NO3_L-to-H_P Parameter: Organism Value: A. thaliana
  misc_feature: MA Experiment 20000709 PARAMETER Experiment Name: At_15mM_NH4NO3_L-to-H_P Parameter: Plant Line Value: WS
  misc_feature: MA Experiment 20000709 PARAMETER Experiment Name: At_15mM_NH4NO3_L-to-H_P Parameter: Timepoint (hr) Value: 4
  misc_feature: MA Experiment 20000709 PARAMETER Experiment Name: At_15mM_NH4NO3_L-to-H_P Parameter: Tissue Value: Aerial
  misc_feature: MA Experiment 20000709 PARAMETER Experiment Name: At_15mM_NH4NO3_L-to-H_P Parameter: Treatment Value: 15mM NH4NO3 vs. 30mM Mannitol
  misc_feature: MA Experiment ID: 20001557 Result: Down-regulated in Transcription
  misc_feature: MA Experiment 20001557 PARAMETER Experiment Name: At_Drought_Soil_Dry_P Parameter: Age (day) Value: 27
  misc_feature: MA Experiment 20001557 PARAMETER Experiment Name: At_Drought_Soil_Dry_P Parameter: Organism Value: A. thaliana
  misc_feature: MA Experiment 20001557 PARAMETER Experiment Name: At_Drought_Soil_Dry_P Parameter: Plant Line Value: WS
  misc_feature: MA Experiment 20001557 PARAMETER Experiment Name: At_Drought_Soil_Dry_P Parameter: Post Timepoint (hr) Value: 3
  misc_feature: MA Experiment 20001557 PARAMETER Experiment Name: At_Drought_Soil_Dry_P Parameter: Post-Treatment Value: Re-Water vs. No Drought
  misc_feature: MA Experiment 20001557 PARAMETER Experiment Name: At_Drought_Soil_Dry_P Parameter: Timepoint (day) Value: 13
  misc_feature: MA Experiment 20001557 PARAMETER Experiment Name: At_Drought_Soil_Dry_P Parameter: Treatment Value: Drought vs. No Drought
  misc_feature: MA Experiment ID: 20001558 Result: Down-regulated in Transcription
  misc_feature: MA Experiment 20001558 PARAMETER Experiment Name: At_Drought_Soil_Dry_P Parameter: Age (day) Value: 27
  misc_feature: MA Experiment 20001558 PARAMETER Experiment Name: At_Drought_Soil_Dry_P Parameter: Organism Value: A. thaliana
  misc_feature: MA Experiment 20001558 PARAMETER Experiment Name: At_Drought_Soil_Dry_P Parameter: Plant Line Value: WS
  misc_feature: MA Experiment 20001558 PARAMETER Experiment Name: At_Drought_Soil_Dry_P Parameter: Post Timepoint (hr) Value: 6
  misc_feature: MA Experiment 20001558 PARAMETER Experiment Name: At_Drought_Soil_Dry_P Parameter: Post-Treatment Value: Re-Water vs. No Drought
  misc_feature: MA Experiment 20001558 PARAMETER Experiment Name: At_Drought_Soil_Dry_P Parameter: Timepoint (day) Value: 13
  misc_feature: MA Experiment 20001558 PARAMETER Experiment Name: At_Drought_Soil_Dry_P Parameter: Treatment Value: Drought vs. No Drought
  misc_feature: MA Experiment ID: 20001905 Result: Down-regulated in Transcription
  misc_feature: MA Experiment 20001905 PARAMETER Experiment Name: At_Drought_Reproduction_P Parameter: Age (day) Value: 40
  misc_feature: MA Experiment 20001905 PARAMETER Experiment Name: At_Drought_Reproduction_P Parameter: Organism Value: A. thaliana
  misc_feature: MA Experiment 20001905 PARAMETER Experiment Name: At_Drought_Reproduction_P Parameter: Plant Line Value: WS
  misc_feature: MA Experiment 20001905 PARAMETER Experiment Name: At_Drought_Reproduction_P Parameter: Timepoint (day) Value: 10
  misc_feature: MA Experiment 20001905 PARAMETER Experiment Name: At_Drought_Reproduction_P Parameter: Tissue Value: Rosettes
  misc_feature: MA Experiment 20001905 PARAMETER Experiment Name: At_Drought_Reproduction_P Parameter: Treatment Value: Drought vs. No Drought
acattaaaaactgtgcttaatgatcccagaatcccagtagtagctctactcaaagtcaacacagctaccggaagaagattcgagtctctcggaaatggcatcacacgaccaccatcatcatcatcacgatcatgagcatgaccacgagaaatcagacggcggagaagggaaggcgtcgtgggtggggaaggacgggaaggtgtaccatagccacgatggactcgcacctcactcacacgaacccatctactctcctggctacttcagtcgccgagctcctccgcttcacgaccgtaacttctctgagagagcttttaccgtcggtattggcggtcccgttggcactgggaaaacggcattgatgcttgctctttgtagattcttgagggacaaatatagtcttgctgctgtgacaaatgatatattcacgaaagaggatggtgagtttctggtgaagaatggggctcttcctgaggaaaggattagagctgttgaaacaggtggatgtccacacgctgctatccgtgaagatatcagtatcaatttgggtcctcttgaggagttatctaacttattcaaggctgatttgcttctttgtgaatccggtggagataatttagctgctaatttcagtagagaactagctgactatatcatctacatcatcgatgtatcggctggtgataaaataccccgtaaaggcggccctggaatcactcaagctgatcttctggtgataaacaagactgaccttgcagcagctgttggggctgacttatcggtcatggaaagggattcactacgcatgcgtgatggagggccatttgtctttgctcaggtgaagcatgggcttggagtcgaggaaatcgtgaaccatgtcatgcactcatgggaacatgcgaccgggaagaagcgccagtgatgatggggttcttaagacccaaaatggataagatatgaaactgaatggaactctttcaatacttatcttgaactcaatttatgcgcaaaagtctatgtaatctgtttgttgtactcaagacataagagaaataaaaggtttgagcatgagactcattacattct

SEQ ID NO: 30606 - protein, 275 aa, Arabidopsis thaliana
  peptide (1)..(275): Ceres Seq. ID no. 12333092
  misc_feature (63)..(199): Pfam Name: HypB/UreG nucleotide-binding domain Pfam Description: HypB/UreG nucleotide-binding domain
  misc_feature (4)..(275): Homolog of NCBI NO: 13161904 NR Description: urease accessory protein G [Solanum tuberosum]
  misc_feature (1)..(275): Homolog of NCBI NO: 13161908 NR Description: urease accessory protein G [Solanum tuberosum]
  misc_feature (1)..(275): Homolog of NCBI NO: 13161910 NR Description: urease accessory protein G [Solanum tuberosum]
  misc_feature (1)..(275): Homolog of NCBI NO: 13161906 NR Description: urease accessory protein G [Solanum tuberosum]
  misc_feature (4)..(275): Homolog of NCBI NO: 13161912 NR Description: urease accessory protein G [Solanum tuberosum]
  misc_feature (1)..(275): Homolog of NCBI NO: 25313831 NR Description: urease accessory protein UREG [imported] -
  misc_feature (1)..(275): Homolog of NCBI NO: 15226754 NR Description: putative urease accessory protein
MASHDHHHHHHDHEHDHEKSDGGEGKASWVGKDGKVYHSHDGLAPHSHEPIYSPGYFSRRAPPLHDRNFSERAFTVGIGGPVGTGKTALMLALCRFLRDKYSLAAVTNDIFTKEDGEFLVKNGALPEERIRAVETGGCPHAAIREDISINLGPLEELSNLFKADLLLCESGGDNLAANFSRELADYIIYIIDVSAGDKIPRKGGPGITQADLLVINKTDLAAAVGADLSVMERDSLRMRDGGPFVFAQVKHGLGVEEIVNHVMHSWEHATGKKRQ

SEQ ID NO: 30607 - protein, 186 aa, Arabidopsis thaliana
  peptide (1)..(186): Ceres Seq. ID no. 12333093
  misc_feature (1)..(110): Pfam Name: HypB/UreG nucleotide-binding domain Pfam Description: HypB/UreG nucleotide-binding domain
  misc_feature (1)..(186): Homolog of NCBI NO: 13161904 NR Description: urease accessory protein G [Solanum tuberosum]
  misc_feature (1)..(186): Homolog of NCBI NO: 13161908 NR Description: urease accessory protein G [Solanum tuberosum]
  misc_feature (1)..(186): Homolog of NCBI NO: 13161910 NR Description: urease accessory protein G [Solanum tuberosum]
  misc_feature (1)..(186): Homolog of NCBI NO: 13161906 NR Description: urease accessory protein G [Solanum tuberosum]
  misc_feature (1)..(186): Homolog of NCBI NO: 13161912 NR Description: urease accessory protein G [Solanum tuberosum]
  misc_feature (1)..(186): Homolog of NCBI NO: 25313831 NR Description: urease accessory protein UREG [imported] -
  misc_feature (1)..(186): Homolog of NCBI NO: 15226754 NR Description: putative urease accessory protein
MLALCRFLRDKYSLAAVTNDIFTKEDGEFLVKNGALPEERIRAVETGGCPHAAIREDISINLGPLEELSNLFKADLLLCESGGDNLAANFSRELADYIIYIIDVSAGDKIPRKGGPGITQADLLVINKTDLAAAVGADLSVMERDSLRMRDGGPFVFAQVKHGLGVEEIVNHVMHSWEHATGKKRQ

SEQ ID NO: 30608 - DNA, 657 bp, Arabidopsis thaliana
  misc_feature (1)..(657): Ceres Seq. ID no. 13504784
  misc_feature: MA Experiment ID: 20000173 Result: Down-regulated in Transcription
  misc_feature: MA Experiment 20000173 PARAMETER Experiment Name: At_42deg_Heat_P Parameter: Age (day) Value: 14
  misc_feature: MA Experiment 20000173 PARAMETER Experiment Name: At_42deg_Heat_P Parameter: Organism Value: A. thaliana
  misc_feature: MA Experiment 20000173 PARAMETER Experiment Name: At_42deg_Heat_P Parameter: Plant Line Value: WS
  misc_feature: MA Experiment 20000173 PARAMETER Experiment Name: At_42deg_Heat_P Parameter: Temperature (deg C) Value: 42 vs. 22
  misc_feature: MA Experiment 20000173 PARAMETER Experiment Name: At_42deg_Heat_P Parameter: Timepoint (hr) Value: 6
  misc_feature: MA Experiment 20000173 PARAMETER Experiment Name: At_42deg_Heat_P Parameter: Tissue Value: Aerial
  misc_feature: MA Experiment ID: 20000184 Result: Up-regulated in Transcription
  misc_feature: MA Experiment 20000184 PARAMETER Experiment Name: At_Shoots__P Parameter: Age (day) Value: 7
  misc_feature: MA Experiment 20000184 PARAMETER Experiment Name: At_Shoots__P Parameter: Tissue Value: Shoots vs. Whole Plant
  misc_feature: MA Experiment ID: 20000227 Result: Down-regulated in Transcription
  misc_feature: MA Experiment 20000227 PARAMETER Experiment Name: At_Root-Tips-vs-Tops_P Parameter: Tissue Value: Root Tips vs. Root Tops
  misc_feature: MA Experiment ID: 20000234 Result: Up-regulated in Transcription
  misc_feature: MA Experiment 20000234 PARAMETER Experiment Name: At_Siliques_P Parameter: Age (day) Value: 21
  misc_feature: MA Experiment 20000234 PARAMETER Experiment Name: At_Siliques_P Parameter: Organism Value: A. thaliana
  misc_feature: MA Experiment 20000234 PARAMETER Experiment Name: At_Siliques_P Parameter: Plant Line Value: WS
  misc_feature: MA Experiment 20000234 PARAMETER Experiment Name: At_Siliques_P Parameter: Tissue Value: Less Than 5mm Siliques vs. Whole Plant
  misc_feature: MA Experiment ID: 20000436 Result: Down-regulated in Transcription
  misc_feature: MA Experiment 20000436 PARAMETER Experiment Name: At_Drought_P Parameter: Age (day) Value: 7
  misc_feature: MA Experiment 20000436 PARAMETER Experiment Name: At_Drought_P Parameter: Organism Value: A. thaliana
  misc_feature: MA Experiment 20000436 PARAMETER Experiment Name: At_Drought_P Parameter: Plant Line Value: WS
  misc_feature: MA Experiment 20000436 PARAMETER Experiment Name: At_Drought_P Parameter: Timepoint (hr) Value: 12
  misc_feature: MA Experiment 20000436 PARAMETER Experiment Name: At_Drought_P Parameter: Tissue Value: Whole Plant
  misc_feature: MA Experiment 20000436 PARAMETER Experiment Name: At_Drought_P Parameter: Treatment Value: Drought vs. No Drought
  misc_feature: MA Experiment ID: 20000437 Result: Down-regulated in Transcription
  misc_feature: MA Experiment 20000437 PARAMETER Experiment Name: At_Drought_P Parameter: Age (day) Value: 8
  misc_feature: MA Experiment 20000437 PARAMETER Experiment Name: At_Drought_P Parameter: Organism Value: A. thaliana
  misc_feature: MA Experiment 20000437 PARAMETER Experiment Name: At_Drought_P Parameter: Plant Line Value: WS
  misc_feature: MA Experiment 20000437 PARAMETER Experiment Name: At_Drought_P Parameter: Timepoint (hr) Value: 24
  misc_feature: MA Experiment 20000437 PARAMETER Experiment Name: At_Drought_P Parameter: Tissue Value: Whole Plant
  misc_feature: MA Experiment 20000437 PARAMETER Experiment Name: At_Drought_P Parameter: Treatment Value: Drought vs. No Drought
  misc_feature: MA Experiment ID: 20000495 Result: Up-regulated in Transcription
  misc_feature: MA Experiment 20000495 PARAMETER Experiment Name: At_Guard_Cells_P Parameter: Harvest Date Value: 8/2/2002
  misc_feature: MA Experiment 20000495 PARAMETER Experiment Name: At_Guard_Cells_P Parameter: Organism Value: A. thaliana
  misc_feature: MA Experiment 20000495 PARAMETER Experiment Name: At_Guard_Cells_P Parameter: Tissue Value: Guard Cells vs. Leaves
  misc_feature: MA Experiment ID: 20000794 Result: Down-regulated in Transcription
  misc_feature: MA Experiment 20000794 PARAMETER Experiment Name: At_Petals_P Parameter: Age (day) Value: 23-25 days
  misc_feature: MA Experiment 20000794 PARAMETER Experiment Name: At_Petals_P Parameter: Plant Line Value: WS
  misc_feature: MA Experiment 20000794 PARAMETER Experiment Name: At_Petals_P Parameter: Tissue Value: Petals vs. Whole plant
  misc_feature: MA Experiment ID: 20001450 Result: Down-regulated in Transcription
  misc_feature: MA Experiment 20001450 PARAMETER Experiment Name: At_Far-red-induction_P Parameter: Age (day) Value: 7
  misc_feature: MA Experiment 20001450 PARAMETER Experiment Name: At_Far-red-induction_P Parameter: Light Value: Far-red vs. White
  misc_feature: MA Experiment 20001450 PARAMETER Experiment Name: At_Far-red-induction_P Parameter: Organism Value: A. thaliana
  misc_feature: MA Experiment 20001450 PARAMETER Experiment Name: At_Far-red-induction_P Parameter: Plant Line Value: Columbia
  misc_feature: MA Experiment 20001450 PARAMETER Experiment Name: At_Far-red-induction_P Parameter: Timepoint (hr) Value: 8
  misc_feature: MA Experiment 20001450 PARAMETER Experiment Name: At_Far-red-induction_P Parameter: Tissue Value: Whole Plant
  misc_feature: MA Experiment ID: 20001911 Result: Down-regulated in Transcription
  misc_feature: MA Experiment 20001911 PARAMETER Experiment Name: At_Drought_Reproduction_P Parameter: Age (day) Value: 40
  misc_feature: MA Experiment 20001911 PARAMETER Experiment Name: At_Drought_Reproduction_P Parameter: Organism Value: A. thaliana
  misc_feature: MA Experiment 20001911 PARAMETER Experiment Name: At_Drought_Reproduction_P Parameter: Plant Line Value: WS
  misc_feature: MA Experiment 20001911 PARAMETER Experiment Name: At_Drought_Reproduction_P Parameter: Timepoint (day) Value: 10
  misc_feature: MA Experiment 20001911 PARAMETER Experiment Name: At_Drought_Reproduction_P Parameter: Tissue Value: Flowers
  misc_feature: MA Experiment 20001911 PARAMETER Experiment Name: At_Drought_Reproduction_P Parameter: Treatment Value: Drought vs. No Drought
atgtatgcatataaaccccaaatcaaagtgaacttatcaagaaacacaaaaacaaacatcaaaaccccaaaaaaaaaccaaagttctcttcttgaattcgagaaaatgggaatgtcgaaatcgaaaggcaacacacacaacatcttccttctctgcaactacatcctcttaggctcagcctcaagttgcatcttcctcacaatctccctccgtctcttcccatctctctccggtctctcccttatcttcctctacactctcacaatcgcaaccgcggtatccggctgctcgatcttcgcctcctccacatccgccaccgcgagcgatagattatacggttcacacatggtagccacagtcctcacggccattttccaaggcgctgtctctgttctgatattcacgagaacaggggatttccttaggttcttgaaatcttatgttcgggaagaagacggtgaagtgatacttaaactctctggtggtttgtgtgtattgatgttttgcttagagtggattgttcttgtgttagcgtttttgttgaagtatagtgattatttggatgagagtgttgtagatgatgatgattttaaggtgaggaggcaagaagaagatctcaaggattggccttcttacccatttcaactcaagatttaa

SEQ ID NO: 30609 - protein, 218 aa, Arabidopsis thaliana
  peptide (1)..(218): Ceres Seq. ID no. 13504785
  misc_feature (38)..(196): Homolog of NCBI NO: 34907616 NR Description: contains EST C27797(C52876)~unknown protein
  misc_feature (49)..(216): Homolog of NCBI NO: 38345379 NR Description: OSJNBa0067K08.8 [Oryza sativa (japonica
  misc_feature (45)..(216): Homolog of NCBI NO: 18396262 NR Description: expressed protein [Arabidopsis thaliana]
  misc_feature (38)..(216): Homolog of NCBI NO: 21703131 NR Description: AT5g16250/T21H19_170 [Arabidopsis thaliana]
  misc_feature (38)..(216): Homolog of NCBI NO: 21553926 NR Description: unknown [Arabidopsis thaliana]
  misc_feature (38)..(216): Homolog of NCBI NO: 15237310 NR Description: expressed protein [Arabidopsis thaliana]
  misc_feature (36)..(218): Homolog of NCBI NO: 15239407 NR Description: hypothetical protein [Arabidopsis thaliana]
  misc_feature (1)..(218): Homolog of NCBI NO: 15239379 NR Description: expressed protein [Arabidopsis thaliana]
MYAYKPQIKVNLSRNTKTNIKTPKKNQSSLLEFEKMGMSKSKGNTHNIFLLCNYILLGSASSCIFLTISLRLFPSLSGLSLIFLYTLTIATAVSGCSIFASSTSATASDRLYGSHMVATVLTAIFQGAVSVLIFTRTGDFLRFLKSYVREEDGEVILKLSGGLCVLMFCLEWIVLVLAFLLKYSDYLDESVVDDDDFKVRRQEEDLKDWPSYPFQLKI

SEQ ID NO: 30610 - protein, 183 aa, Arabidopsis thaliana
  peptide (1)..(183): Ceres Seq. ID no. 13504786
  misc_feature (3)..(161): Homolog of NCBI NO: 34907616 NR Description: contains EST C27797(C52876)~unknown protein
  misc_feature (14)..(181): Homolog of NCBI NO: 38345379 NR Description: OSJNBa0067K08.8 [Oryza sativa (japonica
  misc_feature (10)..(181): Homolog of NCBI NO: 18396262 NR Description: expressed protein [Arabidopsis thaliana]
  misc_feature (3)..(181): Homolog of NCBI NO: 21703131 NR Description: AT5g16250/T21H19_170 [Arabidopsis thaliana]
  misc_feature (3)..(181): Homolog of NCBI NO: 21553926 NR Description: unknown [Arabidopsis thaliana]
  misc_feature (3)..(181): Homolog of NCBI NO: 15237310 NR Description: expressed protein [Arabidopsis thaliana]
  misc_feature (1)..(183): Homolog of NCBI NO: 15239407 NR Description: hypothetical protein [Arabidopsis thaliana]
  misc_feature (1)..(183): Homolog of NCBI NO: 15239379 NR Description: expressed protein [Arabidopsis thaliana]
MGMSKSKGNTHNIFLLCNYILLGSASSCIFLTISLRLFPSLSGLSLIFLYTLTIATAVSGCSIFASSTSATASDRLYGSHMVATVLTAIFQGAVSVLIFTRTGDFLRFLKSYVREEDGEVILKLSGGLCVLMFCLEWIVLVLAFLLKYSDYLDESVVDDDDFKVRRQEEDLKDWPSYPFQLKI

SEQ ID NO: 30611 - protein, 181 aa, Arabidopsis thaliana
  peptide (1)..(181): Ceres Seq. ID no. 13504787
  misc_feature (1)..(159): Homolog of NCBI NO: 34907616 NR Description: contains EST C27797(C52876)~unknown protein
  misc_feature (12)..(179): Homolog of NCBI NO: 38345379 NR Description: OSJNBa0067K08.8 [Oryza sativa (japonica
  misc_feature (8)..(179): Homolog of NCBI NO: 18396262 NR Description: expressed protein [Arabidopsis thaliana]
  misc_feature (1)..(179): Homolog of NCBI NO: 21703131 NR Description: AT5g16250/T21H19_170 [Arabidopsis thaliana]
  misc_feature (1)..(179): Homolog of NCBI NO: 21553926 NR Description: unknown [Arabidopsis thaliana]
  misc_feature (1)..(179): Homolog of NCBI NO: 15237310 NR Description: expressed protein [Arabidopsis thaliana]
  misc_feature (1)..(181): Homolog of NCBI NO: 15239407 NR Description: hypothetical protein [Arabidopsis thaliana]
  misc_feature (1)..(181): Homolog of NCBI NO: 15239379 NR Description: expressed protein [Arabidopsis thaliana]
MSKSKGNTHNIFLLCNYILLGSASSCIFLTISLRLFPSLSGLSLIFLYTLTIATAVSGCSIFASSTSATASDRLYGSHMVATVLTAIFQGAVSVLIFTRTGDFLRFLKSYVREEDGEVILKLSGGLCVLMFCLEWIVLVLAFLLKYSDYLDESVVDDDDFKVRRQEEDLKDWPSYPFQLKI

SEQ ID NO: 30612 - DNA, 821 bp, Arabidopsis thaliana
  misc_feature (1)..(821): Ceres Seq. ID no. 12333094
  misc_feature: MA Experiment ID: 108462 Result: Up-regulated in Transcription
  misc_feature: MA Experiment 108462 PARAMETER Experiment Name: At_Germinating_Seeds_cDNA_P Parameter: Age (day) Value: 2 vs. 0
  misc_feature: MA Experiment 108462 PARAMETER Experiment Name: At_Germinating_Seeds_cDNA_P Parameter: Tissue Value: Germinating Seeds
  misc_feature: MA Experiment ID: 108463 Result: Up-regulated in Transcription
  misc_feature: MA Experiment 108463 PARAMETER Experiment Name: At_Germinating_Seeds_cDNA_P Parameter: Age (day) Value: 3 vs. 0
  misc_feature: MA Experiment 108463 PARAMETER Experiment Name: At_Germinating_Seeds_cDNA_P Parameter: Tissue Value: Germinating Seeds
  misc_feature: MA Experiment ID: 108469 Result: Up-regulated in Transcription
  misc_feature: MA Experiment ID: 108576 Result: Up-regulated in Transcription
  misc_feature: MA Experiment 108576 PARAMETER Experiment Name: At_42deg_Heat_cDNA_P Parameter: Temperature (deg C) Value: 42 vs. 22
  misc_feature: MA Experiment 108576 PARAMETER Experiment Name: At_42deg_Heat_cDNA_P Parameter: Timepoint (hr) Value: 1
  misc_feature: MA Experiment 108576 PARAMETER Experiment Name: At_42deg_Heat_cDNA_P Parameter: Tissue Value: Aerial
  misc_feature: MA Experiment ID: 108668 Result: Up-regulated in Transcription
  misc_feature: MA Experiment 108668 PARAMETER Experiment Name: At_2mM_SA_cDNA_P Parameter: Plant Line Value: WS
  misc_feature: MA Experiment 108668 PARAMETER Experiment Name: At_2mM_SA_cDNA_P Parameter: Timepoint (hr) Value: 6
  misc_feature: MA Experiment 108668 PARAMETER Experiment Name: At_2mM_SA_cDNA_P Parameter: Treatment Value: 2mM SA vs. No Treatment
  misc_feature: MA Experiment ID: 20000072 Result: Up-regulated in Transcription
  misc_feature: MA Experiment 20000072 PARAMETER Experiment Name: At_100uM_ABA_Mutants_cDNA_P Parameter: Plant Line Value: CS8105
  misc_feature: MA Experiment 20000072 PARAMETER Experiment Name: At_100uM_ABA_Mutants_cDNA_P Parameter: Timepoint (hr) Value: 6
  misc_feature: MA Experiment 20000072 PARAMETER Experiment Name: At_100uM_ABA_Mutants_cDNA_P Parameter: Tissue Value: Aerial
  misc_feature: MA Experiment 20000072 PARAMETER Experiment Name: At_100uM_ABA_Mutants_cDNA_P Parameter: Treatment Value: 100uM ABA vs. No Treatment
  misc_feature: MA Experiment ID: 20000093 Result: Up-regulated in Transcription
  misc_feature: MA Experiment 20000093 PARAMETER Experiment Name: At_42deg_Heat_cDNA_P Parameter: Temperature (deg C) Value: 42 vs. 22
  misc_feature: MA Experiment 20000093 PARAMETER Experiment Name: At_42deg_Heat_cDNA_P Parameter: Timepoint (hr) Value: 0.5
  misc_feature: MA Experiment 20000093 PARAMETER Experiment Name: At_42deg_Heat_cDNA_P Parameter: Tissue Value: Aerial
  misc_feature: MA Experiment ID: 20000111 Result: Up-regulated in Transcription
  misc_feature: MA Experiment 20000111 PARAMETER Experiment Name: At_42deg_Heat_cDNA_P Parameter: Temperature (deg C) Value: 42 vs. 22
  misc_feature: MA Experiment 20000111 PARAMETER Experiment Name: At_42deg_Heat_cDNA_P Parameter: Timepoint (hr) Value: 6
  misc_feature: MA Experiment 20000111 PARAMETER Experiment Name: At_42deg_Heat_cDNA_P Parameter: Tissue Value: Aerial
  misc_feature: MA Experiment ID: 20000113 Result: Up-regulated in Transcription
  misc_feature: MA Experiment 20000113 PARAMETER Experiment Name: At_42deg_Heat_cDNA_P Parameter: Temperature (deg C) Value: 42 vs. 22
  misc_feature: MA Experiment 20000113 PARAMETER Experiment Name: At_42deg_Heat_cDNA_P Parameter: Timepoint (hr) Value: 8
  misc_feature: MA Experiment 20000113 PARAMETER Experiment Name: At_42deg_Heat_cDNA_P Parameter: Tissue Value: Aerial
  misc_feature: MA Experiment ID: 20001248 Result: Down-regulated in Transcription
  misc_feature: MA Experiment 20001248 PARAMETER Experiment Name: At_Far-red-induction_P Parameter: Age (day) Value: 7
  misc_feature: MA Experiment 20001248 PARAMETER Experiment Name: At_Far-red-induction_P Parameter: Light Value: Far-red vs. White
  misc_feature: MA Experiment 20001248 PARAMETER Experiment Name: At_Far-red-induction_P Parameter: Organism Value: A. thaliana
  misc_feature: MA Experiment 20001248 PARAMETER Experiment Name: At_Far-red-induction_P Parameter: Plant Line Value: Columbia
  misc_feature: MA Experiment 20001248 PARAMETER Experiment Name: At_Far-red-induction_P Parameter: Timepoint (hr) Value: 4
  misc_feature: MA Experiment 20001248 PARAMETER Experiment Name: At_Far-red-induction_P Parameter: Tissue Value: Whole Plant
acaccgacagctaaaaatggaggaagagattatcctattggattattgggcgagtatgtacgggatgaggacaaggattgctttggaggagaaaaaagtgaaatatgagtatagagaagaagatctgagtaacaaaagccctttacttcttcagatgaaccctattcacaagaagattccggttttaattcatgaaggtaaaccgatctgcgaatcgataatccaagttcagtatatcgacgagctttggcctgacacaaacccgattcttccttcagatccttaccagagagctcaagctagattttgggcagattacatcgacaagaagacatacgtgccatgcaaggcattatggtcagaatcaggggagaagcaagaggcagcgaagatagagtttatagaagtactcaagacacttgattcagagcttggagacaaatattattttggaggaaacgaatttggactcgttgacattgcctttatcggattctatagttggtttcgtacgtacgaggaggtagcgaatctcagcatcgtgttagagtttcctaagctaatggcgtgggcacagaggtgtttgaagagagagagtgtggctaaggccttgcctgactctgataaggttcttaagtcagtctctgatcatcggaagattattttaggaatcgattaagttcacttacccctgttctgtttttcatgttttttctcattttaaaatgtggcgtgtatttcaagtttgtcaataagtatggtatagaccaaggtatgtttgtggtgggatttgagtgaagctatgatctatttttatttgc

SEQ ID NO: 30613 - protein, 225 aa, Arabidopsis thaliana
  peptide (1)..(225): Ceres Seq. ID no. 12333095
  misc_feature (6)..(219): Homolog of NCBI NO: 21592644 NR Description: glutathione transferase, putative [Arabidopsis
  misc_feature (6)..(219): Homolog of NCBI NO: 18411929 NR Description: glutathione transferase, putative
  misc_feature (6)..(225): Homolog of NCBI NO: 15220040 NR Description: glutathione transferase, putative; protein id:
  misc_feature (6)..(225): Homolog of NCBI NO: 15220041 NR Description: glutathione transferase, putative; protein id:
  misc_feature (6)..(225): Homolog of NCBI NO: 15218301 NR Description: glutathione transferase, putative
HRQLKMEEEIILLDYWASMYGMRTRIALEEKKVKYEYREEDLSNKSPLLLQMNPIHKKIPVLIHEGKPICESIIQVQYIDELWPDTNPILPSDPYQRAQARFWADYIDKKTYVPCKALWSESGEKQEAAKIEFIEVLKTLDSELGDKYYFGGNEFGLVDIAFIGFYSWFRTYEEVANLSIVLEFPKLMAWAQRCLKRESVAKALPDSDKVLKSVSDHRKIILGID

SEQ ID NO: 30614 - protein, 220 aa, Arabidopsis thaliana
  peptide (1)..(220): Ceres Seq. ID no. 12333096
  misc_feature (1)..(214): Homolog of NCBI NO: 21592644 NR Description: glutathione transferase, putative [Arabidopsis
  misc_feature (1)..(214): Homolog of NCBI NO: 18411929 NR Description: glutathione transferase, putative
  misc_feature (1)..(220): Homolog of NCBI NO: 15220040 NR Description: glutathione transferase, putative; protein id:
  misc_feature (1)..(220): Homolog of NCBI NO: 15220041 NR Description: glutathione transferase, putative; protein id:
  misc_feature (1)..(220): Homolog of NCBI NO: 15218301 NR Description: glutathione transferase, putative
MEEEIILLDYWASMYGMRTRIALEEKKVKYEYREEDLSNKSPLLLQMNPIHKKIPVLIHEGKPICESIIQVQYIDELWPDTNPILPSDPYQRAQARFWADYIDKKTYVPCKALWSESGEKQEAAKIEFIEVLKTLDSELGDKYYFGGNEFGLVDIAFIGFYSWFRTYEEVANLSIVLEFPKLMAWAQRCLKRESVAKALPDSDKVLKSVSDHRKIILGID

SEQ ID NO: 30615 - protein, 207 aa, Arabidopsis thaliana
  peptide (1)..(207): Ceres Seq. ID no. 12333097
  misc_feature (1)..(201): Homolog of NCBI NO: 21592644 NR Description: glutathione transferase, putative [Arabidopsis
  misc_feature (1)..(201): Homolog of NCBI NO: 18411929 NR Description: glutathione transferase, putative
  misc_feature (1)..(207): Homolog of NCBI NO: 15220040 NR Description: glutathione transferase, putative; protein id:
  misc_feature (1)..(207): Homolog of NCBI NO: 15220041 NR Description: glutathione transferase, putative; protein id:
  misc_feature (1)..(207): Homolog of NCBI NO: 15218301 NR Description: glutathione transferase, putative
MYGMRTRIALEEKKVKYEYREEDLSNKSPLLLQMNPIHKKIPVLIHEGKPICESIIQVQYIDELWPDTNPILPSDPYQRAQARFWADYIDKKTYVPCKALWSESGEKQEAAKIEFIEVLKTLDSELGDKYYFGGNEFGLVDIAFIGFYSWFRTYEEVANLSIVLEFPKLMAWAQRCLKRESVAKALPDSDKVLKSVSDHRKIILGID

SEQ ID NO: 30616 - DNA, 2185 bp, Arabidopsis thaliana
  misc_feature (1)..(2185): Ceres Seq. ID no. 13591907
  misc_feature: MA Experiment ID: 108434 Result: Up-regulated in Transcription
  misc_feature: MA Experiment 108434 PARAMETER Experiment Name: At_Root_Tips_cDNA_P Parameter: Tissue Value: Root Tips
agattccggtgagaaacgagcaggtcctgtcttcttaagaactcaatttcttcatttctgattctataaaacatccttaaaaacatgtctaccacattgttgagaacaattcagctaaaccagttctcacttctcggaactagcttgttaagaaggagaaggagtaacaacttctccgtgaggtcttgtggaagccaaacaacgacgacccatgaagctaaacagtcttctccaacaagggttgctccaaaaaaccacaaaagcaaccaacttgataagattctgagagattacgaagctgtaattgggatagagactcatgttcagctctctacattgacaaaagccttttgtagttgctctaacaattacgtttcttatccaaacacaagtatttgtcctgtttgtatgggtttgcctggtgctttgcctgttttgaattccaaagttgttgaatttggtgttagattgggtttagctttgaattgtgatttgtctcttaagtctaaattcgataggaagcagtatttttatccagatcttcctaaaggttatcagatttctcagtttgatattcctattgcatctggtggttatgtggatgtggatattcctcttgagtttggtggtggacataggagatttggtattactagggttcatatggaagaagatgctggcaagttacttcattcagacacagtagattactctcaggtagatttgaatagagcaggtgttcctttacttgagattgtttctgaacctgatatgagaagtggtatagaagctgctgaatacgcttgtgaaatgcaacggattgcgaggtatttgggagtcagtaatgggaatatgcaagaaggctctcttcgctgcgatgtcaatatctcaatccgtcctattgggcaagctgagtttggcaccaaggtagaaataaagaatttgaacgcgttttcagcaattagcagagcaatagactttgagatatcaagacaagcacttctctataatcaggggaaagcagaccagattgtaacggagactcggctatgggaagaaggcgctcagaaaacagtaacaatgaggaaaaaggaagggcttgctgattaccgctactttccagaaccagatcttccagaagttatccttacccaagaatatgttgatagcattcgtgcttctttaccggaactccctgaagcaaagcgcaggagatatgaggcgatgggtctaggcatgcaagatgtgcttttcctcgcgaatgacgtcagtgttgcagaatatttcgatgcagtcattggtaagggtgctgaagtgaagttggcagcaaattggataatgagtgatattgcagctatcagttcagccaactcttggggagtgagtttaatatcattgatagaaagtttctcatttttcaagtaagcagcaatatcatcactttcacaatcttcttcatcgatttctctcttccaaatctcccaaaagatgtcgaaccctagagttttcttcgacatgagtctcagcggtactcccatcggacggatcgagatggagcttttcgctgatacaaccccaaacacggcggagaatttccgtgctctctgtaccggcgagaaaggaatgggaaagctaggtaagccacttcacttcaaaggatcgatcttccaccgtgtgattcccggattcatgtgtcaaggaggtgatttcaccgccaagaacggaaccggtggtgaatcgatctacggtgctaagttcaaggacgagaactttatcaagaagcatacaggagctgggattctctcaatggctaactctggtcctaacactaacggatctcagttcttcatctgtaccgataagacgtcgtggttagatggtaagcacgttgtgtttggacaagttgttaaaggcttggacgtcgtgaaggcgattgagaaagttggatctgattctggaaagacttccaaagtcgttaccatcactgattgtggtcagctttcttagatctgagtgagaaagtgagagactttgatctttatgagtaataatggtgtcttttgctttcggttgttcttcctcttaccttaatggattattctgtttagggtttgagttttcgtttcagagtttgtaacaaaacccttttgtgttttctggggtttgaaataattatgagcttacc

SEQ ID NO: 30617 - protein, 446 aa, Arabidopsis thaliana
  peptide (1)..(446): Ceres Seq. ID no. 13591908
  misc_feature (68)..(311): Pfam Name: PET112 family, N terminal region Pfam Description: PET112 family, N terminal region
  misc_feature (68)..(311): Pfam Name: PET112 family, N terminal region Pfam Description: PET112 family, N terminal region
  misc_feature (69)..(446): Homolog of NCBI NO: 33239504 NR Description: Asp-tRNAAsn/Glu-tRNAGln amidotransferase B
  misc_feature (6)..(214): Homolog of NCBI NO: 8778692 NR Description: T1N15.14 [Arabidopsis thaliana]
  misc_feature (139)..(438): Homolog of NCBI NO: 8778692 NR Description: T1N15.14 [Arabidopsis thaliana]
  misc_feature (69)..(438): Homolog of NCBI NO: 24418853 NR Description: Aspartyl/glutamyl-tRNA(Asn/Gln) amidotransferase
  misc_feature (69)..(438): Homolog of NCBI NO: 16330901 NR Description: PET112 protein [Synechocystis sp. PCC 6803]
  misc_feature (69)..(446): Homolog of NCBI NO: 33239504 NR Description: Asp-tRNAAsn/Glu-tRNAGln amidotransferase B
  misc_feature (139)..(438): Homolog of NCBI NO: 8778692 NR Description: T1N15.14 [Arabidopsis thaliana]
  misc_feature (69)..(438): Homolog of NCBI NO: 16330901 NR Description: PET112 protein [Synechocystis sp. PCC 6803]
  misc_feature (1)..(438): Homolog of NCBI NO: 18402234 NR Description: Glu-tRNA(Gln) amidotransferase subunit B
  misc_feature (69)..(446): Homolog of NCBI NO: 23123952 NR Description: hypothetical protein [Nostoc punctiforme]
  misc_feature (70)..(438): Homolog of NCBI NO: 23042361 NR Description: hypothetical protein [Trichodesmium erythraeum
  misc_feature (70)..(446): Homolog of NCBI NO: 22299937 NR Description: Glu-tRNA(Gln) amidotransferase subunit B
  misc_feature (69)..(446): Homolog of NCBI NO: 17228891 NR Description: glutamyl-tRNA (Gln) amidotransferase subunit B
  misc_feature (69)..(438): Homolog of NCBI NO: 24418853 NR Description: Aspartyl/glutamyl-tRNA(Asn/Gln) amidotransferase
  misc_feature (6)..(214): Homolog of NCBI NO: 8778692 NR Description: T1N15.14 [Arabidopsis thaliana]
  misc_feature (69)..(446): Homolog of NCBI NO: 17228891 NR Description: glutamyl-tRNA (Gln) amidotransferase subunit B
  misc_feature (70)..(446): Homolog of NCBI NO: 22299937 NR Description: Glu-tRNA(Gln) amidotransferase subunit B
  misc_feature (70)..(438): Homolog of NCBI NO: 23042361 NR Description: hypothetical protein [Trichodesmium erythraeum
  misc_feature (69)..(446): Homolog of NCBI NO: 23123952 NR Description: hypothetical protein [Nostoc punctiforme]
  misc_feature (1)..(438): Homolog of NCBI NO: 18402234 NR Description: Glu-tRNA(Gln) amidotransferase subunit B
MSTTLLRTIQLNQFSLLGTSLLRRRRSNNFSVRSCGSQTTTTHEAKQSSPTRVAPKNHKSNQLDKILRDYEAVIGIETHVQLSTLTKAFCSCSNNYVSYPNTSICPVCMGLPGALPVLNSKVVEFGVRLGLALNCDLSLKSKFDRKQYFYPDLPKGYQISQFDIPIASGGYVDVDIPLEFGGGHRRFGITRVHMEEDAGKLLHSDTVDYSQVDLNRAGVPLLEIVSEPDMRSGIEAAEYACEMQRIARYLGVSNGNMQEGSLRCDVNISIRPIGQAEFGTKVEIKNLNAFSAISRAIDFEISRQALLYNQGKADQIVTETRLWEEGAQKTVTMRKKEGLADYRYFPEPDLPEVILTQEYVDSIRASLPELPEAKRRRYEAMGLGMQDVLFLANDVSVAEYFDAVIGKGAEVKLAANWIMSDIAAISSANSWGVSLISLIESFSFFK

SEQ ID NO: 30618 - protein, 338 aa, Arabidopsis thaliana
  peptide (1)..(338): Ceres Seq. ID no. 13591909
  misc_feature (1)..(203): Pfam Name: PET112 family, N terminal region Pfam Description: PET112 family, N terminal region
  misc_feature (1)..(203): Pfam Name: PET112 family, N terminal region Pfam Description: PET112 family, N terminal region
  misc_feature (1)..(338): Homolog of NCBI NO: 33239504 NR Description: Asp-tRNAAsn/Glu-tRNAGln amidotransferase B
  misc_feature (1)..(106): Homolog of NCBI NO: 8778692 NR Description: T1N15.14 [Arabidopsis thaliana]
  misc_feature (31)..(330): Homolog of NCBI NO: 8778692 NR Description: T1N15.14 [Arabidopsis thaliana]
  misc_feature (1)..(330): Homolog of NCBI NO: 24418853 NR Description: Aspartyl/glutamyl-tRNA(Asn/Gln) amidotransferase
  misc_feature (1)..(330): Homolog of NCBI NO: 16330901 NR Description: PET112 protein [Synechocystis sp. PCC 6803]
  misc_feature (1)..(338): Homolog of NCBI NO: 33239504 NR Description: Asp-tRNAAsn/Glu-tRNAGln amidotransferase B
  misc_feature (31)..(330): Homolog of NCBI NO: 8778692 NR Description: T1N15.14 [Arabidopsis thaliana]
  misc_feature (1)..(330): Homolog of NCBI NO: 16330901 NR Description: PET112 protein [Synechocystis sp. PCC 6803]
  misc_feature (1)..(330): Homolog of NCBI NO: 18402234 NR Description: Glu-tRNA(Gln) amidotransferase subunit B
  misc_feature (1)..(338): Homolog of NCBI NO: 23123952 NR Description: hypothetical protein [Nostoc punctiforme]
  misc_feature (1)..(330): Homolog of NCBI NO: 23042361 NR Description: hypothetical protein [Trichodesmium erythraeum
  misc_feature (1)..(338): Homolog of NCBI NO: 22299937 NR Description: Glu-tRNA(Gln) amidotransferase subunit B
  misc_feature (1)..(338): Homolog of NCBI NO: 17228891 NR Description: glutamyl-tRNA (Gln) amidotransferase subunit B
  misc_feature (1)..(330): Homolog of NCBI NO: 24418853 NR Description: Aspartyl/glutamyl-tRNA(Asn/Gln) amidotransferase
  misc_feature (1)..(106): Homolog of NCBI NO: 8778692 NR Description: T1N15.14 [Arabidopsis thaliana]
  misc_feature (1)..(338): Homolog of NCBI NO: 17228891 NR Description: glutamyl-tRNA (Gln) amidotransferase subunit B
  misc_feature (1)..(338): Homolog of NCBI NO: 22299937 NR Description: Glu-tRNA(Gln) amidotransferase subunit B
  misc_feature (1)..(330): Homolog of NCBI NO: 23042361 NR Description: hypothetical protein [Trichodesmium erythraeum
  misc_feature (1)..(338): Homolog of NCBI NO: 23123952 NR Description: hypothetical protein [Nostoc punctiforme]
  misc_feature (1)..(330): Homolog of NCBI NO: 18402234 NR Description: Glu-tRNA(Gln) amidotransferase subunit B
MGLPGALPVLNSKVVEFGVRLGLALNCDLSLKSKFDRKQYFYPDLPKGYQISQFDIPIASGGYVDVDIPLEFGGGHRRFGITRVHMEEDAGKLLHSDTVDYSQVDLNRAGVPLLEIVSEPDMRSGIEAAEYACEMQRIARYLGVSNGNMQEGSLRCDVNISIRPIGQAEFGTKVEIKNLNAFSAISRAIDFEISRQALLYNQGKADQIVTETRLWEEGAQKTVTMRKKEGLADYRYFPEPDLPEVILTQEYVDSIRASLPELPEAKRRRYEAMGLGMQDVLFLANDVSVAEYFDAVIGKGAEVKLAANWIMSDIAAISSANSWGVSLISLIESFSFFK

SEQ ID NO: 30619 - protein, 253 aa, Arabidopsis thaliana
  peptide (1)..(253): Ceres Seq. ID no. 13591910
  misc_feature (1)..(118): Pfam Name: PET112 family, N terminal region Pfam Description: PET112 family, N terminal region
  misc_feature (1)..(118): Pfam Name: PET112 family, N terminal region Pfam Description: PET112 family, N terminal region
  misc_feature (1)..(253): Homolog of NCBI NO: 33239504 NR Description: Asp-tRNAAsn/Glu-tRNAGln amidotransferase B
  misc_feature (1)..(21): Homolog of NCBI NO: 8778692 NR Description: T1N15.14 [Arabidopsis thaliana]
  misc_feature (1)..(245): Homolog of NCBI NO: 8778692 NR Description: T1N15.14 [Arabidopsis thaliana]
  misc_feature (1)..(245): Homolog of NCBI NO: 24418853 NR Description: Aspartyl/glutamyl-tRNA(Asn/Gln) amidotransferase
  misc_feature (1)..(245): Homolog of NCBI NO: 16330901 NR Description: PET112 protein [Synechocystis sp. PCC 6803]
  misc_feature (1)..(253): Homolog of NCBI NO: 33239504 NR Description: Asp-tRNAAsn/Glu-tRNAGln amidotransferase B
  misc_feature (1)..(245): Homolog of NCBI NO: 8778692 NR Description: T1N15.14 [Arabidopsis thaliana]
  misc_feature (1)..(245): Homolog of NCBI NO: 16330901 NR Description: PET112 protein [Synechocystis sp. PCC 6803]
  misc_feature (1)..(245): Homolog of NCBI NO: 18402234 NR Description: Glu-tRNA(Gln) amidotransferase subunit B
  misc_feature (1)..(253): Homolog of NCBI NO: 23123952 NR Description: hypothetical protein [Nostoc punctiforme]
  misc_feature (1)..(245): Homolog of NCBI NO: 23042361 NR Description: hypothetical protein [Trichodesmium erythraeum
  misc_feature (1)..(253): Homolog of NCBI NO: 22299937 NR Description: Glu-tRNA(Gln) amidotransferase subunit B
  misc_feature (1)..(253): Homolog of NCBI NO: 17228891 NR Description: glutamyl-tRNA (Gln) amidotransferase subunit B
  misc_feature (1)..(245): Homolog of NCBI NO: 24418853 NR Description: Aspartyl/glutamyl-tRNA(Asn/Gln) amidotransferase
  misc_feature (1)..(21): Homolog of NCBI NO: 8778692 NR Description: T1N15.14 [Arabidopsis thaliana]
  misc_feature (1)..(253): Homolog of NCBI NO: 17228891 NR Description: glutamyl-tRNA (Gln) amidotransferase subunit B
  misc_feature (1)..(253): Homolog of NCBI NO: 22299937 NR Description: Glu-tRNA(Gln) amidotransferase subunit B
  misc_feature (1)..(245): Homolog of NCBI NO: 23042361 NR Description: hypothetical protein [Trichodesmium erythraeum
  misc_feature (1)..(253): Homolog of NCBI NO: 23123952 NR Description: hypothetical protein [Nostoc punctiforme]
  misc_feature (1)..(245): Homolog of NCBI NO: 18402234 NR Description: Glu-tRNA(Gln) amidotransferase subunit B
MEEDAGKLLHSDTVDYSQVDLNRAGVPLLEIVSEPDMRSGIEAAEYACEMQRIARYLGVSNGNMQEGSLRCDVNISIRPIGQAEFGTKVEIKNLNAFSAISRAIDFEISRQALLYNQGKADQIVTETRLWEEGAQKTVTMRKKEGLADYRYFPEPDLPEVILTQEYVDSIRASLPELPEAKRRRYEAMGLGMQDVLFLANDVSVAEYFDAVIGKGAEVKLAANWIMSDIAAISSANSWGVSLISLIESFSFFK

SEQ ID NO: 30620 - DNA, 1056 bp, Arabidopsis thaliana
  misc_feature (1)..(1056): Ceres Seq. ID no. 12396833
  misc_feature: MA Experiment ID: 108434 Result: Up-regulated in Transcription
  misc_feature: MA Experiment 108434 PARAMETER Experiment Name: At_Root_Tips_cDNA_P Parameter: Tissue Value: Root Tips
  misc_feature: MA Experiment ID: 108462 Result: Up-regulated in Transcription
  misc_feature: MA Experiment 108462 PARAMETER Experiment Name: At_Germinating_Seeds_cDNA_P Parameter: Age (day) Value: 2 vs. 0
  misc_feature: MA Experiment 108462 PARAMETER Experiment Name: At_Germinating_Seeds_cDNA_P Parameter: Tissue Value: Germinating Seeds
  misc_feature: MA Experiment ID: 108463 Result: Up-regulated in Transcription
  misc_feature: MA Experiment 108463 PARAMETER Experiment Name: At_Germinating_Seeds_cDNA_P Parameter: Age (day) Value: 3 vs. 0
  misc_feature: MA Experiment 108463 PARAMETER Experiment Name: At_Germinating_Seeds_cDNA_P Parameter: Tissue Value: Germinating Seeds
  misc_feature: MA Experiment ID: 108464 Result: Up-regulated in Transcription
  misc_feature: MA Experiment 108464 PARAMETER Experiment Name: At_Germinating_Seeds_cDNA_P Parameter: Age (day) Value: 4 vs. 0
  misc_feature: MA Experiment 108464 PARAMETER Experiment Name: At_Germinating_Seeds_cDNA_P Parameter: Tissue Value: Germinating Seeds
  misc_feature: MA Experiment ID: 108561 Result: Up-regulated in Transcription
  misc_feature: MA Experiment 108561 PARAMETER Experiment Name: At_100uM_ABA_cDNA_P Parameter: Timepoint (hr) Value: 6
  misc_feature: MA Experiment 108561 PARAMETER Experiment Name: At_100uM_ABA_cDNA_P Parameter: Tissue Value: Aerial
  misc_feature: MA Experiment 108561 PARAMETER Experiment Name: At_100uM_ABA_cDNA_P Parameter: Treatment Value: 100uM ABA vs. No Treatment
  misc_feature: MA Experiment ID: 108572 Result: Up-regulated in Transcription
  misc_feature: MA Experiment 108572 PARAMETER Experiment Name: At_Drought_cDNA_P Parameter: Timepoint (hr) Value: 1
  misc_feature: MA Experiment 108572 PARAMETER Experiment Name: At_Drought_cDNA_P Parameter: Tissue Value: Aerial
  misc_feature: MA Experiment 108572 PARAMETER Experiment Name: At_Drought_cDNA_P Parameter: Treatment Value: Drought vs. No Drought
  misc_feature: MA Experiment ID: 108573 Result: Up-regulated in Transcription
  misc_feature: MA Experiment 108573 PARAMETER Experiment Name: At_Drought_cDNA_P Parameter: Timepoint (hr) Value: 6
  misc_feature: MA Experiment 108573 PARAMETER Experiment Name: At_Drought_cDNA_P Parameter: Tissue Value: Aerial
  misc_feature: MA Experiment 108573 PARAMETER Experiment Name: At_Drought_cDNA_P Parameter: Treatment Value: Drought vs. No Drought
  misc_feature: MA Experiment ID: 108605 Result: Up-regulated in Transcription
  misc_feature: MA Experiment 108605 PARAMETER Experiment Name: At_100uM_ABA_cDNA_P Parameter: Timepoint (hr) Value: 6
  misc_feature: MA Experiment 108605 PARAMETER Experiment Name: At_100uM_ABA_cDNA_P Parameter: Tissue Value: Aerial
  misc_feature: MA Experiment 108605 PARAMETER Experiment Name: At_100uM_ABA_cDNA_P Parameter: Treatment Value: 100uM ABA vs. No Treatment
  misc_feature: MA Experiment ID: 108607 Result: Up-regulated in Transcription
  misc_feature: MA Experiment 108607 PARAMETER Experiment Name: At_100uM_ABA_cDNA_P Parameter: Timepoint (hr) Value: 4
  misc_feature: MA Experiment 108607 PARAMETER Experiment Name: At_100uM_ABA_cDNA_P Parameter: Tissue Value: Aerial
  misc_feature: MA Experiment 108607 PARAMETER Experiment Name: At_100uM_ABA_cDNA_P Parameter: Treatment Value: 100uM ABA vs. No Treatment
  misc_feature: MA Experiment ID: 108608 Result: Up-regulated in Transcription
  misc_feature: MA Experiment 108608 PARAMETER Experiment Name: At_100uM_ABA_cDNA_P Parameter: Timepoint (hr) Value: 1
  misc_feature: MA Experiment 108608 PARAMETER Experiment Name: At_100uM_ABA_cDNA_P Parameter: Tissue Value: Aerial
  misc_feature: MA Experiment 108608 PARAMETER Experiment Name: At_100uM_ABA_cDNA_P Parameter: Treatment Value: 100uM ABA vs. No Treatment
  misc_feature: MA Experiment ID: 108609 Result: Up-regulated in Transcription
  misc_feature: MA Experiment 108609 PARAMETER Experiment Name: At_100uM_ABA_cDNA_P Parameter: Timepoint (hr) Value: 24
  misc_feature: MA Experiment 108609 PARAMETER Experiment Name: At_100uM_ABA_cDNA_P Parameter: Tissue Value: Aerial
  misc_feature: MA Experiment 108609 PARAMETER Experiment Name: At_100uM_ABA_cDNA_P Parameter: Treatment Value: 100uM ABA vs. No Treatment
  misc_feature: MA Experiment ID: 20000069 Result: Up-regulated in Transcription
  misc_feature: MA Experiment 20000069 PARAMETER Experiment Name: At_100uM_ABA_Mutants_cDNA_P Parameter: Plant Line Value: CS23
  misc_feature: MA Experiment 20000069 PARAMETER Experiment Name: At_100uM_ABA_Mutants_cDNA_P Parameter: Timepoint (hr) Value: 6
  misc_feature: MA Experiment 20000069 PARAMETER Experiment Name: At_100uM_ABA_Mutants_cDNA_P Parameter: Tissue Value: Aerial
  misc_feature: MA Experiment 20000069 PARAMETER Experiment Name: At_100uM_ABA_Mutants_cDNA_P Parameter: Treatment Value: 100uM ABA vs. No Treatment
  misc_feature: MA Experiment ID: 20000070 Result: Up-regulated in Transcription
  misc_feature: MA Experiment 20000070 PARAMETER Experiment Name: At_100uM_ABA_Mutants_cDNA_P Parameter: Plant Line Value: CS24
  misc_feature: MA Experiment 20000070 PARAMETER Experiment Name: At_100uM_ABA_Mutants_cDNA_P Parameter: Timepoint (hr) Value: 6
  misc_feature: MA Experiment 20000070 PARAMETER Experiment Name: At_100uM_ABA_Mutants_cDNA_P Parameter: Tissue Value: Aerial
  misc_feature: MA Experiment 20000070 PARAMETER Experiment Name: At_100uM_ABA_Mutants_cDNA_P Parameter: Treatment Value: 100uM ABA vs. No Treatment
  misc_feature: MA Experiment ID: 20000071 Result: Up-regulated in Transcription
  misc_feature: MA Experiment 20000071 PARAMETER Experiment Name: At_100uM_ABA_Mutants_cDNA_P Parameter: Plant Line Value: CS8104
  misc_feature: MA Experiment 20000071 PARAMETER Experiment Name: At_100uM_ABA_Mutants_cDNA_P Parameter: Timepoint (hr) Value: 6
  misc_feature: MA Experiment 20000071 PARAMETER Experiment Name: At_100uM_ABA_Mutants_cDNA_P Parameter: Tissue Value: Aerial
  misc_feature: MA Experiment 20000071 PARAMETER Experiment Name: At_100uM_ABA_Mutants_cDNA_P Parameter: Treatment Value: 100uM ABA vs. No Treatment
  misc_feature: MA Experiment ID: 20000072 Result: Up-regulated in Transcription
  misc_feature: MA Experiment 20000072 PARAMETER Experiment Name: At_100uM_ABA_Mutants_cDNA_P Parameter: Plant Line Value: CS8105
  misc_feature: MA Experiment 20000072 PARAMETER Experiment Name: At_100uM_ABA_Mutants_cDNA_P Parameter: Timepoint (hr) Value: 6
  misc_feature: MA Experiment 20000072 PARAMETER Experiment Name: At_100uM_ABA_Mutants_cDNA_P Parameter: Tissue Value: Aerial
  misc_feature: MA Experiment 20000072 PARAMETER Experiment Name: At_100uM_ABA_Mutants_cDNA_P Parameter: Treatment Value: 100uM ABA vs. No Treatment
  misc_feature: MA Experiment ID: 20000087 Result: Up-regulated in Transcription
  misc_feature: MA Experiment 20000087 PARAMETER Experiment Name: At_100uM_ABA_Mutants_cDNA_P Parameter: Plant Line Value: WS
  misc_feature: MA Experiment 20000087 PARAMETER Experiment Name: At_100uM_ABA_Mutants_cDNA_P Parameter: Timepoint (hr) Value: 6
  misc_feature: MA Experiment 20000087 PARAMETER Experiment Name: At_100uM_ABA_Mutants_cDNA_P Parameter: Tissue Value: Aerial
  misc_feature: MA Experiment 20000087 PARAMETER Experiment Name: At_100uM_ABA_Mutants_cDNA_P Parameter: Treatment Value: 100uM ABA vs. No Treatment
  misc_feature: MA Experiment ID: 20000117 Result: Up-regulated in Transcription
  misc_feature: MA Experiment 20000117 PARAMETER Experiment Name: At_100uM_ABA_Mutants_cDNA_P Parameter: Plant Line Value: Columbia
  misc_feature: MA Experiment 20000117 PARAMETER Experiment Name: At_100uM_ABA_Mutants_cDNA_P Parameter: Timepoint (hr) Value: 6
  misc_feature: MA Experiment 20000117 PARAMETER Experiment Name: At_100uM_ABA_Mutants_cDNA_P Parameter: Tissue Value: Aerial
  misc_feature: MA Experiment 20000117 PARAMETER Experiment Name: At_100uM_ABA_Mutants_cDNA_P Parameter: Treatment Value: 100uM ABA vs. No Treatment
  misc_feature: MA Experiment ID: 20000166 Result: Up-regulated in Transcription
  misc_feature: MA Experiment 20000166 PARAMETER Experiment Name: At_100uM_ABA_P Parameter: Age (day) Value: 14
  misc_feature: MA Experiment 20000166 PARAMETER Experiment Name: At_100uM_ABA_P Parameter: Organism Value: A. thaliana
  misc_feature: MA Experiment 20000166 PARAMETER Experiment Name: At_100uM_ABA_P Parameter: Plant Line Value: WS
  misc_feature: MA Experiment 20000166 PARAMETER Experiment Name: At_100uM_ABA_P Parameter: Timepoint (hr) Value: 1
  misc_feature: MA Experiment 20000166 PARAMETER Experiment Name: At_100uM_ABA_P Parameter: Tissue Value: Aerial
  misc_feature: MA Experiment 20000166 PARAMETER Experiment Name: At_100uM_ABA_P Parameter: Treatment Value: 100uM ABA vs. No Treatment
  misc_feature: MA Experiment ID: 20000169 Result: Up-regulated in Transcription
  misc_feature: MA Experiment 20000169 PARAMETER Experiment Name: At_100uM_ABA_P Parameter: Age (day) Value: 14
  misc_feature: MA Experiment 20000169 PARAMETER Experiment Name: At_100uM_ABA_P Parameter: Organism Value: A. thaliana
  misc_feature: MA Experiment 20000169 PARAMETER Experiment Name: At_100uM_ABA_P Parameter: Plant Line Value: WS
  misc_feature: MA Experiment 20000169 PARAMETER Experiment Name: At_100uM_ABA_P Parameter: Timepoint (hr) Value: 6
  misc_feature: MA Experiment 20000169 PARAMETER Experiment Name: At_100uM_ABA_P Parameter: Tissue Value: Aerial
  misc_feature: MA Experiment 20000169 PARAMETER Experiment Name: At_100uM_ABA_P Parameter: Treatment Value: 100uM ABA vs. No Treatment
  misc_feature: MA Experiment ID: 20000234 Result: Up-regulated in Transcription
  misc_feature: MA Experiment 20000234 PARAMETER Experiment Name: At_Siliques_P Parameter: Age (day) Value: 21
  misc_feature: MA Experiment 20000234 PARAMETER Experiment Name: At_Siliques_P Parameter: Organism Value: A. thaliana
  misc_feature: MA Experiment 20000234 PARAMETER Experiment Name: At_Siliques_P Parameter: Plant Line Value: WS
  misc_feature: MA Experiment 20000234 PARAMETER Experiment Name: At_Siliques_P Parameter: Tissue Value: Less Than 5mm Siliques vs. Whole Plant
  misc_feature: MA Experiment ID: 20000265 Result: Up-regulated in Transcription
  misc_feature: MA Experiment 20000265 PARAMETER Experiment Name: At_Open_Flower_P Parameter: Age (day) Value: 21
  misc_feature: MA Experiment 20000265 PARAMETER Experiment Name: At_Open_Flower_P Parameter: Plant Line Value: WS
  misc_feature: MA Experiment 20000265 PARAMETER Experiment Name: At_Open_Flower_P Parameter: Tissue Value: Closed Flower vs. Whole Plant
  misc_feature: MA Experiment ID: 20000267 Result: Up-regulated in Transcription
  misc_feature: MA Experiment 20000267 PARAMETER Experiment Name: At_Drought_P Parameter: Age (day) Value: 7
  misc_feature: MA Experiment 20000267 PARAMETER Experiment Name: At_Drought_P Parameter: Organism Value: A. thaliana
  misc_feature: MA Experiment 20000267 PARAMETER Experiment Name: At_Drought_P Parameter: Plant Line Value: WS
  misc_feature: MA Experiment 20000267 PARAMETER Experiment Name: At_Drought_P Parameter: Timepoint (hr) Value: 6
  misc_feature: MA Experiment 20000267 PARAMETER Experiment Name: At_Drought_P Parameter: Tissue Value: Whole Plant
  misc_feature: MA Experiment 20000267 PARAMETER Experiment Name: At_Drought_P Parameter: Treatment Value: Drought vs. No Drought
  misc_feature: MA Experiment ID: 20000268 Result: Up-regulated in Transcription
  misc_feature: MA Experiment 20000268 PARAMETER Experiment Name: At_100mM_NaCl__P Parameter: Age (day) Value: 14
  misc_feature: MA Experiment 20000268 PARAMETER Experiment Name: At_100mM_NaCl__P Parameter: Organism Value: A. thaliana
  misc_feature: MA Experiment 20000268 PARAMETER Experiment Name: At_100mM_NaCl__P Parameter: Plant Line Value: WS
  misc_feature: MA Experiment 20000268 PARAMETER Experiment Name: At_100mM_NaCl__P Parameter: Timepoint (hr) Value: 6
  misc_feature: MA Experiment 20000268 PARAMETER Experiment Name: At_100mM_NaCl__P Parameter: Tissue Value: Whole Plant
  misc_feature: MA Experiment 20000268 PARAMETER Experiment Name: At_100mM_NaCl__P Parameter: Treatment Value: 100mM NaCl vs. No Treatment
  misc_feature: MA Experiment ID: 20000436 Result: Up-regulated in Transcription
  misc_feature: MA Experiment 20000436 PARAMETER Experiment Name: At_Drought_P Parameter: Age (day) Value: 7
  misc_feature: MA Experiment 20000436 PARAMETER Experiment Name: At_Drought_P Parameter: Organism Value: A. thaliana
  misc_feature: MA Experiment 20000436 PARAMETER Experiment Name: At_Drought_P Parameter: Plant Line Value: WS
  misc_feature: MA Experiment 20000436 PARAMETER Experiment Name: At_Drought_P Parameter: Timepoint (hr) Value: 12
  misc_feature: MA Experiment 20000436 PARAMETER Experiment Name: At_Drought_P Parameter: Tissue Value: Whole Plant
  misc_feature: MA Experiment 20000436 PARAMETER Experiment Name: At_Drought_P Parameter: Treatment Value: Drought vs. No Drought
  misc_feature: MA Experiment ID: 20000437 Result: Up-regulated in Transcription
  misc_feature: MA Experiment 20000437 PARAMETER Experiment Name: At_Drought_P Parameter: Age (day) Value: 8
  misc_feature: MA Experiment 20000437 PARAMETER Experiment Name: At_Drought_P Parameter: Organism Value: A. thaliana
  misc_feature: MA Experiment 20000437 PARAMETER Experiment Name: At_Drought_P Parameter: Plant Line Value: WS
  misc_feature: MA Experiment 20000437 PARAMETER Experiment Name: At_Drought_P Parameter: Timepoint (hr) Value: 24
  misc_feature: MA Experiment 20000437 PARAMETER Experiment Name: At_Drought_P Parameter: Tissue Value: Whole Plant
  misc_feature: MA Experiment 20000437 PARAMETER Experiment Name: At_Drought_P Parameter: Treatment Value: Drought vs. No Drought
  misc_feature: MA Experiment ID: 20000453 Result: Up-regulated in Transcription
  misc_feature: MA Experiment 20000453 PARAMETER Experiment Name: At_100uM_ABA_P Parameter: Age (day) Value: 15
  misc_feature: MA Experiment 20000453 PARAMETER Experiment Name: At_100uM_ABA_P Parameter: Organism Value: A. thaliana
  misc_feature: MA Experiment 20000453 PARAMETER Experiment Name: At_100uM_ABA_P Parameter: Plant Line Value: WS
  misc_feature: MA Experiment 20000453 PARAMETER Experiment Name: At_100uM_ABA_P Parameter: Timepoint (hr) Value: 24
  misc_feature: MA Experiment 20000453 PARAMETER Experiment Name: At_100uM_ABA_P Parameter: Tissue Value: Aerial
  misc_feature: MA Experiment 20000453 PARAMETER Experiment Name: At_100uM_ABA_P Parameter: Treatment Value: 100uM ABA vs. No Treatment
  misc_feature: MA Experiment ID: 20000573 Result: Down-regulated in Transcription
  misc_feature: MA Experiment 20000573 PARAMETER Experiment Name: At_100uM_ABA_Mutants__P Parameter: Organism Value: A. thaliana
  misc_feature: MA Experiment 20000573 PARAMETER Experiment Name: At_100uM_ABA_Mutants__P Parameter: Plant Line Value: CS22 vs. Ler wt
  misc_feature: MA Experiment 20000573 PARAMETER Experiment Name: At_100uM_ABA_Mutants__P Parameter: Timepoint (hr) Value: N/A
  misc_feature: MA Experiment 20000573 PARAMETER Experiment Name: At_100uM_ABA_Mutants__P Parameter: Tissue Value: Whole Plant
  misc_feature: MA Experiment 20000573 PARAMETER Experiment Name: At_100uM_ABA_Mutants__P Parameter: Treatment Value: None
  misc_feature: MA Experiment ID: 20000574 Result: Down-regulated in Transcription
  misc_feature: MA Experiment 20000574 PARAMETER Experiment Name: At_100uM_ABA_Mutants__P Parameter: Organism Value: A. thaliana
  misc_feature: MA Experiment 20000574 PARAMETER Experiment Name: At_100uM_ABA_Mutants__P Parameter: Plant Line Value: CS23 vs. Ler wt
  misc_feature: MA Experiment 20000574 PARAMETER Experiment Name: At_100uM_ABA_Mutants__P Parameter: Timepoint (hr) Value: N/A
  misc_feature: MA Experiment 20000574 PARAMETER Experiment Name: At_100uM_ABA_Mutants__P Parameter: Tissue Value: Whole Plant
  misc_feature: MA Experiment 20000574 PARAMETER Experiment Name: At_100uM_ABA_Mutants__P Parameter: Treatment Value: None
  misc_feature: MA Experiment ID: 20000794 Result: Up-regulated in Transcription
  misc_feature: MA Experiment 20000794 PARAMETER Experiment Name: At_Petals_P Parameter: Age (day) Value: 23-25 days
  misc_feature: MA Experiment 20000794 PARAMETER Experiment Name: At_Petals_P Parameter: Plant Line Value: WS
  misc_feature: MA Experiment 20000794 PARAMETER Experiment Name: At_Petals_P Parameter: Tissue Value: Petals vs. Whole plant
  misc_feature: MA Experiment ID: 20001555 Result: Up-regulated in Transcription
  misc_feature: MA Experiment 20001555 PARAMETER Experiment Name: At_Drought_Soil_Dry_P Parameter: Age (day) Value: 24
  misc_feature: MA Experiment 20001555 PARAMETER Experiment Name: At_Drought_Soil_Dry_P Parameter: Organism Value: A. thaliana
  misc_feature: MA Experiment 20001555 PARAMETER Experiment Name: At_Drought_Soil_Dry_P Parameter: Plant Line Value: WS
  misc_feature: MA Experiment 20001555 PARAMETER Experiment Name: At_Drought_Soil_Dry_P Parameter: Post Timepoint (hr) Value: None
  misc_feature: MA Experiment 20001555 PARAMETER Experiment Name: At_Drought_Soil_Dry_P Parameter: Post-Treatment Value: None
  misc_feature: MA Experiment 20001555 PARAMETER Experiment Name: At_Drought_Soil_Dry_P Parameter: Timepoint (day) Value: 10
  misc_feature: MA Experiment 20001555 PARAMETER Experiment Name: At_Drought_Soil_Dry_P Parameter: Treatment Value: Drought vs. No Drought
  misc_feature: MA Experiment ID: 20001556 Result: Up-regulated in Transcription
  misc_feature: MA Experiment 20001556 PARAMETER Experiment Name: At_Drought_Soil_Dry_P Parameter: Age (day) Value: 26
  misc_feature: MA Experiment 20001556 PARAMETER Experiment Name: At_Drought_Soil_Dry_P Parameter: Organism Value: A. thaliana
  misc_feature: MA Experiment 20001556 PARAMETER Experiment Name: At_Drought_Soil_Dry_P Parameter: Plant Line Value: WS
  misc_feature: MA Experiment 20001556 PARAMETER Experiment Name: At_Drought_Soil_Dry_P Parameter: Post Timepoint (hr) Value: None
  misc_feature: MA Experiment 20001556 PARAMETER Experiment Name: At_Drought_Soil_Dry_P Parameter: Post-Treatment Value: None
  misc_feature: MA Experiment 20001556 PARAMETER Experiment Name: At_Drought_Soil_Dry_P Parameter: Timepoint (day) Value: 12
  misc_feature: MA Experiment 20001556 PARAMETER Experiment Name: At_Drought_Soil_Dry_P Parameter: Treatment Value: Drought vs. No Drought
  misc_feature: MA Experiment ID: 20001559 Result: Up-regulated in Transcription
  misc_feature: MA Experiment 20001559 PARAMETER Experiment Name: At_Drought_Soil_Dry_P Parameter: Age (day) Value: 28
  misc_feature: MA Experiment 20001559 PARAMETER Experiment Name: At_Drought_Soil_Dry_P Parameter: Organism Value: A. thaliana
  misc_feature: MA Experiment 20001559 PARAMETER Experiment Name: At_Drought_Soil_Dry_P Parameter: Plant Line Value: WS
  misc_feature: MA Experiment 20001559 PARAMETER Experiment Name: At_Drought_Soil_Dry_P Parameter: Post Timepoint (hr) Value: 29
  misc_feature: MA Experiment 20001559 PARAMETER Experiment Name: At_Drought_Soil_Dry_P Parameter: Post-Treatment Value: Re-Water vs. No Drought
  misc_feature: MA Experiment 20001559 PARAMETER Experiment Name: At_Drought_Soil_Dry_P Parameter: Timepoint (day) Value: 14
  misc_feature: MA Experiment 20001559 PARAMETER Experiment Name: At_Drought_Soil_Dry_P Parameter: Treatment Value: Drought vs. No Drought
  misc_feature: MA Experiment ID: 20001757 Result: Down-regulated in Transcription
  misc_feature: MA Experiment 20001757 PARAMETER Experiment Name: At_50mM_NH4NO3_L-to-H_P Parameter: Timepoint (hr) Value: 6
  misc_feature: MA Experiment 20001757 PARAMETER Experiment Name: At_50mM_NH4NO3_L-to-H_P Parameter: Tissue Value: Leaf
  misc_feature: MA Experiment 20001757 PARAMETER Experiment Name: At_50mM_NH4NO3_L-to-H_P Parameter: Treatment Value: 50mM NH4NO3 vs 100mM Mannitol
  misc_feature: MA Experiment ID: 20001904 Result: Up-regulated in Transcription
  misc_feature: MA Experiment 20001904 PARAMETER Experiment Name: At_Drought_Reproduction_P Parameter: Age (day) Value: 37
  misc_feature: MA Experiment 20001904 PARAMETER Experiment Name: At_Drought_Reproduction_P Parameter: Organism Value: A. thaliana
  misc_feature: MA Experiment 20001904 PARAMETER Experiment Name: At_Drought_Reproduction_P Parameter: Plant Line Value: WS
  misc_feature: MA Experiment 20001904 PARAMETER Experiment Name: At_Drought_Reproduction_P Parameter: Timepoint (day) Value: 7
  misc_feature: MA Experiment 20001904 PARAMETER Experiment Name: At_Drought_Reproduction_P Parameter: Tissue Value: Rosettes
  misc_feature: MA Experiment 20001904 PARAMETER Experiment Name: At_Drought_Reproduction_P Parameter: Treatment Value: Drought vs. No Drought
  misc_feature: MA Experiment ID: 20001905 Result: Up-regulated in Transcription
  misc_feature: MA Experiment 20001905 PARAMETER Experiment Name: At_Drought_Reproduction_P Parameter: Age (day) Value: 40
  misc_feature: MA Experiment 20001905 PARAMETER Experiment Name: At_Drought_Reproduction_P Parameter: Organism Value: A. thaliana
  misc_feature: MA Experiment 20001905 PARAMETER Experiment Name: At_Drought_Reproduction_P Parameter: Plant Line Value: WS
  misc_feature: MA Experiment 20001905 PARAMETER Experiment Name: At_Drought_Reproduction_P Parameter: Timepoint (day) Value: 10
  misc_feature: MA Experiment 20001905 PARAMETER Experiment Name: At_Drought_Reproduction_P Parameter: Tissue Value: Rosettes
  misc_feature: MA Experiment 20001905 PARAMETER Experiment Name: At_Drought_Reproduction_P Parameter: Treatment Value: Drought vs. No Drought
atttaatcacacatttgatctgagcgagggagagagagaaagagatcttgtccgaacgatgaaggcggagaagaatccgattcagtccgtaatggcgtggattcgccggcaaccgccaaaagtaaaggcttttcttggcgtggtaacggcaatgacggtgcttgttctcctcagggtgattgttcatgaacacgacaatcttttcgtcgcttctgaggctgtacatgccgttggtatcgctgttcttatctataagctcacaaaggagaagacttgtgctgggatatctctcaagacacaggagctaacggctttgtttctggctgtgagattgtattgtagctttgtaatgtagtttgatcttcatacatttcttgattcagctactttggtgaccactctttgggtcgtttatatgatccgtttcaagcttagacctacttatatggaagataaagacaattttgctatctatttcgtcgtaatcccatgtgctgttctgtctttcttcattcatccatcaacacgtcaccacatcataaacaggatttcttgggcattctgtgtttatcttgaagctgtttcagttcttcctcaattaagagtcatgcagaacactaagattgtggaaccattcactgcacattacgtatttgctttgggaattgctaggttcttgagttgtgcacactggatccttcaggtgttggatacgcgagggcggttactgactgcattagggtctggactgtggcctgtaatggtcctcatctctgaaatagtccaaaccttcattcttgcagatttctgctattactatgttcagagtttaatgggtggacagctcgttcttcgactcccgtctggtgtggtgtaaaaagctctgcgaaaatggagtgcttgagcttgtggagaggtttaatgattagggattttgagacactcgtatgatttaaaagtttttgatagcaaagaagcattaatgttaattcagattttagttgtgatgacgtttgactccacgatcatatgatttgatacacaacgcttacagtt

SEQ ID NO: 30621 - protein, 153 aa, Arabidopsis thaliana
  peptide (1)..(153): Ceres Seq. ID no. 12396834
  misc_feature (1)..(138): Pfam Name: ER lumen protein retaining receptor Pfam Description: ER lumen protein retaining receptor
  misc_feature (1)..(149): Homolog of NCBI NO: 15230808 NR Description: ER lumen protein retaining receptor, putative
  misc_feature (1)..(137): Homolog of NCBI NO: 25412019 NR Description: probable ER lumen protein retaining receptor
  misc_feature (1)..(153): Homolog of NCBI NO: 21537286 NR Description: putative ER lumen protein retaining receptor
  misc_feature (1)..(153): Homolog of NCBI NO: 13430654 NR Description: putative ER lumen protein retaining receptor
  misc_feature (1)..(153): Homolog of NCBI NO: 18399619 NR Description: putative ER lumen protein retaining receptor
  misc_feature (1)..(153): Homolog of NCBI NO: 18420309 NR Description: expressed protein
  misc_feature (1)..(153): Homolog of NCBI NO: 9369358 NR Description: F10A5.5 [Arabidopsis thaliana]
  misc_feature (1)..(153): Homolog of NCBI NO: 15222871 NR Description: ER lumen protein retaining receptor, putative
  misc_feature (1)..(153): Homolog of NCBI NO: 15223724 NR Description: ER lumen protein-retaining receptor; protein id:
  misc_feature (1)..(138): Homolog of NCBI NO: 25518365 NR Description: hypothetical protein T20H2.24 - Arabidopsis
MIRFKLRPTYMEDKDNFAIYFVVIPCAVLSFFIHPSTRHHIINRISWAFCVYLEAVSVLPQLRVMQNTKIVEPFTAHYVFALGIARFLSCAHWILQVLDTRGRLLTALGSGLWPVMVLISEIVQTFILADFCYYYVQSLMGGQLVLRLPSGVV

SEQ ID NO: 30622 - protein, 143 aa, Arabidopsis thaliana
  peptide (1)..(143): Ceres Seq. ID no. 12396835
  misc_feature (1)..(128): Pfam Name: ER lumen protein retaining receptor Pfam Description: ER lumen protein retaining receptor
  misc_feature (1)..(139): Homolog of NCBI NO: 15230808 NR Description: ER lumen protein retaining receptor, putative
  misc_feature (1)..(127): Homolog of NCBI NO: 25412019 NR Description: probable ER lumen protein retaining receptor
  misc_feature (1)..(143): Homolog of NCBI NO: 21537286 NR Description: putative ER lumen protein retaining receptor
  misc_feature (1)..(143): Homolog of NCBI NO: 13430654 NR Description: putative ER lumen protein retaining receptor
  misc_feature (1)..(143): Homolog of NCBI NO: 18399619 NR Description: putative ER lumen protein retaining receptor
  misc_feature (1)..(143): Homolog of NCBI NO: 18420309 NR Description: expressed protein
  misc_feature (1)..(143): Homolog of NCBI NO: 9369358 NR Description: F10A5.5 [Arabidopsis thaliana]
  misc_feature (1)..(143): Homolog of NCBI NO: 15222871 NR Description: ER lumen protein retaining receptor, putative
  misc_feature (1)..(143): Homolog of NCBI NO: 15223724 NR Description: ER lumen protein-retaining receptor; protein id:
  misc_feature (1)..(128): Homolog of NCBI NO: 25518365 NR Description: hypothetical protein T20H2.24 - Arabidopsis
MEDKDNFAIYFVVIPCAVLSFFIHPSTRHHIINRISWAFCVYLEAVSVLPQLRVMQNTKIVEPFTAHYVFALGIARFLSCAHWILQVLDTRGRLLTALGSGLWPVMVLISEIVQTFILADFCYYYVQSLMGGQLVLRLPSGVV

SEQ ID NO: 30623 - protein, 117 aa, Arabidopsis thaliana
  peptide (1)..(117): Ceres Seq. ID no. 12396836
  misc_feature (66)..(117): Pfam Name: ER lumen protein retaining receptor Pfam Description: ER lumen protein retaining receptor
  misc_feature (27)..(117): Homolog of NCBI NO: 15230808 NR Description: ER lumen protein retaining receptor, putative
  misc_feature (24)..(117): Homolog of NCBI NO: 25412019 NR Description: probable ER lumen protein retaining receptor
  misc_feature (24)..(117): Homolog of NCBI NO: 21537286 NR Description: putative ER lumen protein retaining receptor
  misc_feature (24)..(117): Homolog of NCBI NO: 13430654 NR Description: putative ER lumen protein retaining receptor
  misc_feature (24)..(117): Homolog of NCBI NO: 18399619 NR Description: putative ER lumen protein retaining receptor
  misc_feature (20)..(117): Homolog of NCBI NO: 18420309 NR Description: expressed protein
  misc_feature (20)..(117): Homolog of NCBI NO: 9369358 NR Description: F10A5.5 [Arabidopsis thaliana]
  misc_feature (20)..(117): Homolog of NCBI NO: 15222871 NR Description: ER lumen protein retaining receptor, putative
  misc_feature (20)..(117): Homolog of NCBI NO: 15223724 NR Description: ER lumen protein-retaining receptor; protein id:
  misc_feature (20)..(117): Homolog of NCBI NO: 25518365 NR Description: hypothetical protein T20H2.24 - Arabidopsis
FNHTFDLSEGERERDLVRTMKAEKNPIQSVMAWIRRQPPKVKAFLGVVTAMTVLVLLRVIVHEHDNLFVASEAVHAVGIAVLIYKLTKEKTCAGISLKTQELTALFLAVRLYCSFVM

SEQ ID NO: 30624 - DNA, 1657 bp, Arabidopsis thaliana
  misc_feature (1)..(1657): Ceres Seq. ID no. 13487118
  misc_feature: MA Experiment ID: 20000180 Result: Up-regulated in Transcription
  misc_feature: MA Experiment 20000180 PARAMETER Experiment Name: At_Germinating_Seeds_P Parameter: Age (hr) Value: 24 vs. 0
  misc_feature: MA Experiment 20000180 PARAMETER Experiment Name: At_Germinating_Seeds_P Parameter: Tissue Value: Germinating Seeds
  misc_feature: MA Experiment ID: 20000439 Result: Up-regulated in Transcription
  misc_feature: MA Experiment 20000439 PARAMETER Experiment Name: At_Roots__P Parameter: Age (day) Value: 14 vs. 21
  misc_feature: MA Experiment 20000439 PARAMETER Experiment Name: At_Roots__P Parameter: Organism Value: A. thaliana
  misc_feature: MA Experiment 20000439 PARAMETER Experiment Name: At_Roots__P Parameter: Tissue Value: Roots vs. Whole Plant
  misc_feature: MA Experiment ID: 20001247 Result: Up-regulated in Transcription
  misc_feature: MA Experiment 20001247 PARAMETER Experiment Name: At_Far-red-induction_P Parameter: Age (day) Value: 7
  misc_feature: MA Experiment 20001247 PARAMETER Experiment Name: At_Far-red-induction_P Parameter: Light Value: Far-red vs. White
  misc_feature: MA Experiment 20001247 PARAMETER Experiment Name: At_Far-red-induction_P Parameter: Organism Value: A. thaliana
  misc_feature: MA Experiment 20001247 PARAMETER Experiment Name: At_Far-red-induction_P Parameter: Plant Line Value: Columbia
  misc_feature: MA Experiment 20001247 PARAMETER Experiment Name: At_Far-red-induction_P Parameter: Timepoint (hr) Value: 1
  misc_feature: MA Experiment 20001247 PARAMETER Experiment Name: At_Far-red-induction_P Parameter: Tissue Value: Whole Plant
gaagacgacgaagtcgagagaaagaaataatggcggaggagacgatggagaacgaagagagggtgaagctgttcgtcggacaagttccgaagcacatgacggagattcagctcctcacattgtttcgagaattctccatcgtcaatgaagtcaacatcattaaagagaagacaacacgagctcctcgaggatgttgttttctgacatgtcctacaagggaagatgctgacaaggtgatcaatagttttcataacaagaagacattgcctggggcatctagtccgttgcaagttaagtatgcagatggcgagttggaaagactagagcacaaacttttcgtcggtatgcttccaaagaatgtctctgaaactgaagtccagtccttattctctgaatacggaaccattaaggatctacagattctaagagggtctctacaaactagcaaaggctgtctgtttctaaagtacgagtctaaagaacaagcggtcgcagctatggaagccctcaacggaagacatataatggagggagcaaatgttcctttgattgttaaatgggcagacacagaaaaggaaagacaagctcgaagacttctaaaagttcaatctcatgtctccagactcgatccgcaaaacccctccatgtttggagcattacctatgagttatgttcctccttacaatggatatggctatcatgtgcctggaacttatggctacatgctaccacctatccagactcaacatgcatttcacaatgtgatttcacctaaccaaggtaacggcagggcattgcagggaaccgctttgacagagtctgtcccaccacgtttggccccccgcagaaacttcccaacggctcttggaaattacggttaccatggtcttcaatatcctatggcatttcctagagggatgatacctcctcgccttcctctaaccacagtttcacctggaatttctaataacggcacatcgataccttcctcgcttcaaacagaaggaccagcaggtgcgaatctatttatttataacatacctcgggaattcgaggatcaagaactcgcggctacgtttcaaccttttggtaaggttctaagcgccaaggtgtttgtagacaaggccactggtataagcaaatgtttcggattcattagttatgactcacaggcagctgctcagaacgctattaacacaatgaacggttgccaattaagcggtaagaaattgaaagtccagcttaagagagacaacggtcaacagcagcaacaacaacagagtaaaaacccgttatttaacggtttattaaactcgtaaaaaccactgacatctcttcatcattaagagttcgctgtgcggttaacggcaaatccggttgagacactaagatggatcttgatggaactggagaacaaaaagttgatggccgtaattaactaacatttgccaagtctgatcatgtgggtcagaaattctcaatcactcagaaaagctgtatcttcatgcaaaaggattctcttccactcactcttcttctatttttctcttttctaaactttgtcaatttgtgacttatgtctatcattgaaaagttcatgtataaatgttatgattattaaccattataatttcatttattaatcttgttcattctc

SEQ ID NO: 30625 - protein, 438 aa, Arabidopsis thaliana
  peptide (1)..(438): Ceres Seq. ID no. 13487119
  misc_feature (341)..(412): Pfam Name: RNA recognition motif. (a.k.a. RRM, RBD, or RNP domain) Pfam Description: RNA recognition motif. (a.k.a. RRM, RBD, or RNP
  misc_feature (201)..(417): Homolog of NCBI NO: 33354193 NR Description: flowering time control protein FCA-like protein
  misc_feature (10)..(237): Homolog of NCBI NO: 33354193 NR Description: flowering time control protein FCA-like protein
  misc_feature (18)..(423): Homolog of NCBI NO: 34907248 NR Description: putative ribonucleoprotein
  misc_feature (13)..(388): Homolog of NCBI NO: 30679366 NR Description: RNA-binding protein, putative [Arabidopsis
  misc_feature (13)..(420): Homolog of NCBI NO: 7488303 NR Description: ribonucleoprotein homolog T4I9.1 - Arabidopsis
  misc_feature (13)..(430): Homolog of NCBI NO: 18412143 NR Description: RNA-binding protein, putative [Arabidopsis
  misc_feature (326)..(438): Homolog of NCBI NO: 7488302 NR Description: ribonucleoprotein homolog F21B7.26 - Arabidopsis
  misc_feature (10)..(295): Homolog of NCBI NO: 7488302 NR Description: ribonucleoprotein homolog F21B7.26 - Arabidopsis
  misc_feature (15)..(438): Homolog of NCBI NO: 25386552 NR Description: protein F21B7.8 [imported] - Arabidopsis thaliana
  misc_feature (10)..(438): Homolog of NCBI NO: 22329313 NR Description: RNA-binding protein, putative [Arabidopsis
RRRSREKEIMAEETMENEERVKLFVGQVPKHMTEIQLLTLFREFSIVNEVNIIKEKTTRAPRGCCFLTCPTREDADKVINSFHNKKTLPGASSPLQVKYADGELERLEHKLFVGMLPKNVSETEVQSLFSEYGTIKDLQILRGSLQTSKGCLFLKYESKEQAVAAMEALNGRHIMEGANVPLIVKWADTEKERQARRLLKVQSHVSRLDPQNPSMFGALPMSYVPPYNGYGYHVPGTYGYMLPPIQTQHAFHNVISPNQGNGRALQGTALTESVPPRLAPRRNFPTALGNYGYHGLQYPMAFPRGMIPPRLPLTTVSPGISNNGTSIPSSLQTEGPAGANLFIYNIPREFEDQELAATFQPFGKVLSAKVFVDKATGISKCFGFISYDSQAAAQNAINTMNGCQLSGKKLKVQLKRDNGQQQQQQQSKNPLFNGLLNS

SEQ ID NO: 30626 - protein, 429 aa, Arabidopsis thaliana
  peptide (1)..(429): Ceres Seq. ID no. 13487120
  misc_feature (332)..(403): Pfam Name: RNA recognition motif. (a.k.a. RRM, RBD, or RNP domain) Pfam Description: RNA recognition motif. (a.k.a. RRM, RBD, or RNP
  misc_feature (192)..(408): Homolog of NCBI NO: 33354193 NR Description: flowering time control protein FCA-like protein
  misc_feature (1)..(228): Homolog of NCBI NO: 33354193 NR Description: flowering time control protein FCA-like protein
  misc_feature (9)..(414): Homolog of NCBI NO: 34907248 NR Description: putative ribonucleoprotein
  misc_feature (4)..(379): Homolog of NCBI NO: 30679366 NR Description: RNA-binding protein, putative [Arabidopsis
  misc_feature (4)..(411): Homolog of NCBI NO: 7488303 NR Description: ribonucleoprotein homolog T4I9.1 - Arabidopsis
  misc_feature (4)..(421): Homolog of NCBI NO: 18412143 NR Description: RNA-binding protein, putative [Arabidopsis
  misc_feature (317)..(429): Homolog of NCBI NO: 7488302 NR Description: ribonucleoprotein homolog F21B7.26 - Arabidopsis
  misc_feature (1)..(286): Homolog of NCBI NO: 7488302 NR Description: ribonucleoprotein homolog F21B7.26 - Arabidopsis
  misc_feature (6)..(429): Homolog of NCBI NO: 25386552 NR Description: protein F21B7.8 [imported] - Arabidopsis thaliana
  misc_feature (1)..(429): Homolog of NCBI NO: 22329313 NR Description: RNA-binding protein, putative [Arabidopsis
MAEETMENEERVKLFVGQVPKHMTEIQLLTLFREFSIVNEVNIIKEKTTRAPRGCCFLTCPTREDADKVINSFHNKKTLPGASSPLQVKYADGELERLEHKLFVGMLPKNVSETEVQSLFSEYGTIKDLQILRGSLQTSKGCLFLKYESKEQAVAAMEALNGRHIMEGANVPLIVKWADTEKERQARRLLKVQSHVSRLDPQNPSMFGALPMSYVPPYNGYGYHVPGTYGYMLPPIQTQHAFHNVISPNQGNGRALQGTALTESVPPRLAPRRNFPTALGNYGYHGLQYPMAFPRGMIPPRLPLTTVSPGISNNGTSIPSSLQTEGPAGANLFIYNIPREFEDQELAATFQPFGKVLSAKVFVDKATGISKCFGFISYDSQAAAQNAINTMNGCQLSGKKLKVQLKRDNGQQQQQQQSKNPLFNGLLNS

SEQ ID NO: 30627 - protein, 424 aa, Arabidopsis thaliana
  peptide (1)..(424): Ceres Seq. ID no. 13487121
  misc_feature (327)..(398): Pfam Name: RNA recognition motif. (a.k.a. RRM, RBD, or RNP domain) Pfam Description: RNA recognition motif. (a.k.a. RRM, RBD, or RNP
  misc_feature (187)..(403): Homolog of NCBI NO: 33354193 NR Description: flowering time control protein FCA-like protein
  misc_feature (1)..(223): Homolog of NCBI NO: 33354193 NR Description: flowering time control protein FCA-like protein
  misc_feature (4)..(409): Homolog of NCBI NO: 34907248 NR Description: putative ribonucleoprotein
  misc_feature (1)..(374): Homolog of NCBI NO: 30679366 NR Description: RNA-binding protein, putative [Arabidopsis
  misc_feature (1)..(406): Homolog of NCBI NO: 7488303 NR Description: ribonucleoprotein homolog T4I9.1 - Arabidopsis
  misc_feature (1)..(416): Homolog of NCBI NO: 18412143 NR Description: RNA-binding protein, putative [Arabidopsis
  misc_feature (312)..(424): Homolog of NCBI NO: 7488302 NR Description: ribonucleoprotein homolog F21B7.26 - Arabidopsis
  misc_feature (1)..(281): Homolog of NCBI NO: 7488302 NR Description: ribonucleoprotein homolog F21B7.26 - Arabidopsis
  misc_feature (1)..(424): Homolog of NCBI NO: 25386552 NR Description: protein F21B7.8 [imported] - Arabidopsis thaliana
  misc_feature (1)..(424): Homolog of NCBI NO: 22329313 NR Description: RNA-binding protein, putative [Arabidopsis
MENEERVKLFVGQVPKHMTEIQLLTLFREFSIVNEVNIIKEKTTRAPRGCCFLTCPTREDADKVINSFHNKKTLPGASSPLQVKYADGELERLEHKLFVGMLPKNVSETEVQSLFSEYGTIKDLQILRGSLQTSKGCLFLKYESKEQAVAAMEALNGRHIMEGANVPLIVKWADTEKERQARRLLKVQSHVSRLDPQNPSMFGALPMSYVPPYNGYGYHVPGTYGYMLPPIQTQHAFHNVISPNQGNGRALQGTALTESVPPRLAPRRNFPTALGNYGYHGLQYPMAFPRGMIPPRLPLTTVSPGISNNGTSIPSSLQTEGPAGANLFIYNIPREFEDQELAATFQPFGKVLSAKVFVDKATGISKCFGFISYDSQAAAQNAINTMNGCQLSGKKLKVQLKRDNGQQQQQQQSKNPLFNGLLNS

SEQ ID NO: 30628 - DNA, 757 bp, Arabidopsis thaliana
  misc_feature (1)..(757): Ceres Seq. ID no. 12396975
  misc_feature: MA Experiment ID: 20000179 Result: Up-regulated in Transcription
  misc_feature: MA Experiment 20000179 PARAMETER Experiment Name: At_Germinating_Seeds_P Parameter: Age (hr) Value: 6 vs. 0
  misc_feature: MA Experiment 20000179 PARAMETER Experiment Name: At_Germinating_Seeds_P Parameter: Tissue Value: Germinating Seeds
  misc_feature: MA Experiment ID: 20000180 Result: Up-regulated in Transcription
  misc_feature: MA Experiment 20000180 PARAMETER Experiment Name: At_Germinating_Seeds_P Parameter: Age (hr) Value: 24 vs. 0
  misc_feature: MA Experiment 20000180 PARAMETER Experiment Name: At_Germinating_Seeds_P Parameter: Tissue Value: Germinating Seeds
aatgttgttgtttgagagagatgatggctgcgaagcttcagaaatggcgaaatctggcaggtcgtctagatctgatgaatcggagcggcgctgtgtcgacgaggcggttcctgcacgaaggtccagataccgtggaggagcttctcgaaagacatctagcgaagaaagagaaaccaataatcgatgacgatgaggctgagtttctgaatagacggcgtctgacgagcacgcgccgggaaacgttgagtttgtacagagacatattaagagcgactcggttcttcacgtggattgattccaggggaaatctatggagggacgtgttgagagagaacgcgaggaaggagtttgaagcggcgcgatttgagacagatccggaggttatcacaaggcttctgattggtggaagcgacgccgtttcttctgctttagataagcttgcggagaagcaaagagagatgattgagaaacaacgccgtggtgatcaacgctgatttgacggatcatagggcatgaatgtttcaacagaatgatccatcgagtttaaagtggttggtgtttgaaattcttgctgtaaaatggttgcgagaagaagaagcgagatcatttagaaacgtgcttacagaattttgggtttgatgtttgagtgttgtaattcacttgcacaacttacacacttcgtttctgaaattatcattcatgacattgtagagtttgtatacactgccacagagctataaacaaggcttttgatttt

SEQ ID NO: 30629 - protein, 163 aa, Arabidopsis thaliana
  peptide (1)..(163): Ceres Seq. ID no. 12396976
  misc_feature (75)..(144): Pfam Name: Complex 1 protein (LYR family) Pfam Description: Complex 1 protein (LYR family)
  misc_feature (7)..(163): Homolog of NCBI NO: 27754395 NR Description: unknown protein [Arabidopsis thaliana]
  misc_feature (7)..(163): Homolog of NCBI NO: 30699138 NR Description: expressed protein [Arabidopsis thaliana]
  misc_feature (1)..(163): Homolog of NCBI NO: 25373205 NR Description: protein T4O12.26 [imported] - Arabidopsis
CCCLREMMAAKLQKWRNLAGRLDLMNRSGAVSTRRFLHEGPDTVEELLERHLAKKEKPIIDDDEAEFLNRRRLTSTRRETLSLYRDILRATRFFTWIDSRGNLWRDVLRENARKEFEAARFETDPEVITRLLIGGSDAVSSALDKLAEKQREMIEKQRRGDQR

SEQ ID NO: 30630 - protein, 157 aa, Arabidopsis thaliana
  peptide (1)..(157): Ceres Seq. ID no. 12396977
  misc_feature (69)..(138): Pfam Name: Complex 1 protein (LYR family) Pfam Description: Complex 1 protein (LYR family)
  misc_feature (1)..(157): Homolog of NCBI NO: 27754395 NR Description: unknown protein [Arabidopsis thaliana]
  misc_feature (1)..(157): Homolog of NCBI NO: 30699138 NR Description: expressed protein [Arabidopsis thaliana]
  misc_feature (1)..(157): Homolog of NCBI NO: 25373205 NR Description: protein T4O12.26 [imported] - Arabidopsis
MMAAKLQKWRNLAGRLDLMNRSGAVSTRRFLHEGPDTVEELLERHLAKKEKPIIDDDEAEFLNRRRLTSTRRETLSLYRDILRATRFFTWIDSRGNLWRDVLRENARKEFEAARFETDPEVITRLLIGGSDAVSSALDKLAEKQREMIEKQRRGDQR

SEQ ID NO: 30631 - protein, 156 aa, Arabidopsis thaliana
  peptide (1)..(156): Ceres Seq. ID no. 12396978
  misc_feature (68)..(137): Pfam Name: Complex 1 protein (LYR family) Pfam Description: Complex 1 protein (LYR family)
  misc_feature (1)..(156): Homolog of NCBI NO: 27754395 NR Description: unknown protein [Arabidopsis thaliana]
  misc_feature (1)..(156): Homolog of NCBI NO: 30699138 NR Description: expressed protein [Arabidopsis thaliana]
  misc_feature (1)..(156): Homolog of NCBI NO: 25373205 NR Description: protein T4O12.26 [imported] - Arabidopsis
MAAKLQKWRNLAGRLDLMNRSGAVSTRRFLHEGPDTVEELLERHLAKKEKPIIDDDEAEFLNRRRLTSTRRETLSLYRDILRATRFFTWIDSRGNLWRDVLRENARKEFEAARFETDPEVITRLLIGGSDAVSSALDKLAEKQREMIEKQRRGDQR

SEQ ID NO: 30632 - DNA, 1828 bp, Arabidopsis thaliana
  misc_feature (1)..(1828): Ceres Seq. ID no. 13612923
  misc_feature: MA Experiment ID: 108433 Result: Up-regulated in Transcription
  misc_feature: MA Experiment 108433 PARAMETER Experiment Name: At_rhl_Mutant2_cDNA_P Parameter: Age (day) Value: 7
  misc_feature: MA Experiment 108433 PARAMETER Experiment Name: At_rhl_Mutant2_cDNA_P Parameter: Organism Value: A. thaliana
  misc_feature: MA Experiment 108433 PARAMETER Experiment Name: At_rhl_Mutant2_cDNA_P Parameter: Plant Line Value: rhl Mutant vs. wt landsburg
  misc_feature: MA Experiment 108433 PARAMETER Experiment Name: At_rhl_Mutant2_cDNA_P Parameter: Tissue Value: Roots
  misc_feature: MA Experiment ID: 108572 Result: Up-regulated in Transcription
  misc_feature: MA Experiment 108572 PARAMETER Experiment Name: At_Drought_cDNA_P Parameter: Timepoint (hr) Value: 1
  misc_feature: MA Experiment 108572 PARAMETER Experiment Name: At_Drought_cDNA_P Parameter: Tissue Value: Aerial
  misc_feature: MA Experiment 108572 PARAMETER Experiment Name: At_Drought_cDNA_P Parameter: Treatment Value: Drought vs. No Drought
  misc_feature: MA Experiment ID: 108573 Result: Up-regulated in Transcription
  misc_feature: MA Experiment 108573 PARAMETER Experiment Name: At_Drought_cDNA_P Parameter: Timepoint (hr) Value: 6
  misc_feature: MA Experiment 108573 PARAMETER Experiment Name: At_Drought_cDNA_P Parameter: Tissue Value: Aerial
  misc_feature: MA Experiment 108573 PARAMETER Experiment Name: At_Drought_cDNA_P Parameter: Treatment Value: Drought vs. No Drought
  misc_feature: MA Experiment ID: 108579 Result: Up-regulated in Transcription
  misc_feature: MA Experiment 108579 PARAMETER Experiment Name: At_4deg_Cold_cDNA_P Parameter: Temperature (deg C) Value: 4 vs. 22
  misc_feature: MA Experiment 108579 PARAMETER Experiment Name: At_4deg_Cold_cDNA_P Parameter: Timepoint (hr) Value: 6
  misc_feature: MA Experiment 108579 PARAMETER Experiment Name: At_4deg_Cold_cDNA_P Parameter: Tissue Value: Aerial
  misc_feature: MA Experiment ID: 108607 Result: Up-regulated in Transcription
  misc_feature: MA Experiment 108607 PARAMETER Experiment Name: At_100uM_ABA_cDNA_P Parameter: Timepoint (hr) Value: 4
  misc_feature: MA Experiment 108607 PARAMETER Experiment Name: At_100uM_ABA_cDNA_P Parameter: Tissue Value: Aerial
  misc_feature: MA Experiment 108607 PARAMETER Experiment Name: At_100uM_ABA_cDNA_P Parameter: Treatment Value: 100uM ABA vs. No Treatment
  misc_feature: MA Experiment ID: 20000030 Result: Down-regulated in Transcription
  misc_feature: MA Experiment 20000030 PARAMETER Experiment Name: At_CS6630_Roots_cDNA_P Parameter: Plant Line Value: CS6630 vs. WS
  misc_feature: MA Experiment 20000030 PARAMETER Experiment Name: At_CS6630_Roots_cDNA_P Parameter: Tissue Value: Roots
  misc_feature: MA Experiment ID: 20000072 Result: Up-regulated in Transcription
  misc_feature: MA Experiment 20000072 PARAMETER Experiment Name: At_100uM_ABA_Mutants_cDNA_P Parameter: Plant Line Value: CS8105
  misc_feature: MA Experiment 20000072 PARAMETER Experiment Name: At_100uM_ABA_Mutants_cDNA_P Parameter: Timepoint (hr) Value: 6
  misc_feature: MA Experiment 20000072 PARAMETER Experiment Name: At_100uM_ABA_Mutants_cDNA_P Parameter: Tissue Value: Aerial
  misc_feature: MA Experiment 20000072 PARAMETER Experiment Name: At_100uM_ABA_Mutants_cDNA_P Parameter: Treatment Value: 100uM ABA vs. No Treatment
  misc_feature: MA Experiment ID: 20000111 Result: Down-regulated in Transcription
  misc_feature: MA Experiment 20000111 PARAMETER Experiment Name: At_42deg_Heat_cDNA_P Parameter: Temperature (deg C) Value: 42 vs. 22
  misc_feature: MA Experiment 20000111 PARAMETER Experiment Name: At_42deg_Heat_cDNA_P Parameter: Timepoint (hr) Value: 6
  misc_feature: MA Experiment 20000111 PARAMETER Experiment Name: At_42deg_Heat_cDNA_P Parameter: Tissue Value: Aerial
  misc_feature: MA Experiment ID: 20000112 Result: Down-regulated in Transcription
  misc_feature: MA Experiment 20000112 PARAMETER Experiment Name: At_42deg_Heat_cDNA_P Parameter: Temperature (deg C) Value: 42 vs. 22
  misc_feature: MA Experiment 20000112 PARAMETER Experiment Name: At_42deg_Heat_cDNA_P Parameter: Timepoint (hr) Value: 2
  misc_feature: MA Experiment 20000112 PARAMETER Experiment Name: At_42deg_Heat_cDNA_P Parameter: Tissue Value: Aerial
  misc_feature: MA Experiment ID: 20000144 Result: Down-regulated in Transcription
  misc_feature: MA Experiment 20000144 PARAMETER Experiment Name: At_42deg_Heat_cDNA_P Parameter: Temperature (deg C) Value: 42 vs. 22
  misc_feature: MA Experiment 20000144 PARAMETER Experiment Name: At_42deg_Heat_cDNA_P Parameter: Timepoint (hr) Value: 1
  misc_feature: MA Experiment 20000144 PARAMETER Experiment Name: At_42deg_Heat_cDNA_P Parameter: Tissue Value: Aerial
  misc_feature: MA Experiment ID: 20000171 Result: Down-regulated in Transcription
  misc_feature: MA Experiment 20000171 PARAMETER Experiment Name: At_42deg_Heat_P Parameter: Age (day) Value: 14
  misc_feature: MA Experiment 20000171 PARAMETER Experiment Name: At_42deg_Heat_P Parameter: Organism Value: A. thaliana
  misc_feature: MA Experiment 20000171 PARAMETER Experiment Name: At_42deg_Heat_P Parameter: Plant Line Value: WS
  misc_feature: MA Experiment 20000171 PARAMETER Experiment Name: At_42deg_Heat_P Parameter: Temperature (deg C) Value: 42 vs. 22
  misc_feature: MA Experiment 20000171 PARAMETER Experiment Name: At_42deg_Heat_P Parameter: Timepoint (hr) Value: 1
  misc_feature: MA Experiment 20000171 PARAMETER Experiment Name: At_42deg_Heat_P Parameter: Tissue Value: Aerial
  misc_feature: MA Experiment ID: 20000173 Result: Down-regulated in Transcription
  misc_feature: MA Experiment 20000173 PARAMETER Experiment Name: At_42deg_Heat_P Parameter: Age (day) Value: 14
  misc_feature: MA Experiment 20000173 PARAMETER Experiment Name: At_42deg_Heat_P Parameter: Organism Value: A. thaliana
  misc_feature: MA Experiment 20000173 PARAMETER Experiment Name: At_42deg_Heat_P Parameter: Plant Line Value: WS
  misc_feature: MA Experiment 20000173 PARAMETER Experiment Name: At_42deg_Heat_P Parameter: Temperature (deg C) Value: 42 vs. 22
  misc_feature: MA Experiment 20000173 PARAMETER Experiment Name: At_42deg_Heat_P Parameter: Timepoint (hr) Value: 6
  misc_feature: MA Experiment 20000173 PARAMETER Experiment Name: At_42deg_Heat_P Parameter: Tissue Value: Aerial
  misc_feature: MA Experiment ID: 20000184 Result: Up-regulated in Transcription
  misc_feature: MA Experiment 20000184 PARAMETER Experiment Name: At_Shoots__P Parameter: Age (day) Value: 7
  misc_feature: MA Experiment 20000184 PARAMETER Experiment Name: At_Shoots__P Parameter: Tissue Value: Shoots vs. Whole Plant
  misc_feature: MA Experiment ID: 20000235 Result: Up-regulated in Transcription
  misc_feature: MA Experiment 20000235 PARAMETER Experiment Name: At_Siliques_P Parameter: Age (day) Value: 21
  misc_feature: MA Experiment 20000235 PARAMETER Experiment Name: At_Siliques_P Parameter: Organism Value: A. thaliana
  misc_feature: MA Experiment 20000235 PARAMETER Experiment Name: At_Siliques_P Parameter: Plant Line Value: WS
  misc_feature: MA Experiment 20000235 PARAMETER Experiment Name: At_Siliques_P Parameter: Tissue Value: 5-10mm Siliques vs. Whole Plant
  misc_feature: MA Experiment ID: 20000286 Result: Up-regulated in Transcription
  misc_feature: MA Experiment 20000286 PARAMETER Experiment Name: At_Open_Flower_P Parameter: Age (day) Value: 21
  misc_feature: MA Experiment 20000286 PARAMETER Experiment Name: At_Open_Flower_P Parameter: Plant Line Value: WS
  misc_feature: MA Experiment 20000286 PARAMETER Experiment Name: At_Open_Flower_P Parameter: Tissue Value: Half Open vs. Whole Plant
  misc_feature: MA Experiment ID: 20000437 Result: Up-regulated in Transcription
  misc_feature: MA Experiment 20000437 PARAMETER Experiment Name: At_Drought_P Parameter: Age (day) Value: 8
  misc_feature: MA Experiment 20000437 PARAMETER Experiment Name: At_Drought_P Parameter: Organism Value: A. thaliana
  misc_feature: MA Experiment 20000437 PARAMETER Experiment Name: At_Drought_P Parameter: Plant Line Value: WS
  misc_feature: MA Experiment 20000437 PARAMETER Experiment Name: At_Drought_P Parameter: Timepoint (hr) Value: 24
  misc_feature: MA Experiment 20000437 PARAMETER Experiment Name: At_Drought_P Parameter: Tissue Value: Whole Plant
  misc_feature: MA Experiment 20000437 PARAMETER Experiment Name: At_Drought_P Parameter: Treatment Value: Drought vs. No Drought
  misc_feature: MA Experiment ID: 20000573 Result: Down-regulated in Transcription
  misc_feature: MA Experiment 20000573 PARAMETER Experiment Name: At_100uM_ABA_Mutants__P Parameter: Organism Value: A. thaliana
  misc_feature: MA Experiment 20000573 PARAMETER Experiment Name: At_100uM_ABA_Mutants__P Parameter: Plant Line Value: CS22 vs. Ler wt
  misc_feature: MA Experiment 20000573 PARAMETER Experiment Name: At_100uM_ABA_Mutants__P Parameter: Timepoint (hr) Value: N/A
  misc_feature: MA Experiment 20000573 PARAMETER Experiment Name: At_100uM_ABA_Mutants__P Parameter: Tissue Value: Whole Plant
  misc_feature: MA Experiment 20000573 PARAMETER Experiment Name: At_100uM_ABA_Mutants__P Parameter: Treatment Value: None
  misc_feature: MA Experiment ID: 20000574 Result: Down-regulated in Transcription
  misc_feature: MA Experiment 20000574 PARAMETER Experiment Name: At_100uM_ABA_Mutants__P Parameter: Organism Value: A. thaliana
  misc_feature: MA Experiment 20000574 PARAMETER Experiment Name: At_100uM_ABA_Mutants__P Parameter: Plant Line Value: CS23 vs. Ler wt
  misc_feature: MA Experiment 20000574 PARAMETER Experiment Name: At_100uM_ABA_Mutants__P Parameter: Timepoint (hr) Value: N/A
  misc_feature: MA Experiment 20000574 PARAMETER Experiment Name: At_100uM_ABA_Mutants__P Parameter: Tissue Value: Whole Plant
  misc_feature: MA Experiment 20000574 PARAMETER Experiment Name: At_100uM_ABA_Mutants__P Parameter: Treatment Value: None
  misc_feature: MA Experiment ID: 20000794 Result: Up-regulated in Transcription
  misc_feature: MA Experiment 20000794 PARAMETER Experiment Name: At_Petals_P Parameter: Age (day) Value: 23-25 days
  misc_feature: MA Experiment 20000794 PARAMETER Experiment Name: At_Petals_P Parameter: Plant Line Value: WS
  misc_feature: MA Experiment 20000794 PARAMETER Experiment Name: At_Petals_P Parameter: Tissue Value: Petals vs. Whole plant
  misc_feature: MA Experiment ID: 20001247 Result: Up-regulated in Transcription
  misc_feature: MA Experiment 20001247 PARAMETER Experiment Name: At_Far-red-induction_P Parameter: Age (day) Value: 7
  misc_feature: MA Experiment 20001247 PARAMETER Experiment Name: At_Far-red-induction_P Parameter: Light Value: Far-red vs. White
  misc_feature: MA Experiment 20001247 PARAMETER Experiment Name: At_Far-red-induction_P Parameter: Organism Value: A. thaliana
  misc_feature: MA Experiment 20001247 PARAMETER Experiment Name: At_Far-red-induction_P Parameter: Plant Line Value: Columbia
  misc_feature: MA Experiment 20001247 PARAMETER Experiment Name: At_Far-red-induction_P Parameter: Timepoint (hr) Value: 1
  misc_feature: MA Experiment 20001247 PARAMETER Experiment Name: At_Far-red-induction_P Parameter: Tissue Value: Whole Plant
  misc_feature: MA Experiment ID: 20001557 Result: Up-regulated in Transcription
  misc_feature: MA Experiment 20001557 PARAMETER Experiment Name: At_Drought_Soil_Dry_P Parameter: Age (day) Value: 27
  misc_feature: MA Experiment 20001557 PARAMETER Experiment Name: At_Drought_Soil_Dry_P Parameter: Organism Value: A. thaliana
  misc_feature: MA Experiment 20001557 PARAMETER Experiment Name: At_Drought_Soil_Dry_P Parameter: Plant Line Value: WS
  misc_feature: MA Experiment 20001557 PARAMETER Experiment Name: At_Drought_Soil_Dry_P Parameter: Post Timepoint (hr) Value: 3
  misc_feature: MA Experiment 20001557 PARAMETER Experiment Name: At_Drought_Soil_Dry_P Parameter: Post-Treatment Value: Re-Water vs. No Drought
  misc_feature: MA Experiment 20001557 PARAMETER Experiment Name: At_Drought_Soil_Dry_P Parameter: Timepoint (day) Value: 13
  misc_feature: MA Experiment 20001557 PARAMETER Experiment Name: At_Drought_Soil_Dry_P Parameter: Treatment Value: Drought vs. No Drought
  misc_feature: MA Experiment ID: 20001558 Result: Up-regulated in Transcription
  misc_feature: MA Experiment 20001558 PARAMETER Experiment Name: At_Drought_Soil_Dry_P Parameter: Age (day) Value: 27
  misc_feature: MA Experiment 20001558 PARAMETER Experiment Name: At_Drought_Soil_Dry_P Parameter: Organism Value: A. thaliana
  misc_feature: MA Experiment 20001558 PARAMETER Experiment Name: At_Drought_Soil_Dry_P Parameter: Plant Line Value: WS
  misc_feature: MA Experiment 20001558 PARAMETER Experiment Name: At_Drought_Soil_Dry_P Parameter: Post Timepoint (hr) Value: 6
  misc_feature: MA Experiment 20001558 PARAMETER Experiment Name: At_Drought_Soil_Dry_P Parameter: Post-Treatment Value: Re-Water vs. No Drought
  misc_feature: MA Experiment 20001558 PARAMETER Experiment Name: At_Drought_Soil_Dry_P Parameter: Timepoint (day) Value: 13
  misc_feature: MA Experiment 20001558 PARAMETER Experiment Name: At_Drought_Soil_Dry_P Parameter: Treatment Value: Drought vs. No Drought
  misc_feature: MA Experiment ID: 20001906 Result: Down-regulated in Transcription
  misc_feature: MA Experiment 20001906 PARAMETER Experiment Name: At_Drought_Reproduction_P Parameter: Age (day) Value: 35
  misc_feature: MA Experiment 20001906 PARAMETER Experiment Name: At_Drought_Reproduction_P Parameter: Organism Value: A. thaliana
  misc_feature: MA Experiment 20001906 PARAMETER Experiment Name: At_Drought_Reproduction_P Parameter: Plant Line Value: WS
  misc_feature: MA Experiment 20001906 PARAMETER Experiment Name: At_Drought_Reproduction_P Parameter: Timepoint (day) Value: 5
  misc_feature: MA Experiment 20001906 PARAMETER Experiment Name: At_Drought_Reproduction_P Parameter: Tissue Value: Siliques
  misc_feature: MA Experiment 20001906 PARAMETER Experiment Name: At_Drought_Reproduction_P Parameter: Treatment Value: Drought vs. No Drought
  misc_feature: MA Experiment ID: 20001908 Result: Down-regulated in Transcription
  misc_feature: MA Experiment 20001908 PARAMETER Experiment Name: At_Drought_Reproduction_P Parameter: Age (day) Value: 40
  misc_feature: MA Experiment 20001908 PARAMETER Experiment Name: At_Drought_Reproduction_P Parameter: Organism Value: A. thaliana
  misc_feature: MA Experiment 20001908 PARAMETER Experiment Name: At_Drought_Reproduction_P Parameter: Plant Line Value: WS
  misc_feature: MA Experiment 20001908 PARAMETER Experiment Name: At_Drought_Reproduction_P Parameter: Timepoint (day) Value: 10
  misc_feature: MA Experiment 20001908 PARAMETER Experiment Name: At_Drought_Reproduction_P Parameter: Tissue Value: Siliques
  misc_feature: MA Experiment 20001908 PARAMETER Experiment Name: At_Drought_Reproduction_P Parameter: Treatment Value: Drought vs. No Drought
  misc_feature: MA Experiment ID: 20001911 Result: Down-regulated in Transcription
  misc_feature: MA Experiment 20001911 PARAMETER Experiment Name: At_Drought_Reproduction_P Parameter: Age (day) Value: 40
  misc_feature: MA Experiment 20001911 PARAMETER Experiment Name: At_Drought_Reproduction_P Parameter: Organism Value: A. thaliana
  misc_feature: MA Experiment 20001911 PARAMETER Experiment Name: At_Drought_Reproduction_P Parameter: Plant Line Value: WS
  misc_feature: MA Experiment 20001911 PARAMETER Experiment Name: At_Drought_Reproduction_P Parameter: Timepoint (day) Value: 10
  misc_feature: MA Experiment 20001911 PARAMETER Experiment Name: At_Drought_Reproduction_P Parameter: Tissue Value: Flowers
  misc_feature: MA Experiment 20001911 PARAMETER Experiment Name: At_Drought_Reproduction_P Parameter: Treatment Value: Drought vs. No Drought
aggccattctcttttctcctctctctctctctcacacaacacaaacaactcttgagagagagaaacaaatctttcacttgacacttctctccaaatcctcatctcattcttcatcctaaacatttgctcattctcacgatgagccataaccaaaaccaacctcaccggccagtcccggtccatgtcacaaacgccgagccaaaccctaacccaaacaacctcccaaactttctattatccgtccgtctcaaatacgtaaaactcggttaccactacctaatctccaacgctctctacatcctcctccttcctctcctcgccgcaacaatcgctaacctctcttctttcaccatcaacgacctctctctcctctacaacacactccgtttccatttcctctccgccacactcgccaccgcactcttaatctctctctccaccgcttacttcaccacccgtccccgccgtgtcttcctcctcgacttctcgtgttacaaaccagacccttcactgatctgcactcgtgaaacattcatggacagatctcaacgtgtaggcatcttcacagaagacaacttagctttccaacaaaagatcctcgaaagatccggtctaggtcagaaaacttacttccctgaagctcttcttcgtgttcctcctaatccttgtatggaagaagcgagaaaagaggcagaaacagttatgttcggagctattgacgcggttcttgagaagaccggtgtgaaacctaaagatattggaatccttgtggtgaattgtagcttgtttaatccaacaccgtcactttctgctatgattgtgaataagtataagcttagaggcaacattttgagctataatcttggtggaatgggatgtagtgctggccttatctccattgatctcgctaaacagatgcttcaggtgcaaccaaactcatacgcactagtggtgagcacagagaacataaccctaaactggtacttaggcaacgaccgatcaatgcttctatctaactgtatcttccgtatgggcggagccgcggtacttctctcgaaccgctcctctgatcgcagccgttcaaaatatcagctcatccataccgtccgtacccacaaaggagctgatgacaacgcatttggctgtgtttaccaacgagaagacaacaacgcagaagaaaccggcaaaatcggagtgtccctctctaaaaacctaatggcgatagctggagaagctctcaagacaaacatcacaactctcggaccactagttctaccaatgtccgaacaacttctctttttcgcgactcttgtggcccgaaaagtcttcaaagtcaagaaaataaagccttacattcctgatttcaagctagctttcgagcatttctgtatccacgcgggaggtagagccgtgctcgacgagattgagaagaacttggatttatccgaatggcacatggagccatcgaggatgacgttgaaccggtttggtaacacttcgagtagctcactttggtatgagcttgcgtatagtgaagctaaaggaaggattaagagaggagataggacttggcagattgcttttggatcgggttttaagtgtaatagtgcagtttggaaagctttgagaacgattgatccaatggacgagaagactaatccatggattgatgagattgatgactttcctgttcaagttcctaggatcactcccattacatcgtcgtagtgttttaaattcttttggagaactaatttgttatgttttattaaatgtaataacttacgtgatttgatatttttttattatcttaatatatatgattgcc

SEQ ID NO: 30633 - protein, 529 aa, Arabidopsis thaliana [sequence omitted]

SEQ ID NO: 30634 - protein, 397 aa, Arabidopsis thaliana
  peptide (1)..(397): Ceres Seq. ID no. 13612925
  misc_feature (218)..(365): Pfam Name: Chalcone and stilbene synthases, C-terminal domain Pfam Description: Chalcone and stilbene synthases, C-terminal
  misc_feature (1)..(389): Homolog of NCBI NO: 19908404 NR Description: putative fatty acid elongase [Tropaeolum majus]
  misc_feature (1)..(392): Homolog of NCBI NO: 29417540 NR Description: beta-ketoacyl-CoA-synthase [Marchantia polymorpha]
  misc_feature (1)..(388): Homolog of NCBI NO: 11066477 NR Description: fatty acid elongase 1-like protein [Limnanthes
  misc_feature (1)..(396): Homolog of NCBI NO: 1045614 NR Description: beta-ketoacyl-CoA synthase
  misc_feature (1)..(394): Homolog of NCBI NO: 15225767 NR Description: beta-ketoacyl-CoA synthase, putative [Arabidopsis
  misc_feature (1)..(394): Homolog of NCBI NO: 9714501 NR Description: putative fatty acid elongase [Zea mays]
  misc_feature (1)..(397): Homolog of NCBI NO: 18377979 NR Description: putative beta-ketoacyl-CoA synthase [Arabidopsis
  misc_feature (1)..(397): Homolog of NCBI NO: 15219676 NR Description: beta-ketoacyl-CoA synthase, putative [Arabidopsis
  misc_feature (1)..(397): Homolog of NCBI NO: 14334714 NR Description: putative beta-ketoacyl-CoA synthase [Arabidopsis
  misc_feature (1)..(397): Homolog of NCBI NO: 15239981 NR Description: beta-ketoacyl-CoA synthase, putative [Arabidopsis
MDRSQRVGIFTEDNLAFQQKILERSGLGQKTYFPEALLRVPPNPCMEEARKEAETVMFGAIDAVLEKTGVKPKDIGILVVNCSLFNPTPSLSAMIVNKYKLRGNILSYNLGGMGCSAGLISIDLAKQMLQVQPNSYALVVSTENITLNWYLGNDRSMLLSNCIFRMGGAAVLLSNRSSDRSRSKYQLIHTVRTHKGADDNAFGCVYQREDNNAEETGKIGVSLSKNLMAIAGEALKTNITTLGPLVLPMSEQLLFFATLVARKVFKVKKIKPYIPDFKLAFEHFCIHAGGRAVLDEIEKNLDLSEWHMEPSRMTLNRFGNTSSSSLWYELAYSEAKGRIKRGDRTWQIAFGSGFKCNSAVWKALRTIDPMDEKTNPWIDEIDDFPVQVPRITPITSS

SEQ ID NO: 30635 - protein, 352 aa, Arabidopsis thaliana
  peptide (1)..(352): Ceres Seq. ID no. 13612926
  misc_feature (173)..(320): Pfam Name: Chalcone and stilbene synthases, C-terminal domain Pfam Description: Chalcone and stilbene synthases, C-terminal
  misc_feature (1)..(344): Homolog of NCBI NO: 19908404 NR Description: putative fatty acid elongase [Tropaeolum majus]
  misc_feature (1)..(347): Homolog of NCBI NO: 29417540 NR Description: beta-ketoacyl-CoA-synthase [Marchantia polymorpha]
  misc_feature (1)..(343): Homolog of NCBI NO: 11066477 NR Description: fatty acid elongase 1-like protein [Limnanthes
  misc_feature (1)..(351): Homolog of NCBI NO: 1045614 NR Description: beta-ketoacyl-CoA synthase
  misc_feature (1)..(349): Homolog of NCBI NO: 15225767 NR Description: beta-ketoacyl-CoA synthase, putative [Arabidopsis
  misc_feature (1)..(349): Homolog of NCBI NO: 9714501 NR Description: putative fatty acid elongase [Zea mays]
  misc_feature (1)..(352): Homolog of NCBI NO: 18377979 NR Description: putative beta-ketoacyl-CoA synthase [Arabidopsis
  misc_feature (1)..(352): Homolog of NCBI NO: 15219676 NR Description: beta-ketoacyl-CoA synthase, putative [Arabidopsis
  misc_feature (1)..(352): Homolog of NCBI NO: 14334714 NR Description: putative beta-ketoacyl-CoA synthase [Arabidopsis
  misc_feature (1)..(352): Homolog of NCBI NO: 15239981 NR Description: beta-ketoacyl-CoA synthase, putative [Arabidopsis
MEEARKEAETVMFGAIDAVLEKTGVKPKDIGILVVNCSLFNPTPSLSAMIVNKYKLRGNILSYNLGGMGCSAGLISIDLAKQMLQVQPNSYALVVSTENITLNWYLGNDRSMLLSNCIFRMGGAAVLLSNRSSDRSRSKYQLIHTVRTHKGADDNAFGCVYQREDNNAEETGKIGVSLSKNLMAIAGEALKTNITTLGPLVLPMSEQLLFFATLVARKVFKVKKIKPYIPDFKLAFEHFCIHAGGRAVLDEIEKNLDLSEWHMEPSRMTLNRFGNTSSSSLWYELAYSEAKGRIKRGDRTWQIAFGSGFKCNSAVWKALRTIDPMDEKTNPWIDEIDDFPVQVPRITPITSS

SEQ ID NO: 30636 - DNA, 1214 bp, Arabidopsis thaliana
  misc_feature (1)..(1214): Ceres Seq. ID no. 12333327
  misc_feature: MA Experiment ID: 108434 Result: Down-regulated in Transcription
  misc_feature: MA Experiment 108434 PARAMETER Experiment Name: At_Root_Tips_cDNA_P Parameter: Tissue Value: Root Tips
  misc_feature: MA Experiment ID: 108461 Result: Up-regulated in Transcription
  misc_feature: MA Experiment 108461 PARAMETER Experiment Name: At_Germinating_Seeds_cDNA_P Parameter: Age (day) Value: 1 vs. 0
  misc_feature: MA Experiment 108461 PARAMETER Experiment Name: At_Germinating_Seeds_cDNA_P Parameter: Tissue Value: Germinating Seeds
  misc_feature: MA Experiment ID: 108462 Result: Up-regulated in Transcription
  misc_feature: MA Experiment 108462 PARAMETER Experiment Name: At_Germinating_Seeds_cDNA_P Parameter: Age (day) Value: 2 vs. 0
  misc_feature: MA Experiment 108462 PARAMETER Experiment Name: At_Germinating_Seeds_cDNA_P Parameter: Tissue Value: Germinating Seeds
  misc_feature: MA Experiment ID: 108463 Result: Up-regulated in Transcription
  misc_feature: MA Experiment 108463 PARAMETER Experiment Name: At_Germinating_Seeds_cDNA_P Parameter: Age (day) Value: 3 vs. 0
  misc_feature: MA Experiment 108463 PARAMETER Experiment Name: At_Germinating_Seeds_cDNA_P Parameter: Tissue Value: Germinating Seeds
  misc_feature: MA Experiment ID: 108577 Result: Down-regulated in Transcription
  misc_feature: MA Experiment 108577 PARAMETER Experiment Name: At_42deg_Heat_cDNA_P Parameter: Temperature (deg C) Value: 42 vs. 22
  misc_feature: MA Experiment 108577 PARAMETER Experiment Name: At_42deg_Heat_cDNA_P Parameter: Timepoint (hr) Value: 6
  misc_feature: MA Experiment 108577 PARAMETER Experiment Name: At_42deg_Heat_cDNA_P Parameter: Tissue Value: Aerial
  misc_feature: MA Experiment ID: 108668 Result: Down-regulated in Transcription
  misc_feature: MA Experiment 108668 PARAMETER Experiment Name: At_2mM_SA_cDNA_P Parameter: Plant Line Value: WS
  misc_feature: MA Experiment 108668 PARAMETER Experiment Name: At_2mM_SA_cDNA_P Parameter: Timepoint (hr) Value: 6
  misc_feature: MA Experiment 108668 PARAMETER Experiment Name: At_2mM_SA_cDNA_P Parameter: Treatment Value: 2mM SA vs. No Treatment
  misc_feature: MA Experiment ID: 20000069 Result: Down-regulated in Transcription
  misc_feature: MA Experiment 20000069 PARAMETER Experiment Name: At_100uM_ABA_Mutants_cDNA_P Parameter: Plant Line Value: CS23
  misc_feature: MA Experiment 20000069 PARAMETER Experiment Name: At_100uM_ABA_Mutants_cDNA_P Parameter: Timepoint (hr) Value: 6
  misc_feature: MA Experiment 20000069 PARAMETER Experiment Name: At_100uM_ABA_Mutants_cDNA_P Parameter: Tissue Value: Aerial
  misc_feature: MA Experiment 20000069 PARAMETER Experiment Name: At_100uM_ABA_Mutants_cDNA_P Parameter: Treatment Value: 100uM ABA vs. No Treatment
  misc_feature: MA Experiment ID: 20000089 Result: Down-regulated in Transcription
  misc_feature: MA Experiment ID: 20000090 Result: Down-regulated in Transcription
  misc_feature: MA Experiment ID: 20000179 Result: Up-regulated in Transcription
  misc_feature: MA Experiment 20000179 PARAMETER Experiment Name: At_Germinating_Seeds_P Parameter: Age (hr) Value: 6 vs. 0
  misc_feature: MA Experiment 20000179 PARAMETER Experiment Name: At_Germinating_Seeds_P Parameter: Tissue Value: Germinating Seeds
  misc_feature: MA Experiment ID: 20000180 Result: Up-regulated in Transcription
  misc_feature: MA Experiment 20000180 PARAMETER Experiment Name: At_Germinating_Seeds_P Parameter: Age (hr) Value: 24 vs. 0
  misc_feature: MA Experiment 20000180 PARAMETER Experiment Name: At_Germinating_Seeds_P Parameter: Tissue Value: Germinating Seeds
  misc_feature: MA Experiment ID: 20000182 Result: Down-regulated in Transcription
  misc_feature: MA Experiment 20000182 PARAMETER Experiment Name: At_2mM_SA_P Parameter: Age (day) Value: 14
  misc_feature: MA Experiment 20000182 PARAMETER Experiment Name: At_2mM_SA_P Parameter: Organism Value: A. thaliana
  misc_feature: MA Experiment 20000182 PARAMETER Experiment Name: At_2mM_SA_P Parameter: Plant Line Value: WS
  misc_feature: MA Experiment 20000182 PARAMETER Experiment Name: At_2mM_SA_P Parameter: Timepoint (hr) Value: 6
  misc_feature: MA Experiment 20000182 PARAMETER Experiment Name: At_2mM_SA_P Parameter: Tissue Value: Aerial
  misc_feature: MA Experiment 20000182 PARAMETER Experiment Name: At_2mM_SA_P Parameter: Treatment Value: 2mM SA vs. No Treatment
  misc_feature: MA Experiment ID: 20000439 Result: Up-regulated in Transcription
  misc_feature: MA Experiment 20000439 PARAMETER Experiment Name: At_Roots__P Parameter: Age (day) Value: 14 vs. 21
  misc_feature: MA Experiment 20000439 PARAMETER Experiment Name: At_Roots__P Parameter: Organism Value: A. thaliana
  misc_feature: MA Experiment 20000439 PARAMETER Experiment Name: At_Roots__P Parameter: Tissue Value: Roots vs. Whole Plant
  misc_feature: MA Experiment ID: 20001248 Result: Down-regulated in Transcription
  misc_feature: MA Experiment 20001248 PARAMETER Experiment Name: At_Far-red-induction_P Parameter: Age (day) Value: 7
  misc_feature: MA Experiment 20001248 PARAMETER Experiment Name: At_Far-red-induction_P Parameter: Light Value: Far-red vs. White
  misc_feature: MA Experiment 20001248 PARAMETER Experiment Name: At_Far-red-induction_P Parameter: Organism Value: A. thaliana
  misc_feature: MA Experiment 20001248 PARAMETER Experiment Name: At_Far-red-induction_P Parameter: Plant Line Value: Columbia
  misc_feature: MA Experiment 20001248 PARAMETER Experiment Name: At_Far-red-induction_P Parameter: Timepoint (hr) Value: 4
  misc_feature: MA Experiment 20001248 PARAMETER Experiment Name: At_Far-red-induction_P Parameter: Tissue Value: Whole Plant
acctctttcccattcactcatctcctcttccttatctccttaaaaatcttcccctgtttcttttttttaatatttagagctcctctgtttcctctccaataacaatattcataaccagaaaaaaaaactctcttcctctgtttgttttctagttctgacatcataaattcagaccgagaaaacataaaaatttgagtcttttgatgatcggaaacggatgactcccgttctctgcgaaatcctgctctctgggctcacggtcaaatctgctctctgccgtagaacccatctcgttcaatctttctccgtcgtcttcctctactggtttatacaacgtttcatgaattgctacaaactctaattaattttttcgacagatcataaaaaaaaaaccaaacataaaacataaaactctgtcctttttttgtcttcttgtaacttttcttgttaaaaatcaatggcgtcatctagcagcacataccggagctcaagctcttccgacggtggtaataataacccgtcggactccgtcgtcaccgtcgacgaacgaaaacgtaaaagaatgttatcgaacagagaatctgcacgtaggtcaaggatgcgtaaacagaaacacgttgatgatctaacggctcagatcaatcagctatcaaacgacaaccgtcagatcttgaacagcctcaccgtaacatctcagctttacatgaagatccaagccgagaactctgttctcaccgctcagatggaggagcttagcaccagactccaatctctcaacgagatcgttgatcttgttcaatccaacggtgcaggatttggtgttgaccagatcgacggctgtggttttgatgatcgtacggttgggatcgacggatattacgatgatatgaatatgatgagtaatgttaatcattggggtggttcggtttacactaaccaacccattatggctaatgatatcaatatgtattgattaataataaaattaattaaaataattagatgccccttttttgtctttttattttaaaatttagcccattttggtgtttttgggttggtgtgatgatgtaattatagtacatgcatctttgattggttggaaggataaatataaactttatatatatattggggcatatatatatgagttgtactttgtcatgtattggtgtgtgttttgttataattatatgattatatatgtttatgtt

SEQ ID NO: 30637 - protein, 171 aa, Arabidopsis thaliana
  peptide (1)..(171): Ceres Seq. ID no. 12333328
  misc_feature (27)..(87): Pfam Name: bZIP transcription factor Pfam Description: bZIP transcription factor
  misc_feature (1)..(171): Homolog of NCBI NO: 24460973 NR Description: bZIP transcription factor [Capsicum chinense]
  misc_feature (1)..(171): Homolog of NCBI NO: 16580130 NR Description: bZIP transcription factor BZI-2 [Nicotiana
  misc_feature (1)..(171): Homolog of NCBI NO: 4457221 NR Description: putative bZIP DNA-binding protein [Capsicum
  misc_feature (1)..(166): Homolog of NCBI NO: 15222223 NR Description: bZIP transcription factor ATB2, putative; protein
  misc_feature (1)..(171): Homolog of NCBI NO: 10443481 NR Description: transcription factor GBF5 [Arabidopsis thaliana]
  misc_feature (1)..(171): Homolog of NCBI NO: 15224118 NR Description: bZIP family transcription factor
MASSSSTYRSSSSSDGGNNNPSDSVVTVDERKRKRMLSNRESARRSRMRKQKHVDDLTAQINQLSNDNRQILNSLTVTSQLYMKIQAENSVLTAQMEELSTRLQSLNEIVDLVQSNGAGFGVDQIDGCGFDDRTVGIDGYYDDMNMMSNVNHWGGSVYTNQPIMANDINMY

SEQ ID NO: 30638 - protein, 136 aa, Arabidopsis thaliana
  peptide (1)..(136): Ceres Seq. ID no. 12333329
  misc_feature (1)..(52): Pfam Name: bZIP transcription factor Pfam Description: bZIP transcription factor
  misc_feature (1)..(136): Homolog of NCBI NO: 24460973 NR Description: bZIP transcription factor [Capsicum chinense]
  misc_feature (1)..(136): Homolog of NCBI NO: 16580130 NR Description: bZIP transcription factor BZI-2 [Nicotiana
  misc_feature (1)..(136): Homolog of NCBI NO: 4457221 NR Description: putative bZIP DNA-binding protein [Capsicum
  misc_feature (1)..(131): Homolog of NCBI NO: 15222223 NR Description: bZIP transcription factor ATB2, putative; protein
  misc_feature (1)..(136): Homolog of NCBI NO: 10443481 NR Description: transcription factor GBF5 [Arabidopsis thaliana]
  misc_feature (1)..(136): Homolog of NCBI NO: 15224118 NR Description: bZIP family transcription factor
MLSNRESARRSRMRKQKHVDDLTAQINQLSNDNRQILNSLTVTSQLYMKIQAENSVLTAQMEELSTRLQSLNEIVDLVQSNGAGFGVDQIDGCGFDDRTVGIDGYYDDMNMMSNVNHWGGSVYTNQPIMANDINMY

SEQ ID NO: 30639 - protein, 124 aa, Arabidopsis thaliana
  peptide (1)..(124): Ceres Seq. ID no. 12333330
  misc_feature (1)..(124): Homolog of NCBI NO: 24460973 NR Description: bZIP transcription factor [Capsicum chinense]
  misc_feature (1)..(124): Homolog of NCBI NO: 16580130 NR Description: bZIP transcription factor BZI-2 [Nicotiana
  misc_feature (1)..(124): Homolog of NCBI NO: 4457221 NR Description: putative bZIP DNA-binding protein [Capsicum
  misc_feature (1)..(119): Homolog of NCBI NO: 15222223 NR Description: bZIP transcription factor ATB2, putative; protein
  misc_feature (1)..(124): Homolog of NCBI NO: 10443481 NR Description: transcription factor GBF5 [Arabidopsis thaliana]
  misc_feature (1)..(124): Homolog of NCBI NO: 15224118 NR Description: bZIP family transcription factor
MRKQKHVDDLTAQINQLSNDNRQILNSLTVTSQLYMKIQAENSVLTAQMEELSTRLQSLNEIVDLVQSNGAGFGVDQIDGCGFDDRTVGIDGYYDDMNMMSNVNHWGGSVYTNQPIMANDINMY

SEQ ID NO: 30640 - DNA, 1093 bp, Arabidopsis thaliana
  misc_feature (1)..(1093): Ceres Seq. ID no. 12357818
  misc_feature: MA Experiment ID: 20000180 Result: Down-regulated in Transcription
  misc_feature: MA Experiment 20000180 PARAMETER Experiment Name: At_Germinating_Seeds_P Parameter: Age (hr) Value: 24 vs. 0
  misc_feature: MA Experiment 20000180 PARAMETER Experiment Name: At_Germinating_Seeds_P Parameter: Tissue Value: Germinating Seeds
  misc_feature: MA Experiment ID: 20000794 Result: Up-regulated in Transcription
  misc_feature: MA Experiment 20000794 PARAMETER Experiment Name: At_Petals_P Parameter: Age (day) Value: 23-25 days
  misc_feature: MA Experiment 20000794 PARAMETER Experiment Name: At_Petals_P Parameter: Plant Line Value: WS
  misc_feature: MA Experiment 20000794 PARAMETER Experiment Name: At_Petals_P Parameter: Tissue Value: Petals vs. Whole plant
cttgaagacaaagaaagctttcttctataatacatctttctctacagatcacacagaagcaaaaattccatctccgatttcggaagagagttgttctcttctctgagaagaagaagatgagcagaggaagcggcgctggttacgatcgtcacatcactattttctcaccggaaggtcgtctcttccaagtcgagtatgctttcaaagccgtgaaagcagctggaatcacatcgatcggtgtccgagggaaagattcagtatgcgtcgttacgcagaagaaagttccggacaagcttttggatcagtctagtgtatctcaccttttccctgttaccaagtaccttggattgttagccactggcatgacagctgattcaaggtcattggtacaacaagctaggaatgaggctgctgagtttaggttccaatatggttatgagatgcctgcagatattcttgctaaatggattgcagataagtctcaggtttacacacaacatgcttacatgagaccccttggagtagttgccatggttctaggtattgatgaagagagaggacctctactttacaagtgtgacccagctggacatttttacggtcacaaggcaactagtgctggtatgaaagaacaagaagcagtcaatttcttggagaagaaaatgaaagaaaaccctgccttcacatatgatgaaacagtacagactgctatatccgctctccaatctgttcttcaagaagacttcaaagcaactgaaattgaggtgggagttgtgagagctgatgaccctctcttccgttccctgagaacagaggagatcgacgagcacttgacggccattagtgaacgtgactgatcactttcactggaacattcagtcgggactttgcatctctttcttttgctttaaatctatctaagatgattcacgtttcagagaaacgtgtttccattagtcatgagtcgtgtagttttcatttgaatcatctgcttcctcctaataggagttacatgtaagggtgtcaaattaaggtcgaatgagatggtttaaggttttgaattttaaaaggcaaaacaaagaaagttatttac

SEQ ID NO: 30641 - protein, 246 aa, Arabidopsis thaliana; identical to SEQ ID NO: 26243
  peptide (1)..(246): Ceres Seq. ID no. 12357819
  misc_feature (32)..(220): Pfam Name: Proteasome A-type and B-type Pfam Description: Proteasome A-type and B-type
  misc_feature (1)..(246): Homolog of NCBI NO: 12229948 NR Description: Proteasome subunit alpha type 6 (20S proteasome
  misc_feature (1)..(246): Homolog of NCBI NO: 3421070 NR Description: 20S proteasome subunit PAA1 [Arabidopsis thaliana]
  misc_feature (2)..(246): Homolog of NCBI NO: 2511588 NR Description: multicatalytic endopeptidase complex, proteasome
  misc_feature (1)..(246): Homolog of NCBI NO: 20260140 NR Description: multicatalytic endopeptidase complex alpha
  misc_feature (1)..(246): Homolog of NCBI NO: 15238554 NR Description: 20S proteasome alpha subunit A1 (PAA1)
  misc_feature (1)..(246): Homolog of NCBI NO: 15224993 NR Description: 20S proteasome alpha subunit A2 (PAA2)

SEQ ID NO: 30642 - protein, 164 aa, Arabidopsis thaliana; identical to SEQ ID NO: 26244
  peptide (1)..(164): Ceres Seq. ID no. 12357820
  misc_feature (1)..(138): Pfam Name: Proteasome A-type and B-type Pfam Description: Proteasome A-type and B-type
  misc_feature (1)..(164): Homolog of NCBI NO: 12229948 NR Description: Proteasome subunit alpha type 6 (20S proteasome
  misc_feature (1)..(164): Homolog of NCBI NO: 3421070 NR Description: 20S proteasome subunit PAA1 [Arabidopsis thaliana]
  misc_feature (1)..(164): Homolog of NCBI NO: 2511588 NR Description: multicatalytic endopeptidase complex, proteasome
  misc_feature (1)..(164): Homolog of NCBI NO: 20260140 NR Description: multicatalytic endopeptidase complex alpha
  misc_feature (1)..(164): Homolog of NCBI NO: 15238554 NR Description: 20S proteasome alpha subunit A1 (PAA1)
  misc_feature (1)..(164): Homolog of NCBI NO: 15224993 NR Description: 20S proteasome alpha subunit A2 (PAA2)

SEQ ID NO: 30643 - protein, 138 aa, Arabidopsis thaliana
  peptide (1)..(138): Ceres Seq. ID no. 12357821
  misc_feature (1)..(112): Pfam Name: Proteasome A-type and B-type Pfam Description: Proteasome A-type and B-type
  misc_feature (1)..(138): Homolog of NCBI NO: 12229948 NR Description: Proteasome subunit alpha type 6 (20S proteasome
  misc_feature (1)..(138): Homolog of NCBI NO: 3421070 NR Description: 20S proteasome subunit PAA1 [Arabidopsis thaliana]
  misc_feature (1)..(138): Homolog of NCBI NO: 2511588 NR Description: multicatalytic endopeptidase complex, proteasome
  misc_feature (1)..(138): Homolog of NCBI NO: 20260140 NR Description: multicatalytic endopeptidase complex alpha
  misc_feature (1)..(138): Homolog of NCBI NO: 15238554 NR Description: 20S proteasome alpha subunit A1 (PAA1)
  misc_feature (1)..(138): Homolog of NCBI NO: 15224993 NR Description: 20S proteasome alpha subunit A2 (PAA2)
MPADILAKWIADKSQVYTQHAYMRPLGVVAMVLGIDEERGPLLYKCDPAGHFYGHKATSAGMKEQEAVNFLEKKMKENPAFTYDETVQTAISALQSVLQEDFKATEIEVGVVRADDPLFRSLRTEEIDEHLTAISERD

SEQ ID NO: 30644 - DNA, 1590 bp, Arabidopsis thaliana
  misc_feature (1)..(1590): Ceres Seq. ID no. 13580307
  misc_feature: MA Experiment ID: 20000794 Result: Up-regulated in Transcription
  misc_feature: MA Experiment 20000794 PARAMETER Experiment Name: At_Petals_P Parameter: Age (day) Value: 23-25 days
  misc_feature: MA Experiment 20000794 PARAMETER Experiment Name: At_Petals_P Parameter: Plant Line Value: WS
  misc_feature: MA Experiment 20000794 PARAMETER Experiment Name: At_Petals_P Parameter: Tissue Value: Petals vs. Whole plant
aaggatgttgcaagtcggtggtcctggttacgcgactcctctcgccgctatgtctggtccatcggagaaacttatctacgtaaccgccgtctacaccggaactggaatagataaaccggattatttggcgacggtggatgtagatccaagctcgccttcgtattcaagtgttattcatagattaccaatgccttttgttggtgatgagcttcatcattctggttggaactcttgtagttcttgccatggtgatgcttctgttgatagacgttatctcgtgttaccgtctcttatatctggtcgcatttatgcgattgatactaaggaaaacccgagggctccgtctttgtataagtatgttgatcctaaagagattgctgataagactggattggcgtttcctcacacggctcattgccgcacgggcgagatcttggtgtcctgtcttggagatgaagaggggaatgctaaggggaatgggcttcttcttcttgactctgattttaacatcaagaataggtgggagaaaccagacatcagtcctttgtatgggtatcatttttggtaccaacctcggcacaagaccatgatcagcacatcttggggagcacctaaagccttctctaaaggtttcaatcttcagcacgttgctgatggcttgtatggaagtcatctacatgtttatagttggccaggaggtgaaataaaacaattaattgaccttggaccgactggtctcttacctttggagattagattcttgcatgatccatctaaagatacagggtttgttgggagtgccttgtcgagtaatatgataagatttttcaagaacagtgatgaaacatggagccatgaggttgttatatcggttaaaccgttgaaagtcgaaaactggatacttccagaaatgccggggctaatcaccgacttcttgatctccctcgatgaccgatttatttactttgtgaactggctccatggagacattcgtcagtacaacatagaggaccctaaaaaccctgtattaacagggcaaatttgggttggaggattactacaaaagggcagtcctgttaaggcggttggagaagacggaaacactttccaattcgaggttcctcagatcaaggggaaatctttacgaggtggacctcaaatgattcagctgagcctcgatgggaaacgattgtatgcaacaaactcgctgtttagcgcatgggtcgtcagtttttatcctgaaatcatggagaaaggctcacacataattcagattgatggtgatacagaaaaaggtggtctcaccataaaccctgatttctttgtggactttggtgatgaaccagacggtccttcactagcccacgagatgagatatccaggtggagactgcacttccgatatctggatttgaatttggctttgtttagagtgtgttttgtgttaagtttaaattgagttttattatttgttgtgtgtttagtagagttgaataaaaaacccactaagatgactcagacaattaacacttgtttggtacattttgactcctatgtgtcttaagtaataaaactttctacaattcgactt

SEQ ID NO: 30645 - protein, 470 aa, Arabidopsis thaliana
  peptide (1)..(470): Ceres Seq. ID no. 13580308
  misc_feature (4)..(470): Pfam Name: 56kDa selenium binding protein (SBP56) Pfam Description: 56kDa selenium binding protein (SBP56)
  misc_feature (7)..(470): Homolog of NCBI NO: 15229520 NR Description: selenium binding protein -related [Arabidopsis
  misc_feature (7)..(470): Homolog of NCBI NO: 15485716 NR Description: selenium binding protein [Lotus japonicus]
  misc_feature (63)..(470): Homolog of NCBI NO: 20340239 NR Description: putative selenium-binding protein [Thellungiella
  misc_feature (7)..(470): Homolog of NCBI NO: 15485720 NR Description: selenium binding protein [Medicago sativa]
  misc_feature (7)..(470): Homolog of NCBI NO: 25348077 NR Description: selenium-binding protein like [imported] -
  misc_feature (7)..(470): Homolog of NCBI NO: 22530900 NR Description: selenium-binding protein-like protein
  misc_feature (7)..(470): Homolog of NCBI NO: 15236386 NR Description: selenium-binding protein like [Arabidopsis
  misc_feature (7)..(470): Homolog of NCBI NO: 13605825 NR Description: AT4g14040/dl3061c [Arabidopsis thaliana]
  misc_feature (6)..(470): Homolog of NCBI NO: 15236385 NR Description: selenium-binding protein like [Arabidopsis
  misc_feature (1)..(470): Homolog of NCBI NO: 15485232 NR Description: selenium binding protein [Arabidopsis thaliana]
RMLQVGGPGYATPLAAMSGPSEKLIYVTAVYTGTGIDKPDYLATVDVDPSSPSYSSVIHRLPMPFVGDELHHSGWNSCSSCHGDASVDRRYLVLPSLISGRIYAIDTKENPRAPSLYKYVDPKEIADKTGLAFPHTAHCRTGEILVSCLGDEEGNAKGNGLLLLDSDFNIKNRWEKPDISPLYGYHFWYQPRHKTMISTSWGAPKAFSKGFNLQHVADGLYGSHLHVYSWPGGEIKQLIDLGPTGLLPLEIRFLHDPSKDTGFVGSALSSNMIRFFKNSDETWSHEVVISVKPLKVENWILPEMPGLITDFLISLDDRFIYFVNWLHGDIRQYNIEDPKNPVLTGQIWVGGLLQKGSPVKAVGEDGNTFQFEVPQIKGKSLRGGPQMIQLSLDGKRLYATNSLFSAWVVSFYPEIMEKGSHIIQIDGDTEKGGLTINPDFFVDFGDEPDGPSLAHEMRYPGGDCTSDIWI

SEQ ID NO: 30646 - protein, 469 aa, Arabidopsis thaliana
  peptide (1)..(469): Ceres Seq. ID no. 13580309
  misc_feature (3)..(469): Pfam Name: 56kDa selenium binding protein (SBP56) Pfam Description: 56kDa selenium binding protein (SBP56)
  misc_feature (6)..(469): Homolog of NCBI NO: 15229520 NR Description: selenium binding protein -related [Arabidopsis
  misc_feature (6)..(469): Homolog of NCBI NO: 15485716 NR Description: selenium binding protein [Lotus japonicus]
  misc_feature (62)..(469): Homolog of NCBI NO: 20340239 NR Description: putative selenium-binding protein [Thellungiella
  misc_feature (6)..(469): Homolog of NCBI NO: 15485720 NR Description: selenium binding protein [Medicago sativa]
  misc_feature (6)..(469): Homolog of NCBI NO: 25348077 NR Description: selenium-binding protein like [imported] -
  misc_feature (6)..(469): Homolog of NCBI NO: 22530900 NR Description: selenium-binding protein-like protein
  misc_feature (6)..(469): Homolog of NCBI NO: 15236386 NR Description: selenium-binding protein like [Arabidopsis
  misc_feature (6)..(469): Homolog of NCBI NO: 13605825 NR Description: AT4g14040/dl3061c [Arabidopsis thaliana]
  misc_feature (5)..(469): Homolog of NCBI NO: 15236385 NR Description: selenium-binding protein like [Arabidopsis
  misc_feature (1)..(469): Homolog of NCBI NO: 15485232 NR Description: selenium binding protein [Arabidopsis thaliana]
MLQVGGPGYATPLAAMSGPSEKLIYVTAVYTGTGIDKPDYLATVDVDPSSPSYSSVIHRLPMPFVGDELHHSGWNSCSSCHGDASVDRRYLVLPSLISGRIYAIDTKENPRAPSLYKYVDPKEIADKTGLAFPHTAHCRTGEILVSCLGDEEGNAKGNGLLLLDSDFNIKNRWEKPDISPLYGYHFWYQPRHKTMISTSWGAPKAFSKGFNLQHVADGLYGSHLHVYSWPGGEIKQLIDLGPTGLLPLEIRFLHDPSKDTGFVGSALSSNMIRFFKNSDETWSHEVVISVKPLKVENWILPEMPGLITDFLISLDDRFIYFVNWLHGDIRQYNIEDPKNPVLTGQIWVGGLLQKGSPVKAVGEDGNTFQFEVPQIKGKSLRGGPQMIQLSLDGKRLYATNSLFSAWVVSFYPEIMEKGSHIIQIDGDTEKGGLTINPDFFVDFGDEPDGPSLAHEMRYPGGDCTSDIWI

SEQ ID NO: 30647 - protein, 454 aa, Arabidopsis thaliana
  peptide (1)..(454): Ceres Seq. ID no. 13580310
  misc_feature (1)..(454): Pfam Name: 56kDa selenium binding protein (SBP56) Pfam Description: 56kDa selenium binding protein (SBP56)
  misc_feature (1)..(454): Homolog of NCBI NO: 15229520 NR Description: selenium binding protein -related [Arabidopsis
  misc_feature (1)..(454): Homolog of NCBI NO: 15485716 NR Description: selenium binding protein [Lotus japonicus]
  misc_feature (47)..(454): Homolog of NCBI NO: 20340239 NR Description: putative selenium-binding protein [Thellungiella
  misc_feature (1)..(454): Homolog of NCBI NO: 15485720 NR Description: selenium binding protein [Medicago sativa]
  misc_feature (1)..(454): Homolog of NCBI NO: 25348077 NR Description: selenium-binding protein like [imported] -
  misc_feature (1)..(454): Homolog of NCBI NO: 22530900 NR Description: selenium-binding protein-like protein
  misc_feature (1)..(454): Homolog of NCBI NO: 15236386 NR Description: selenium-binding protein like [Arabidopsis
  misc_feature (1)..(454): Homolog of NCBI NO: 13605825 NR Description: AT4g14040/dl3061c [Arabidopsis thaliana]
  misc_feature (1)..(454): Homolog of NCBI NO: 15236385 NR Description: selenium-binding protein like [Arabidopsis
  misc_feature (1)..(454): Homolog of NCBI NO: 15485232 NR Description: selenium binding protein [Arabidopsis thaliana]
MSGPSEKLIYVTAVYTGTGIDKPDYLATVDVDPSSPSYSSVIHRLPMPFVGDELHHSGWNSCSSCHGDASVDRRYLVLPSLISGRIYAIDTKENPRAPSLYKYVDPKEIADKTGLAFPHTAHCRTGEILVSCLGDEEGNAKGNGLLLLDSDFNIKNRWEKPDISPLYGYHFWYQPRHKTMISTSWGAPKAFSKGFNLQHVADGLYGSHLHVYSWPGGEIKQLIDLGPTGLLPLEIRFLHDPSKDTGFVGSALSSNMIRFFKNSDETWSHEVVISVKPLKVENWILPEMPGLITDFLISLDDRFIYFVNWLHGDIRQYNIEDPKNPVLTGQIWVGGLLQKGSPVKAVGEDGNTFQFEVPQIKGKSLRGGPQMIQLSLDGKRLYATNSLFSAWVVSFYPEIMEKGSHIIQIDGDTEKGGLTINPDFFVDFGDEPDGPSLAHEMRYPGGDCTSDIWI

SEQ ID NO: 30648 - DNA, 1508 bp, Arabidopsis thaliana
  misc_feature (1)..(1508): Ceres Seq. ID no. 12388503
  misc_feature: MA Experiment ID: 108462 Result: Down-regulated in Transcription
  misc_feature: MA Experiment 108462 PARAMETER Experiment Name: At_Germinating_Seeds_cDNA_P Parameter: Age (day) Value: 2 vs. 0
  misc_feature: MA Experiment 108462 PARAMETER Experiment Name: At_Germinating_Seeds_cDNA_P Parameter: Tissue Value: Germinating Seeds
  misc_feature: MA Experiment ID: 108463 Result: Down-regulated in Transcription
  misc_feature: MA Experiment 108463 PARAMETER Experiment Name: At_Germinating_Seeds_cDNA_P Parameter: Age (day) Value: 3 vs. 0
  misc_feature: MA Experiment 108463 PARAMETER Experiment Name: At_Germinating_Seeds_cDNA_P Parameter: Tissue Value: Germinating Seeds
  misc_feature: MA Experiment ID: 108464 Result: Down-regulated in Transcription
  misc_feature: MA Experiment 108464 PARAMETER Experiment Name: At_Germinating_Seeds_cDNA_P Parameter: Age (day) Value: 4 vs. 0
  misc_feature: MA Experiment 108464 PARAMETER Experiment Name: At_Germinating_Seeds_cDNA_P Parameter: Tissue Value: Germinating Seeds
  misc_feature: MA Experiment ID: 108488 Result: Down-regulated in Transcription
  misc_feature: MA Experiment ID: 108573 Result: Up-regulated in Transcription
  misc_feature: MA Experiment 108573 PARAMETER Experiment Name: At_Drought_cDNA_P Parameter: Timepoint (hr) Value: 6
  misc_feature: MA Experiment 108573 PARAMETER Experiment Name: At_Drought_cDNA_P Parameter: Tissue Value: Aerial
  misc_feature: MA Experiment 108573 PARAMETER Experiment Name: At_Drought_cDNA_P Parameter: Treatment Value: Drought vs. No Drought
  misc_feature: MA Experiment ID: 20000071 Result: Up-regulated in Transcription
  misc_feature: MA Experiment 20000071 PARAMETER Experiment Name: At_100uM_ABA_Mutants_cDNA_P Parameter: Plant Line Value: CS8104
  misc_feature: MA Experiment 20000071 PARAMETER Experiment Name: At_100uM_ABA_Mutants_cDNA_P Parameter: Timepoint (hr) Value: 6
  misc_feature: MA Experiment 20000071 PARAMETER Experiment Name: At_100uM_ABA_Mutants_cDNA_P Parameter: Tissue Value: Aerial
  misc_feature: MA Experiment 20000071 PARAMETER Experiment Name: At_100uM_ABA_Mutants_cDNA_P Parameter: Treatment Value: 100uM ABA vs. No Treatment
  misc_feature: MA Experiment ID: 20000072 Result: Up-regulated in Transcription
  misc_feature: MA Experiment 20000072 PARAMETER Experiment Name: At_100uM_ABA_Mutants_cDNA_P Parameter: Plant Line Value: CS8105
  misc_feature: MA Experiment 20000072 PARAMETER Experiment Name: At_100uM_ABA_Mutants_cDNA_P Parameter: Timepoint (hr) Value: 6
  misc_feature: MA Experiment 20000072 PARAMETER Experiment Name: At_100uM_ABA_Mutants_cDNA_P Parameter: Tissue Value: Aerial
  misc_feature: MA Experiment 20000072 PARAMETER Experiment Name: At_100uM_ABA_Mutants_cDNA_P Parameter: Treatment Value: 100uM ABA vs. No Treatment
  misc_feature: MA Experiment ID: 20000117 Result: Up-regulated in Transcription
  misc_feature: MA Experiment 20000117 PARAMETER Experiment Name: At_100uM_ABA_Mutants_cDNA_P Parameter: Plant Line Value: Columbia
  misc_feature: MA Experiment 20000117 PARAMETER Experiment Name: At_100uM_ABA_Mutants_cDNA_P Parameter: Timepoint (hr) Value: 6
  misc_feature: MA Experiment 20000117 PARAMETER Experiment Name: At_100uM_ABA_Mutants_cDNA_P Parameter: Tissue Value: Aerial
  misc_feature: MA Experiment 20000117 PARAMETER Experiment Name: At_100uM_ABA_Mutants_cDNA_P Parameter: Treatment Value: 100uM ABA vs. No Treatment
  misc_feature: MA Experiment ID: 20000184 Result: Down-regulated in Transcription
  misc_feature: MA Experiment 20000184 PARAMETER Experiment Name: At_Shoots__P Parameter: Age (day) Value: 7
  misc_feature: MA Experiment 20000184 PARAMETER Experiment Name: At_Shoots__P Parameter: Tissue Value: Shoots vs. Whole Plant
  misc_feature: MA Experiment ID: 20000438 Result: Down-regulated in Transcription
  misc_feature: MA Experiment 20000438 PARAMETER Experiment Name: At_Shoots__P Parameter: Age (day) Value: 14
  misc_feature: MA Experiment 20000438 PARAMETER Experiment Name: At_Shoots__P Parameter: Tissue Value: Shoots vs. Whole Plant
  misc_feature: MA Experiment ID: 20001557 Result: Up-regulated in Transcription
  misc_feature: MA Experiment 20001557 PARAMETER Experiment Name: At_Drought_Soil_Dry_P Parameter: Age (day) Value: 27
  misc_feature: MA Experiment 20001557 PARAMETER Experiment Name: At_Drought_Soil_Dry_P Parameter: Organism Value: A. thaliana
  misc_feature: MA Experiment 20001557 PARAMETER Experiment Name: At_Drought_Soil_Dry_P Parameter: Plant Line Value: WS
  misc_feature: MA Experiment 20001557 PARAMETER Experiment Name: At_Drought_Soil_Dry_P Parameter: Post Timepoint (hr) Value: 3
  misc_feature: MA Experiment 20001557 PARAMETER Experiment Name: At_Drought_Soil_Dry_P Parameter: Post-Treatment Value: Re-Water vs. No Drought
  misc_feature: MA Experiment 20001557 PARAMETER Experiment Name: At_Drought_Soil_Dry_P Parameter: Timepoint (day) Value: 13
  misc_feature: MA Experiment 20001557 PARAMETER Experiment Name: At_Drought_Soil_Dry_P Parameter: Treatment Value: Drought vs. No Drought
  misc_feature: MA Experiment ID: 20001905 Result: Up-regulated in Transcription
  misc_feature: MA Experiment 20001905 PARAMETER Experiment Name: At_Drought_Reproduction_P Parameter: Age (day) Value: 40
  misc_feature: MA Experiment 20001905 PARAMETER Experiment Name: At_Drought_Reproduction_P Parameter: Organism Value: A. thaliana
  misc_feature: MA Experiment 20001905 PARAMETER Experiment Name: At_Drought_Reproduction_P Parameter: Plant Line Value: WS
  misc_feature: MA Experiment 20001905 PARAMETER Experiment Name: At_Drought_Reproduction_P Parameter: Timepoint (day) Value: 10
  misc_feature: MA Experiment 20001905 PARAMETER Experiment Name: At_Drought_Reproduction_P Parameter: Tissue Value: Rosettes
  misc_feature: MA Experiment 20001905 PARAMETER Experiment Name: At_Drought_Reproduction_P Parameter: Treatment Value: Drought vs. No Drought
gtgtttgtgtatgtgtggaaaattaatttcttctcccgacgaatcccaaaagtttgttgaaatttgcctccaagaaatctgcaattagaaatttcatttcgccgtcatcgtcttcttcttctgattctgattaattccagatgtcttcctgagtcttacggagattaggtcattttcgcctcgactcgaactctgtctcgcagcttccgtgagagagtcatggacacgccaccgacttctcgtatcgcatcttttggtcagacggagattaactgggacaaacttgacaaaaggaggttctacattaatggagctggcctcttcactggtgttacagtagctctgtatcctgtatccgttgtgaaaacaaggcttcaagttgcttctaaagagattgctgagagaagtgccttttctgtagttaaaggaattttaaagaatgatggtgttcctggtctgtaccgaggttttggtactgtcattacaggtgctgtacctgcaagaatcatatttctaactgctcttgagaccactaagatttctgcttttaagttggttgcacctttggagttaagtgaacctacacaagccgccattgcaaatggaattgctggcatgacagcatctcttttctcacaggctgtgtttgtcccaattgatgttgttagccaaaagttgatggtacaaggatactcaggtcatgctacatatactggtggtatcgatgttgccacaaaaatcattaagtcatatggtgtaaggggattatacagagggtttggtctgtctgttatgacctattctccttcaagtgccgcttggtgggctagctatggatcaagccaacgtgttatctggagattcttaggttatggtggtgactcggatgcaactgctgctcctagtaagtcaaaaattgttatggtccaggctgctggaggaattattgctggtgcaacagcatcctcaattacaacaccattagacacaatcaaaacgcgactgcaggtcatgggacatcaagaaaatagaccttcagcgaaacaagtggtgaaaaaactgctagcagaagatggctggaaaggattctataggggtttgggcccaagattctttagcatgtcggcttggggaacctcgatgatattgacttacgaatacttaaagcgtctgtgtgcaatagaagattagaaagcttcactactgttcgttggtttttctccttctactaactcgagtagacggcatcaccttgattcaaatctcggctattgggagcttccatgttgacaattggaccattctttcaactttgaagtctgagttccgttattgtaatcattctttcaacttaatttgcgtattggagtgtattcttacagcagaagaaattctagcttacgttcttctgctttatgtagcttctgagatttaagaagcttcaaaacaatgcaatcacttcatgaaatcttatagtcgtacggatgtacgtgttatcgtaacagttg

SEQ ID NO: 30649 - protein, 323 aa, Arabidopsis thaliana
  peptide (1)..(323): Ceres Seq. ID no. 12388504
  misc_feature (1)..(318): Homolog of NCBI NO: 21594326 NR Description: mitochondrial carrier-like protein [Arabidopsis
  misc_feature (16)..(318): Homolog of NCBI NO: 37534064 NR Description: putative Tricarboxylate transport protein,
  misc_feature (71)..(318): Homolog of NCBI NO: 34894824 NR Description: P0554D10.15 [Oryza sativa (japonica
  misc_feature (1)..(214): Homolog of NCBI NO: 11358653 NR Description: probable mitochondrial carrier protein -
  misc_feature (1)..(323): Homolog of NCBI NO: 12278522 NR Description: putative mitochondrial carrier protein
  misc_feature (1)..(323): Homolog of NCBI NO: 18496651 NR Description: putative mitochondrial carrier protein [Triticum
  misc_feature (1)..(323): Homolog of NCBI NO: 12061241 NR Description: 36I5.1 [Oryza sativa (japonica cultivar-group)]
  misc_feature (1)..(323): Homolog of NCBI NO: 21326111 NR Description: putative mitochondrial carrier protein [Sorghum
  misc_feature (1)..(323): Homolog of NCBI NO: 21553961 NR Description: putative mitochondrial carrier protein
  misc_feature (1)..(323): Homolog of NCBI NO: 18417739 NR Description: mitochondrial carrier protein family
  misc_feature (1)..(318): Homolog of NCBI NO: 21594326 NR Description: mitochondrial carrier-like protein [Arabidopsis
  misc_feature (16)..(318): Homolog of NCBI NO: 37534064 NR Description: putative Tricarboxylate transport protein,
  misc_feature (71)..(318): Homolog of NCBI NO: 34894824 NR Description: P0554D10.15 [Oryza sativa (japonica
  misc_feature (1)..(214): Homolog of NCBI NO: 11358653 NR Description: probable mitochondrial carrier protein -
  misc_feature (1)..(323): Homolog of NCBI NO: 12278522 NR Description: putative mitochondrial carrier protein
  misc_feature (1)..(323): Homolog of NCBI NO: 18496651 NR Description: putative mitochondrial carrier protein [Triticum
  misc_feature (1)..(323): Homolog of NCBI NO: 12061241 NR Description: 36I5.1 [Oryza sativa (japonica cultivar-group)]
  misc_feature (1)..(323): Homolog of NCBI NO: 21326111 NR Description: putative mitochondrial carrier protein [Sorghum
  misc_feature (1)..(323): Homolog of NCBI NO: 21553961 NR Description: putative mitochondrial carrier protein
  misc_feature (1)..(323): Homolog of NCBI NO: 18417739 NR Description: mitochondrial carrier protein family
MDTPPTSRIASFGQTEINWDKLDKRRFYINGAGLFTGVTVALYPVSVVKTRLQVASKEIAERSAFSVVKGILKNDGVPGLYRGFGTVITGAVPARIIFLTALETTKISAFKLVAPLELSEPTQAAIANGIAGMTASLFSQAVFVPIDVVSQKLMVQGYSGHATYTGGIDVATKIIKSYGVRGLYRGFGLSVMTYSPSSAAWWASYGSSQRVIWRFLGYGGDSDATAAPSKSKIVMVQAAGGIIAGATASSITTPLDTIKTRLQVMGHQENRPSAKQVVKKLLAEDGWKGFYRGLGPRFFSMSAWGTSMILTYEYLKRLCAIED

SEQ ID NO: 30650 - protein, 191 aa, Arabidopsis thaliana
  peptide (1)..(191): Ceres Seq. ID no. 12388505
  misc_feature (1)..(186): Homolog of NCBI NO: 21594326 NR Description: mitochondrial carrier-like protein [Arabidopsis
  misc_feature (1)..(186): Homolog of NCBI NO: 37534064 NR Description: putative Tricarboxylate transport protein,
  misc_feature (1)..(186): Homolog of NCBI NO: 34894824 NR Description: P0554D10.15 [Oryza sativa (japonica
  misc_feature (1)..(82): Homolog of NCBI NO: 11358653 NR Description: probable mitochondrial carrier protein -
  misc_feature (1)..(191): Homolog of NCBI NO: 12278522 NR Description: putative mitochondrial carrier protein
  misc_feature (1)..(191): Homolog of NCBI NO: 18496651 NR Description: putative mitochondrial carrier protein [Triticum
  misc_feature (1)..(191): Homolog of NCBI NO: 12061241 NR Description: 36I5.1 [Oryza sativa (japonica cultivar-group)]
  misc_feature (1)..(191): Homolog of NCBI NO: 21326111 NR Description: putative mitochondrial carrier protein [Sorghum
  misc_feature (1)..(191): Homolog of NCBI NO: 21553961 NR Description: putative mitochondrial carrier protein
  misc_feature (1)..(191): Homolog of NCBI NO: 18417739 NR Description: mitochondrial carrier protein family
  misc_feature (1)..(186): Homolog of NCBI NO: 21594326 NR Description: mitochondrial carrier-like protein [Arabidopsis
  misc_feature (1)..(186): Homolog of NCBI NO: 37534064 NR Description: putative Tricarboxylate transport protein,
  misc_feature (1)..(186): Homolog of NCBI NO: 34894824 NR Description: P0554D10.15 [Oryza sativa (japonica
  misc_feature (1)..(82): Homolog of NCBI NO: 11358653 NR Description: probable mitochondrial carrier protein -
  misc_feature (1)..(191): Homolog of NCBI NO: 12278522 NR Description: putative mitochondrial carrier protein
  misc_feature (1)..(191): Homolog of NCBI NO: 18496651 NR Description: putative mitochondrial carrier protein [Triticum
  misc_feature (1)..(191): Homolog of NCBI NO: 12061241 NR Description: 36I5.1 [Oryza sativa (japonica cultivar-group)]
  misc_feature (1)..(191): Homolog of NCBI NO: 21326111 NR Description: putative mitochondrial carrier protein [Sorghum
  misc_feature (1)..(191): Homolog of NCBI NO: 21553961 NR Description: putative mitochondrial carrier protein
  misc_feature (1)..(191): Homolog of NCBI NO: 18417739 NR Description: mitochondrial carrier protein family
MTASLFSQAVFVPIDVVSQKLMVQGYSGHATYTGGIDVATKIIKSYGVRGLYRGFGLSVMTYSPSSAAWWASYGSSQRVIWRFLGYGGDSDATAAPSKSKIVMVQAAGGIIAGATASSITTPLDTIKTRLQVMGHQENRPSAKQVVKKLLAEDGWKGFYRGLGPRFFSMSAWGTSMILTYEYLKRLCAIED

SEQ ID NO: 30651 - protein, 170 aa, Arabidopsis thaliana
  peptide (1)..(170): Ceres Seq. ID no. 12388506
  misc_feature (1)..(165): Homolog of NCBI NO: 21594326 NR Description: mitochondrial carrier-like protein [Arabidopsis
  misc_feature (1)..(165): Homolog of NCBI NO: 37534064 NR Description: putative Tricarboxylate transport protein,
  misc_feature (1)..(165): Homolog of NCBI NO: 34894824 NR Description: P0554D10.15 [Oryza sativa (japonica
  misc_feature (1)..(61): Homolog of NCBI NO: 11358653 NR Description: probable mitochondrial carrier protein -
  misc_feature (1)..(170): Homolog of NCBI NO: 12278522 NR Description: putative mitochondrial carrier protein
  misc_feature (1)..(170): Homolog of NCBI NO: 18496651 NR Description: putative mitochondrial carrier protein [Triticum
  misc_feature (1)..(170): Homolog of NCBI NO: 12061241 NR Description: 36I5.1 [Oryza sativa (japonica cultivar-group)]
  misc_feature (1)..(170): Homolog of NCBI NO: 21326111 NR Description: putative mitochondrial carrier protein [Sorghum
  misc_feature (1)..(170): Homolog of NCBI NO: 21553961 NR Description: putative mitochondrial carrier protein
  misc_feature (1)..(170): Homolog of NCBI NO: 18417739 NR Description: mitochondrial carrier protein family
  misc_feature (1)..(165): Homolog of NCBI NO: 21594326 NR Description: mitochondrial carrier-like protein [Arabidopsis
  misc_feature (1)..(165): Homolog of NCBI NO: 37534064 NR Description: putative Tricarboxylate transport protein,
  misc_feature (1)..(165): Homolog of NCBI NO: 34894824 NR Description: P0554D10.15 [Oryza sativa (japonica
  misc_feature (1)..(61): Homolog of NCBI NO: 11358653 NR Description: probable mitochondrial carrier protein -
  misc_feature (1)..(170): Homolog of NCBI NO: 12278522 NR Description: putative mitochondrial carrier protein
  misc_feature (1)..(170): Homolog of NCBI NO: 18496651 NR Description: putative mitochondrial carrier protein [Triticum
  misc_feature (1)..(170): Homolog of NCBI NO: 12061241 NR Description: 36I5.1 [Oryza sativa (japonica cultivar-group)]
  misc_feature (1)..(170): Homolog of NCBI NO: 21326111 NR Description: putative mitochondrial carrier protein [Sorghum
  misc_feature (1)..(170): Homolog of NCBI NO: 21553961 NR Description: putative mitochondrial carrier protein
  misc_feature (1)..(170): Homolog of NCBI NO: 18417739 NR Description: mitochondrial carrier protein family
MVQGYSGHATYTGGIDVATKIIKSYGVRGLYRGFGLSVMTYSPSSAAWWASYGSSQRVIWRFLGYGGDSDATAAPSKSKIVMVQAAGGIIAGATASSITTPLDTIKTRLQVMGHQENRPSAKQVVKKLLAEDGWKGFYRGLGPRFFSMSAWGTSMILTYEYLKRLCAIED

SEQ ID NO: 30652 - DNA, 1196 bp, Arabidopsis thaliana
  misc_feature (1)..(1196): Ceres Seq. ID no. 13509751
  misc_feature: MA Experiment ID: 108573 Result: Up-regulated in Transcription
  misc_feature: MA Experiment 108573 PARAMETER Experiment Name: At_Drought_cDNA_P Parameter: Timepoint (hr) Value: 6
  misc_feature: MA Experiment 108573 PARAMETER Experiment Name: At_Drought_cDNA_P Parameter: Tissue Value: Aerial
  misc_feature: MA Experiment 108573 PARAMETER Experiment Name: At_Drought_cDNA_P Parameter: Treatment Value: Drought vs. No Drought
  misc_feature: MA Experiment ID: 20000180 Result: Up-regulated in Transcription
  misc_feature: MA Experiment 20000180 PARAMETER Experiment Name: At_Germinating_Seeds_P Parameter: Age (hr) Value: 24 vs. 0
  misc_feature: MA Experiment 20000180 PARAMETER Experiment Name: At_Germinating_Seeds_P Parameter: Tissue Value: Germinating Seeds
aatgataacactaataaaaaaaagaagaagaaggttacggtctcgtaaagctttcaaaagtccgcaacgatcacacacgtctttctccgaaactcgtctgagagaggctctgagattcgatgtcgttcgaggaagaagaagaggaggaaacattcgagcatacacttctcgtggtgcgtgaggtctccgtttacaagatcccgccgcgaaccacatccggcggatacaagtgcggcgaatggcttcaatccgataagatctggtctggtagactccgcgtcgtatcgtgcaaggatcgatgcgagatccgcctcgaggattcgaattccggtgatcttttcgcagcttgttttgtggatcctggacgtagagagaactctgtagagccgtctctcgattcgtctaggtatttcgttctcaggatcgatgacgggagagggaagtatgcgtttatcgggctaggattcgctgagaggaacgaagcgtttgatttcaatgttgcgttatcggatcatgaaaagtacgttaggagggagaaagagaaggagacaggggaaacgagtgagagcgataatcatattgatatccatcctgccgttaatcacagattgaaggaaggtgaaaccataagaatcaacgtgaagccgaaaccaacaacaaatggcactgggatgctctcagctgctctttcaggaacggggaagccaaaacctctagcacttgccccaccccccaaagctgccggagtaaccaggtctcctttacctcctcctccaaacgatcccgtcgcttcaaggattgcatctgatggctgcaaggaatcacgcaggaacgagcctctatctgatctatctcagctcaagaaaaatcttccttcaacggcgggatcaggatcgagcaagtcaacaggagctgcatcaggttgggcagctttctgatgaatggagtgtaaaatttaagttattggacaagtccggcttcatcttcttgtgacttgagagcacgagacaatagacaacaatggtggtcagccaacagtctttttgatgtatgttaatggtaagttgatgtgtgtttctttgtaatcctcccacactccctgttttaattatttttcttccttataatcatcgttgttacattatcgattatcatttgtatcactgagatattaatatatacaaaaaggctttttc

SEQ ID NO: 30653 - protein, 272 aa, Arabidopsis thaliana
  peptide (1)..(272): Ceres Seq. ID no. 13509752
  misc_feature (12)..(272): Homolog of NCBI NO: 24642653 NR Description: CG32566-PB [Drosophila melanogaster]
  misc_feature (9)..(272): Homolog of NCBI NO: 34858413 NR Description: similar to RIKEN cDNA 1200016B17 [Rattus
  misc_feature (9)..(272): Homolog of NCBI NO: 27229051 NR Description: RIKEN cDNA 1200016B17 [Mus musculus]
  misc_feature (8)..(272): Homolog of NCBI NO: 8922416 NR Description: hypothetical protein FLJ10420 [Homo sapiens]
  misc_feature (8)..(260): Homolog of NCBI NO: 10435511 NR Description: unnamed protein product [Homo sapiens]
  misc_feature (149)..(248): Homolog of NCBI NO: 25406749 NR Description: hypothetical protein [imported] - Arabidopsis
  misc_feature (7)..(272): Homolog of NCBI NO: 37535352 NR Description: unknown protein [Oryza sativa (japonica
  misc_feature (1)..(219): Homolog of NCBI NO: 25406749 NR Description: hypothetical protein [imported] - Arabidopsis
  misc_feature (1)..(272): Homolog of NCBI NO: 18379172 NR Description: expressed protein [Arabidopsis thaliana]
  misc_feature (1)..(250): Homolog of NCBI NO: 14596175 NR Description: Unknown protein [Arabidopsis thaliana]
  misc_feature (12)..(272): Homolog of NCBI NO: 24642653 NR Description: CG32566-PB [Drosophila melanogaster]
  misc_feature (9)..(272): Homolog of NCBI NO: 34858413 NR Description: similar to RIKEN cDNA 1200016B17 [Rattus
  misc_feature (9)..(272): Homolog of NCBI NO: 27229051 NR Description: RIKEN cDNA 1200016B17 [Mus musculus]
  misc_feature (8)..(272): Homolog of NCBI NO: 8922416 NR Description: hypothetical protein FLJ10420 [Homo sapiens]
  misc_feature (8)..(260): Homolog of NCBI NO: 10435511 NR Description: unnamed protein product [Homo sapiens]
  misc_feature (149)..(248): Homolog of NCBI NO: 25406749 NR Description: hypothetical protein [imported] - Arabidopsis
  misc_feature (7)..(272): Homolog of NCBI NO: 37535352 NR Description: unknown protein [Oryza sativa (japonica
  misc_feature (1)..(219): Homolog of NCBI NO: 25406749 NR Description: hypothetical protein [imported] - Arabidopsis
  misc_feature (1)..(272): Homolog of NCBI NO: 18379172 NR Description: expressed protein [Arabidopsis thaliana]
  misc_feature (1)..(250): Homolog of NCBI NO: 14596175 NR Description: Unknown protein [Arabidopsis thaliana]
MSFEEEEEEETFEHTLLVVREVSVYKIPPRTTSGGYKCGEWLQSDKIWSGRLRVVSCKDRCEIRLEDSNSGDLFAACFVDPGRRENSVEPSLDSSRYFVLRIDDGRGKYAFIGLGFAERNEAFDFNVALSDHEKYVRREKEKETGETSESDNHIDIHPAVNHRLKEGETIRINVKPKPTTNGTGMLSAALSGTGKPKPLALAPPPKAAGVTRSPLPPPPNDPVASRIASDGCKESRRNEPLSDLSQLKKNLPSTAGSGSSKSTGAASGWAAF

SEQ ID NO: 30654 - DNA, 2435 bp, Arabidopsis thaliana
  misc_feature (1)..(2435): Ceres Seq. ID no. 12327293
  misc_feature: MA Experiment ID: 108577 Result: Down-regulated in Transcription
  misc_feature: MA Experiment 108577 PARAMETER Experiment Name: At_42deg_Heat_cDNA_P Parameter: Temperature (deg C) Value: 42 vs. 22
  misc_feature: MA Experiment 108577 PARAMETER Experiment Name: At_42deg_Heat_cDNA_P Parameter: Timepoint (hr) Value: 6
  misc_feature: MA Experiment 108577 PARAMETER Experiment Name: At_42deg_Heat_cDNA_P Parameter: Tissue Value: Aerial
  misc_feature: MA Experiment ID: 20000087 Result: Down-regulated in Transcription
  misc_feature: MA Experiment 20000087 PARAMETER Experiment Name: At_100uM_ABA_Mutants_cDNA_P Parameter: Plant Line Value: WS
  misc_feature: MA Experiment 20000087 PARAMETER Experiment Name: At_100uM_ABA_Mutants_cDNA_P Parameter: Timepoint (hr) Value: 6
  misc_feature: MA Experiment 20000087 PARAMETER Experiment Name: At_100uM_ABA_Mutants_cDNA_P Parameter: Tissue Value: Aerial
  misc_feature: MA Experiment 20000087 PARAMETER Experiment Name: At_100uM_ABA_Mutants_cDNA_P Parameter: Treatment Value: 100uM ABA vs. No Treatment
  misc_feature: MA Experiment ID: 20000111 Result: Down-regulated in Transcription
  misc_feature: MA Experiment 20000111 PARAMETER Experiment Name: At_42deg_Heat_cDNA_P Parameter: Temperature (deg C) Value: 42 vs. 22
  misc_feature: MA Experiment 20000111 PARAMETER Experiment Name: At_42deg_Heat_cDNA_P Parameter: Timepoint (hr) Value: 6
  misc_feature: MA Experiment 20000111 PARAMETER Experiment Name: At_42deg_Heat_cDNA_P Parameter: Tissue Value: Aerial
  misc_feature: MA Experiment ID: 20000173 Result: Down-regulated in Transcription
  misc_feature: MA Experiment 20000173 PARAMETER Experiment Name: At_42deg_Heat_P Parameter: Age (day) Value: 14
  misc_feature: MA Experiment 20000173 PARAMETER Experiment Name: At_42deg_Heat_P Parameter: Organism Value: A. thaliana
  misc_feature: MA Experiment 20000173 PARAMETER Experiment Name: At_42deg_Heat_P Parameter: Plant Line Value: WS
  misc_feature: MA Experiment 20000173 PARAMETER Experiment Name: At_42deg_Heat_P Parameter: Temperature (deg C) Value: 42 vs. 22
  misc_feature: MA Experiment 20000173 PARAMETER Experiment Name: At_42deg_Heat_P Parameter: Timepoint (hr) Value: 6
  misc_feature: MA Experiment 20000173 PARAMETER Experiment Name: At_42deg_Heat_P Parameter: Tissue Value: Aerial
  misc_feature: MA Experiment ID: 20000794 Result: Up-regulated in Transcription
  misc_feature: MA Experiment 20000794 PARAMETER Experiment Name: At_Petals_P Parameter: Age (day) Value: 23-25 days
  misc_feature: MA Experiment 20000794 PARAMETER Experiment Name: At_Petals_P Parameter: Plant Line Value: WS
  misc_feature: MA Experiment 20000794 PARAMETER Experiment Name: At_Petals_P Parameter: Tissue Value: Petals vs. Whole plant
atctcactttcctttctattcccggatttgccgctttcttcttcttcatcatctctctctcaaaatcaccccttttaaagttgtttcctttatacgcaaaagtgaacgcagatcttaatgcagctactgtgatttcgattcttagggtaaatatattcttttactcattggattggcactcctcagcatctgggtttttgcaaagcattcttattacttccactgattcaaacatgtggaagtttaaaccttttgctcaaaaagaacctgcgggtctcgaaggtcgatttctcgagataggaaatctgaaagttcaagttagaaatgtcattgcggaaggaggtttctccagtgtttacttagctcaagatgtaaatcacgcgtcaaagcaatatgctttgaagcacatgatatgcaatgacgaggagtcacttgaactcgtaatgaaagagatctcggttctgaaatccctcaagggacatccaaatgttgtcacgctctacgcacatggtatcttggatatggggaggaataaaaaagaagctcttttggctatggatttttgtggtaaatctcttgtggatgtgcttgagaatagaggtgctggttactttgaagagaaacaagctcttacgatttttagagatgtgtgtaatgctgtctttgcaatgcattgtcaatccccacgcattgctcacagagacttgaaggctgagaatcttctattgagctcagatggacaatggaaattgtgtgattttggaagcgtttcgacaaatcacaagatttttgaaagagcagaagagatgggaattgaagaagataatattagaaaatacacaacaccaacatatagagctcctgagatgtgggatctctttcgaagggagatgataagcgagaaggtcgatatatgggctcttggatgtctcttgtttcggatatgctatttcaagaatgcatttgatggagaatcaaagctgcaaatcttaaacgggaattatcgtattccagaatcgcctaaatacagtgtatttattacggatctcatcaaagaaatgctccaagcttcacccgatgaacgaccagatattacacagatttggtttcgtgtcaatgagcagcttcctgctaatttacagaaatcattaccggatcgaccacctgaaatgcaatctactggagtccatgatggctcatcaaaatcagcaactaaaccttctccagcacctcgtagaagtccgccaccgccgccaccatcttctggagaatcagatagtggaggaccgctcggtgccttttgggcgactcagcatgctaaaacctcagttgtatcagaagataacaaaaacatgcctaaatttgatgaaccaaacagtaacacatctaaatctgaaagagttcgtgtggatagtcatcaacccaaaaaaccaagtcctgtgagaggagaggctcgtggtattcaaagaaataaagatcttgaaactacgatttctcagaagaatacaactcctgctgcagccaataacatgacaagagtgtccaaggatgatgccttcaactcgtttgttgctgactttgataccacaaagttcgataatggtaataaacctggcaaagaagaggcattggaagctgagatacagaggttaaaagacgagttgaagcaaacaaaatcagagaaggcagaaataactgctaagtttgaaaagctttctgctatctgcagatcgcaaaggcaagagttgcaggatctcaaacaaacacttgcctctaaaagtgcctcaccgtcaccgagcagagactcttcacaaaatcaaccctctccagggatgcattccatgtcatcaactccatcgagagataagatggaaggaacaatgtgggaacttcaacaggacagatctaactggtcaactggcagctctgatacaaattcatggcaaccttttagtgatgaagcgaaacccgtgatggaatctgcatcaaagggtactcaaggttttgagccatggggtttcgagacagaatcctttagagccgctgcaacgtctgcagctgctacttctgcatctggaacacaaagatctatgggctctggaaacagcacttcacagagatatgggaactcaaagatgagagaaaaccagaaaacagctcaacctgctggatgggccggcttctaaaactcactcagatgcgcattgctatttcttcctcatgcaacaacaacagcttcatgttgctgccattacagaatcttgaatctttttgtagatgatgatcatcccctgtttttgtgctgctgctaaatataccccacccatatccattatgttttatgtagagtcttaaactttacacattctctgagctgtggccagatatctcagcttatggattattattggaaaaataaataattcaagattcag

SEQ ID NO: 30655 - protein, 727 aa, Arabidopsis thaliana
  peptide (1)..(727): Ceres Seq. ID no. 12327294
  misc_feature (85)..(525): Homolog of NCBI NO: 13591947 NR Description: cyclin G-associated kinase [Rattus norvegicus]
  misc_feature (87)..(525): Homolog of NCBI NO: 17375734 NR Description: Cyclin G-associated kinase
  misc_feature (87)..(525): Homolog of NCBI NO: 4885251 NR Description: cyclin G associated kinase [Homo sapiens]
  misc_feature (90)..(417): Homolog of NCBI NO: 40789031 NR Description: KIAA1048 protein [Homo sapiens]
  misc_feature (90)..(417): Homolog of NCBI NO: 29570780 NR Description: adaptor-associated kinase 1 [Homo sapiens]
  misc_feature (90)..(417): Homolog of NCBI NO: 12803719 NR Description: Similar to KIAA1048 protein [Homo sapiens]
  misc_feature (91)..(373): Homolog of NCBI NO: 28829923 NR Description: similar to Homo sapiens (Human). Hypothetical
  misc_feature (620)..(710): Homolog of NCBI NO: 7487297 NR Description: probable serine/threonine protein kinase
  misc_feature (638)..(727): Homolog of NCBI NO: 7487297 NR Description: probable serine/threonine protein kinase
  misc_feature (78)..(619): Homolog of NCBI NO: 7487297 NR Description: probable serine/threonine protein kinase
LTFLSIPGFAAFFFFIISLSKSPLLKLFPLYAKVNADLNAATVISILRVNIFFYSLDWHSSASGFLQSILITSTDSNMWKFKPFAQKEPAGLEGRFLEIGNLKVQVRNVIAEGGFSSVYLAQDVNHASKQYALKHMICNDEESLELVMKEISVLKSLKGHPNVVTLYAHGILDMGRNKKEALLAMDFCGKSLVDVLENRGAGYFEEKQALTIFRDVCNAVFAMHCQSPRIAHRDLKAENLLLSSDGQWKLCDFGSVSTNHKIFERAEEMGIEEDNIRKYTTPTYRAPEMWDLFRREMISEKVDIWALGCLLFRICYFKNAFDGESKLQILNGNYRIPESPKYSVFITDLIKEMLQASPDERPDITQIWFRVNEQLPANLQKSLPDRPPEMQSTGVHDGSSKSATKPSPAPRRSPPPPPPSSGESDSGGPLGAFWATQHAKTSVVSEDNKNMPKFDEPNSNTSKSERVRVDSHQPKKPSPVRGEARGIQRNKDLETTISQKNTTPAAANNMTRVSKDDAFNSFVADFDTTKFDNGNKPGKEEALEAEIQRLKDELKQTKSEKAEITAKFEKLSAICRSQRQELQDLKQTLASKSASPSPSRDSSQNQPSPGMHSMSSTPSRDKMEGTMWELQQDRSNWSTGSSDTNSWQPFSDEAKPVMESASKGTQGFEPWGFETESFRAAATSAAATSASGTQRSMGSGNSTSQRYGNSKMRENQKTAQPAGWAGF

SEQ ID NO: 30656 - protein, 650 aa, Arabidopsis thaliana
  peptide (1)..(650): Ceres Seq. ID no. 12327295
  misc_feature (8)..(448): Homolog of NCBI NO: 13591947 NR Description: cyclin G-associated kinase [Rattus norvegicus]
  misc_feature (10)..(448): Homolog of NCBI NO: 17375734 NR Description: Cyclin G-associated kinase
  misc_feature (10)..(448): Homolog of NCBI NO: 4885251 NR Description: cyclin G associated kinase [Homo sapiens]
  misc_feature (13)..(340): Homolog of NCBI NO: 40789031 NR Description: KIAA1048 protein [Homo sapiens]
  misc_feature (13)..(340): Homolog of NCBI NO: 29570780 NR Description: adaptor-associated kinase 1 [Homo sapiens]
  misc_feature (13)..(340): Homolog of NCBI NO: 12803719 NR Description: Similar to KIAA1048 protein [Homo sapiens]
  misc_feature (14)..(296): Homolog of NCBI NO: 28829923 NR Description: similar to Homo sapiens (Human). Hypothetical
  misc_feature (543)..(633): Homolog of NCBI NO: 7487297 NR Description: probable serine/threonine protein kinase
  misc_feature (561)..(650): Homolog of NCBI NO: 7487297 NR Description: probable serine/threonine protein kinase
  misc_feature (1)..(542): Homolog of NCBI NO: 7487297 NR Description: probable serine/threonine protein kinase
MWKFKPFAQKEPAGLEGRFLEIGNLKVQVRNVIAEGGFSSVYLAQDVNHASKQYALKHMICNDEESLELVMKEISVLKSLKGHPNVVTLYAHGILDMGRNKKEALLAMDFCGKSLVDVLENRGAGYFEEKQALTIFRDVCNAVFAMHCQSPRIAHRDLKAENLLLSSDGQWKLCDFGSVSTNHKIFERAEEMGIEEDNIRKYTTPTYRAPEMWDLFRREMISEKVDIWALGCLLFRICYFKNAFDGESKLQILNGNYRIPESPKYSVFITDLIKEMLQASPDERPDITQIWFRVNEQLPANLQKSLPDRPPEMQSTGVHDGSSKSATKPSPAPRRSPPPPPPSSGESDSGGPLGAFWATQHAKTSVVSEDNKNMPKFDEPNSNTSKSERVRVDSHQPKKPSPVRGEARGIQRNKDLETTISQKNTTPAAANNMTRVSKDDAFNSFVADFDTTKFDNGNKPGKEEALEAEIQRLKDELKQTKSEKAEITAKFEKLSAICRSQRQELQDLKQTLASKSASPSPSRDSSQNQPSPGMHSMSSTPSRDKMEGTMWELQQDRSNWSTGSSDTNSWQPFSDEAKPVMESASKGTQGFEPWGFETESFRAAATSAAATSASGTQRSMGSGNSTSQRYGNSKMRENQKTAQPAGWAGF

SEQ ID NO: 30657 - protein, 592 aa, Arabidopsis thaliana
  peptide (1)..(592): Ceres Seq. ID no. 12327296
  misc_feature (1)..(390): Homolog of NCBI NO: 13591947 NR Description: cyclin G-associated kinase [Rattus norvegicus]
  misc_feature (1)..(390): Homolog of NCBI NO: 17375734 NR Description: Cyclin G-associated kinase
  misc_feature (1)..(390): Homolog of NCBI NO: 4885251 NR Description: cyclin G associated kinase [Homo sapiens]
  misc_feature (1)..(282): Homolog of NCBI NO: 40789031 NR Description: KIAA1048 protein [Homo sapiens]
  misc_feature (1)..(282): Homolog of NCBI NO: 29570780 NR Description: adaptor-associated kinase 1 [Homo sapiens]
  misc_feature (1)..(282): Homolog of NCBI NO: 12803719 NR Description: Similar to KIAA1048 protein [Homo sapiens]
  misc_feature (1)..(238): Homolog of NCBI NO: 28829923 NR Description: similar to Homo sapiens (Human). Hypothetical
  misc_feature (485)..(575): Homolog of NCBI NO: 7487297 NR Description: probable serine/threonine protein kinase
  misc_feature (503)..(592): Homolog of NCBI NO: 7487297 NR Description: probable serine/threonine protein kinase
  misc_feature (1)..(484): Homolog of NCBI NO: 7487297 NR Description: probable serine/threonine protein kinase
MICNDEESLELVMKEISVLKSLKGHPNVVTLYAHGILDMGRNKKEALLAMDFCGKSLVDVLENRGAGYFEEKQALTIFRDVCNAVFAMHCQSPRIAHRDLKAENLLLSSDGQWKLCDFGSVSTNHKIFERAEEMGIEEDNIRKYTTPTYRAPEMWDLFRREMISEKVDIWALGCLLFRICYFKNAFDGESKLQILNGNYRIPESPKYSVFITDLIKEMLQASPDERPDITQIWFRVNEQLPANLQKSLPDRPPEMQSTGVHDGSSKSATKPSPAPRRSPPPPPPSSGESDSGGPLGAFWATQHAKTSVVSEDNKNMPKFDEPNSNTSKSERVRVDSHQPKKPSPVRGEARGIQRNKDLETTISQKNTTPAAANNMTRVSKDDAFNSFVADFDTTKFDNGNKPGKEEALEAEIQRLKDELKQTKSEKAEITAKFEKLSAICRSQRQELQDLKQTLASKSASPSPSRDSSQNQPSPGMHSMSSTPSRDKMEGTMWELQQDRSNWSTGSSDTNSWQPFSDEAKPVMESASKGTQGFEPWGFETESFRAAATSAAATSASGTQRSMGSGNSTSQRYGNSKMRENQKTAQPAGWAGF

SEQ ID NO: 30658 - DNA, 1582 bp, Arabidopsis thaliana
  misc_feature (1)..(1582): Ceres Seq. ID no. 12339796
  misc_feature: MA Experiment ID: 108461 Result: Down-regulated in Transcription
  misc_feature: MA Experiment 108461 PARAMETER Experiment Name: At_Germinating_Seeds_cDNA_P Parameter: Age (day) Value: 1 vs. 0
  misc_feature: MA Experiment 108461 PARAMETER Experiment Name: At_Germinating_Seeds_cDNA_P Parameter: Tissue Value: Germinating Seeds
  misc_feature: MA Experiment ID: 108463 Result: Down-regulated in Transcription
  misc_feature: MA Experiment 108463 PARAMETER Experiment Name: At_Germinating_Seeds_cDNA_P Parameter: Age (day) Value: 3 vs. 0
  misc_feature: MA Experiment 108463 PARAMETER Experiment Name: At_Germinating_Seeds_cDNA_P Parameter: Tissue Value: Germinating Seeds
  misc_feature: MA Experiment ID: 20000180 Result: Down-regulated in Transcription
  misc_feature: MA Experiment 20000180 PARAMETER Experiment Name: At_Germinating_Seeds_P Parameter: Age (hr) Value: 24 vs. 0
  misc_feature: MA Experiment 20000180 PARAMETER Experiment Name: At_Germinating_Seeds_P Parameter: Tissue Value: Germinating Seeds
tgagaaaatgcctgagagaaatgcagtgtcatggagtgctatgatcactgggctttgtcagaacggtgaagtggatcgcgcggttgtgttgtttcggaaaatgcctgtgaaggattcgtctcctctatgtgcacttgtggctggtcttattaaaaacgagagactttcagaagctgcgtgggttttgggtcagtatgggagtttagtttcaggaagggaagatttggtgtatgcttataacactttgattgttggatatggacagcgaggacaagtagaagcagctcgatgtctgtttgatcagattcctgatctctgtggtgatgatcatggtggagagtttagagagaggttctgtaaaaatgttgtgtcatggaattctatgatcaaagcttacttgaaagtgggtgatgtggtctctgctaggttgctatttgatcagatgaaagaccgcgatacaatttcttggaacacaatgattgatggatacgtacatgtttccaggatggaagatgcttttgctctgttttcggaaatgccgaaccgtgatgcacattcgtggaacatgatggtctcgggttatgctagtgttggcaatgtagagcttgctcgccactactttgaaaaaacacctgagaaacatacagtctcgtggaactcgataatagcagcttatgagaaaaacaaggactacaaagaagctgttgatttgtttatccggatgaacattgaaggagagaagcctgacccacatactttaacttctcttctcagtgcatctaccgggcttgtaaatctgcgtttaggaatgcagatgcaccaaatcgttgtcaagactgtgatccccgatgttccagtccacaatgcccttatcactatgtattcaagatgcggtgaaataatggagtcgaggagaatcttcgatgaaatgaaactcaaaagagaagtaatcacatggaatgcaatgataggaggatatgcatttcatggtaatgcctcagaggccttgaatctgttcgggtcgatgaaaagcaacgggatatatccttctcacataacattcgtctcagttctgaacgcttgtgctcacgcgggacttgttgatgaggctaaagcacagtttgtgtccatgatgagtgtgtacaagatcgagccgatgatggaacattattcttccctggtcaacgttaccagtggacaagggcagtttgaagaggccatgtatatcataaagagtatgccttttgagccagacaaaacggtatggggtgcattattggatgcttgtaggatataacaatgtagggcttgcacatgttgcagctgaagcaatgtcgagactcgaaccagagagctcaacaccttatgtactgttatacaacatgtacgcggatatgggactatgggacgaagcttctcaagtgagaatgaacatggagagtaaaagaatcaagaaggaaagaggatccagttgggttgactcctcaacgtaaaaagcagcctttatttatgtttacttaaacataaaaattgatttgggatcagaattgagatagaaattgataaggtactcttgaaagtt

SEQ ID NO: 30659 - protein, 431 aa, Arabidopsis thaliana
  peptide (1)..(431): Ceres Seq. ID no. 12339797
  misc_feature (154)..(188): Pfam Name: PPR repeat Pfam Description: PPR repeat
  misc_feature (120)..(431): Homolog of NCBI NO: 9958072 NR Description: Hypothetical protein [Arabidopsis thaliana]
  misc_feature (120)..(431): Homolog of NCBI NO: 15228653 NR Description: hypothetical protein; protein id: At3g29230.1
  misc_feature (114)..(431): Homolog of NCBI NO: 15222280 NR Description: hypothetical protein; protein id: At1g13410.1
  misc_feature (78)..(431): Homolog of NCBI NO: 27817913 NR Description: OJ1066_B03.8 [Oryza sativa (japonica
  misc_feature (77)..(431): Homolog of NCBI NO: 22328738 NR Description: similar to putative selenium-binding protein
  misc_feature (1)..(430): Homolog of NCBI NO: 15223594 NR Description: hypothetical protein; protein id: At1g56690.1
  misc_feature (2)..(429): Homolog of NCBI NO: 38344941 NR Description: OSJNBa0084A10.17 [Oryza sativa (japonica
  misc_feature (1)..(430): Homolog of NCBI NO: 15217508 NR Description: hypothetical protein; protein id: At1g09410.1
  misc_feature (1)..(431): Homolog of NCBI NO: 15235498 NR Description: hypothetical protein; protein id: At4g02750.1
  misc_feature (1)..(431): Homolog of NCBI NO: 15220741 NR Description: hypothetical protein; protein id: At1g62260.1
EKMPERNAVSWSAMITGLCQNGEVDRAVVLFRKMPVKDSSPLCALVAGLIKNERLSEAAWVLGQYGSLVSGREDLVYAYNTLIVGYGQRGQVEAARCLFDQIPDLCGDDHGGEFRERFCKNVVSWNSMIKAYLKVGDVVSARLLFDQMKDRDTISWNTMIDGYVHVSRMEDAFALFSEMPNRDAHSWNMMVSGYASVGNVELARHYFEKTPEKHTVSWNSIIAAYEKNKDYKEAVDLFIRMNIEGEKPDPHTLTSLLSASTGLVNLRLGMQMHQIVVKTVIPDVPVHNALITMYSRCGEIMESRRIFDEMKLKREVITWNAMIGGYAFHGNASEALNLFGSMKSNGIYPSHITFVSVLNACAHAGLVDEAKAQFVSMMSVYKIEPMMEHYSSLVNVTSGQGQFEEAMYIIKSMPFEPDKTVWGALLDACRI

SEQ ID NO: 30660 - protein, 429 aa, Arabidopsis thaliana
  peptide (1)..(429): Ceres Seq. ID no. 12339798
  misc_feature (152)..(186): Pfam Name: PPR repeat Pfam Description: PPR repeat
  misc_feature (118)..(429): Homolog of NCBI NO: 9958072 NR Description: Hypothetical protein [Arabidopsis thaliana]
  misc_feature (118)..(429): Homolog of NCBI NO: 15228653 NR Description: hypothetical protein; protein id: At3g29230.1
  misc_feature (112)..(429): Homolog of NCBI NO: 15222280 NR Description: hypothetical protein; protein id: At1g13410.1
  misc_feature (76)..(429): Homolog of NCBI NO: 27817913 NR Description: OJ1066_B03.8 [Oryza sativa (japonica
  misc_feature (75)..(429): Homolog of NCBI NO: 22328738 NR Description: similar to putative selenium-binding protein
  misc_feature (1)..(428): Homolog of NCBI NO: 15223594 NR Description: hypothetical protein; protein id: At1g56690.1
  misc_feature (1)..(427): Homolog of NCBI NO: 38344941 NR Description: OSJNBa0084A10.17 [Oryza sativa (japonica
  misc_feature (1)..(428): Homolog of NCBI NO: 15217508 NR Description: hypothetical protein; protein id: At1g09410.1
  misc_feature (1)..(429): Homolog of NCBI NO: 15235498 NR Description: hypothetical protein; protein id: At4g02750.1
  misc_feature (1)..(429): Homolog of NCBI NO: 15220741 NR Description: hypothetical protein; protein id: At1g62260.1
MPERNAVSWSAMITGLCQNGEVDRAVVLFRKMPVKDSSPLCALVAGLIKNERLSEAAWVLGQYGSLVSGREDLVYAYNTLIVGYGQRGQVEAARCLFDQIPDLCGDDHGGEFRERFCKNVVSWNSMIKAYLKVGDVVSARLLFDQMKDRDTISWNTMIDGYVHVSRMEDAFALFSEMPNRDAHSWNMMVSGYASVGNVELARHYFEKTPEKHTVSWNSIIAAYEKNKDYKEAVDLFIRMNIEGEKPDPHTLTSLLSASTGLVNLRLGMQMHQIVVKTVIPDVPVHNALITMYSRCGEIMESRRIFDEMKLKREVITWNAMIGGYAFHGNASEALNLFGSMKSNGIYPSHITFVSVLNACAHAGLVDEAKAQFVSMMSVYKIEPMMEHYSSLVNVTSGQGQFEEAMYIIKSMPFEPDKTVWGALLDACRI

SEQ ID NO: 30661 - protein, 418 aa, Arabidopsis thaliana
  peptide (1)..(418): Ceres Seq. ID no. 12339799
  misc_feature (141)..(175): Pfam Name: PPR repeat Pfam Description: PPR repeat
  misc_feature (107)..(418): Homolog of NCBI NO: 9958072 NR Description: Hypothetical protein [Arabidopsis thaliana]
  misc_feature (107)..(418): Homolog of NCBI NO: 15228653 NR Description: hypothetical protein; protein id: At3g29230.1
  misc_feature (101)..(418): Homolog of NCBI NO: 15222280 NR Description: hypothetical protein; protein id: At1g13410.1
  misc_feature (65)..(418): Homolog of NCBI NO: 27817913 NR Description: OJ1066_B03.8 [Oryza sativa (japonica
  misc_feature (64)..(418): Homolog of NCBI NO: 22328738 NR Description: similar to putative selenium-binding protein
  misc_feature (1)..(417): Homolog of NCBI NO: 15223594 NR Description: hypothetical protein; protein id: At1g56690.1
  misc_feature (1)..(416): Homolog of NCBI NO: 38344941 NR Description: OSJNBa0084A10.17 [Oryza sativa (japonica
  misc_feature (1)..(417): Homolog of NCBI NO: 15217508 NR Description: hypothetical protein; protein id: At1g09410.1
  misc_feature (1)..(418): Homolog of NCBI NO: 15235498 NR Description: hypothetical protein; protein id: At4g02750.1
  misc_feature (1)..(418): Homolog of NCBI NO: 15220741 NR Description: hypothetical protein; protein id: At1g62260.1
MITGLCQNGEVDRAVVLFRKMPVKDSSPLCALVAGLIKNERLSEAAWVLGQYGSLVSGREDLVYAYNTLIVGYGQRGQVEAARCLFDQIPDLCGDDHGGEFRERFCKNVVSWNSMIKAYLKVGDVVSARLLFDQMKDRDTISWNTMIDGYVHVSRMEDAFALFSEMPNRDAHSWNMMVSGYASVGNVELARHYFEKTPEKHTVSWNSIIAAYEKNKDYKEAVDLFIRMNIEGEKPDPHTLTSLLSASTGLVNLRLGMQMHQIVVKTVIPDVPVHNALITMYSRCGEIMESRRIFDEMKLKREVITWNAMIGGYAFHGNASEALNLFGSMKSNGIYPSHITFVSVLNACAHAGLVDEAKAQFVSMMSVYKIEPMMEHYSSLVNVTSGQGQFEEAMYIIKSMPFEPDKTVWGALLDACRI

SEQ ID NO: 30662 - DNA, 1274 bp, Arabidopsis thaliana
  misc_feature (1)..(1274): Ceres Seq. ID no. 12394774
  misc_feature: MA Experiment ID: 108433 Result: Down-regulated in Transcription
  misc_feature: MA Experiment 108433 PARAMETER Experiment Name: At_rhl_Mutant2_cDNA_P Parameter: Age (day) Value: 7
  misc_feature: MA Experiment 108433 PARAMETER Experiment Name: At_rhl_Mutant2_cDNA_P Parameter: Organism Value: A. thaliana
  misc_feature: MA Experiment 108433 PARAMETER Experiment Name: At_rhl_Mutant2_cDNA_P Parameter: Plant Line Value: rhl Mutant vs. wt landsburg
  misc_feature: MA Experiment 108433 PARAMETER Experiment Name: At_rhl_Mutant2_cDNA_P Parameter: Tissue Value: Roots
  misc_feature: MA Experiment ID: 108434 Result: Up-regulated in Transcription
  misc_feature: MA Experiment 108434 PARAMETER Experiment Name: At_Root_Tips_cDNA_P Parameter: Tissue Value: Root Tips
  misc_feature: MA Experiment ID: 108462 Result: Down-regulated in Transcription
  misc_feature: MA Experiment 108462 PARAMETER Experiment Name: At_Germinating_Seeds_cDNA_P Parameter: Age (day) Value: 2 vs. 0
  misc_feature: MA Experiment 108462 PARAMETER Experiment Name: At_Germinating_Seeds_cDNA_P Parameter: Tissue Value: Germinating Seeds
  misc_feature: MA Experiment ID: 108463 Result: Down-regulated in Transcription
  misc_feature: MA Experiment 108463 PARAMETER Experiment Name: At_Germinating_Seeds_cDNA_P Parameter: Age (day) Value: 3 vs. 0
  misc_feature: MA Experiment 108463 PARAMETER Experiment Name: At_Germinating_Seeds_cDNA_P Parameter: Tissue Value: Germinating Seeds
  misc_feature: MA Experiment ID: 108464 Result: Down-regulated in Transcription
  misc_feature: MA Experiment 108464 PARAMETER Experiment Name: At_Germinating_Seeds_cDNA_P Parameter: Age (day) Value: 4 vs. 0
  misc_feature: MA Experiment 108464 PARAMETER Experiment Name: At_Germinating_Seeds_cDNA_P Parameter: Tissue Value: Germinating Seeds
  misc_feature: MA Experiment ID: 20000113 Result: Up-regulated in Transcription
  misc_feature: MA Experiment 20000113 PARAMETER Experiment Name: At_42deg_Heat_cDNA_P Parameter: Temperature (deg C) Value: 42 vs. 22
  misc_feature: MA Experiment 20000113 PARAMETER Experiment Name: At_42deg_Heat_cDNA_P Parameter: Timepoint (hr) Value: 8
  misc_feature: MA Experiment 20000113 PARAMETER Experiment Name: At_42deg_Heat_cDNA_P Parameter: Tissue Value: Aerial
  misc_feature: MA Experiment ID: 20000180 Result: Down-regulated in Transcription
  misc_feature: MA Experiment 20000180 PARAMETER Experiment Name: At_Germinating_Seeds_P Parameter: Age (hr) Value: 24 vs. 0
  misc_feature: MA Experiment 20000180 PARAMETER Experiment Name: At_Germinating_Seeds_P Parameter: Tissue Value: Germinating Seeds
acttcacaccaaaatcaccacctctcacaaaccctagttcctcctctctctcatttctcggagatattcaccagagcaataaccatggacgctaaagaaacctctgccaccgatttgaaaagaccgagagaagaggatgataacggcggcgccgctaccatggagacggagaacggagatcagaaaaaggaacctgcttgtttctccactgttattcctgggtggttctctgaaatgagtcctatgtggccaggagaggcacactcattgaaggttgagaaagttttgtttcaagggaaatcagattatcaggatgttattgttttccagtctgcaacatatggaaaagttttggttttggatggagtaatccaacttacggagagagatgaatgtgcttatcaggaaatgatcactcatcttcctttgtgttctatccctaaccctaagaaggttttggtcattggaggaggagatggaggtgtcctgcgggaagttgcacgccatgcttctattgagcagattgacatgtgtgaaattgataaaatggtggtcgacgtgtctaagcaatttttccctgatgtagcaattggatatgaggatcctcgcgtgaaccttgtcattggcgatggtgttgctttcttgaagaatgctgctgaaggatcatacgatgcagttattgttgactcttcagatccaatcggtcctgcaaaggagctgtttgagaaacccttcttccaatctgtggctagagctcttcgtcctggtggagttgtgtgcactcaagctgaaagcttgtggcttcacatggacatcatcgaagacattgtttccaactgccgtgagatcttcaagggttctgtgaactatgcttggaccagcgttccaacataccccagtggggtcattggatttatgctttgttcaactgaaggacctgatgttgacttcaaacacccactgaacccaattgacgagagctccagcaaatcaaatggacctttgaagttttacaatgccgagattcattcagctgcattctgcttgccttctttcgccaagaaggtcattgagtcaaaagccaattgaaaagggaaagaaaactaatctggaggatcgttgaatttatcaaaaaataaaagctttttacagtttttagaatgttctgttgtttcactcatgtttctgtaacacaatgcaagagcgactatgtcttcttttagcattacacattcgcatagtagcaaatcctatttacaacatgttcttatgct

SEQ ID NO: 30663 - protein, 362 aa, Arabidopsis thaliana
  peptide (1)..(362): Ceres Seq. ID no. 12394775
  misc_feature (74)..(319): Pfam Name: Spermine/spermidine synthase Pfam Description: Spermine/spermidine synthase
  misc_feature (58)..(362): Homolog of NCBI NO: 6094335 NR Description: Spermidine synthase (Putrescine
  misc_feature (57)..(360): Homolog of NCBI NO: 6094327 NR Description: Spermidine synthase 1 (Putrescine
  misc_feature (54)..(361): Homolog of NCBI NO: 6094330 NR Description: Spermidine synthase 2 (Putrescine
  misc_feature (75)..(362): Homolog of NCBI NO: 2821961 NR Description: spermidine synthase [Arabidopsis thaliana]
  misc_feature (39)..(360): Homolog of NCBI NO: 12230013 NR Description: Spermidine synthase (Putrescine
  misc_feature (39)..(361): Homolog of NCBI NO: 23495352 NR Description: spermidine synthase [Malus x domestica]
  misc_feature (29)..(362): Homolog of NCBI NO: 12229958 NR Description: Spermidine synthase 1 (Putrescine
  misc_feature (39)..(361): Homolog of NCBI NO: 23495354 NR Description: spermidine synthase [Malus x domestica]
  misc_feature (32)..(362): Homolog of NCBI NO: 15223115 NR Description: spermidine synthase, putative
  misc_feature (29)..(362): Homolog of NCBI NO: 15220885 NR Description: putative spermidine synthase
TSHQNHHLSQTLVPPLSHFSEIFTRAITMDAKETSATDLKRPREEDDNGGAATMETENGDQKKEPACFSTVIPGWFSEMSPMWPGEAHSLKVEKVLFQGKSDYQDVIVFQSATYGKVLVLDGVIQLTERDECAYQEMITHLPLCSIPNPKKVLVIGGGDGGVLREVARHASIEQIDMCEIDKMVVDVSKQFFPDVAIGYEDPRVNLVIGDGVAFLKNAAEGSYDAVIVDSSDPIGPAKELFEKPFFQSVARALRPGGVVCTQAESLWLHMDIIEDIVSNCREIFKGSVNYAWTSVPTYPSGVIGFMLCSTEGPDVDFKHPLNPIDESSSKSNGPLKFYNAEIHSAAFCLPSFAKKVIESKAN

SEQ ID NO: 30664 - protein, 334 aa, Arabidopsis thaliana
  peptide (1)..(334): Ceres Seq. ID no. 12394776
  misc_feature (46)..(291): Pfam Name: Spermine/spermidine synthase Pfam Description: Spermine/spermidine synthase
  misc_feature (30)..(334): Homolog of NCBI NO: 6094335 NR Description: Spermidine synthase (Putrescine
  misc_feature (29)..(332): Homolog of NCBI NO: 6094327 NR Description: Spermidine synthase 1 (Putrescine
  misc_feature (26)..(333): Homolog of NCBI NO: 6094330 NR Description: Spermidine synthase 2 (Putrescine
  misc_feature (47)..(334): Homolog of NCBI NO: 2821961 NR Description: spermidine synthase [Arabidopsis thaliana]
  misc_feature (11)..(332): Homolog of NCBI NO: 12230013 NR Description: Spermidine synthase (Putrescine
  misc_feature (11)..(333): Homolog of NCBI NO: 23495352 NR Description: spermidine synthase [Malus x domestica]
  misc_feature (1)..(334): Homolog of NCBI NO: 12229958 NR Description: Spermidine synthase 1 (Putrescine
  misc_feature (11)..(333): Homolog of NCBI NO: 23495354 NR Description: spermidine synthase [Malus x domestica]
  misc_feature (4)..(334): Homolog of NCBI NO: 15223115 NR Description: spermidine synthase, putative
  misc_feature (1)..(334): Homolog of NCBI NO: 15220885 NR Description: putative spermidine synthase
MDAKETSATDLKRPREEDDNGGAATMETENGDQKKEPACFSTVIPGWFSEMSPMWPGEAHSLKVEKVLFQGKSDYQDVIVFQSATYGKVLVLDGVIQLTERDECAYQEMITHLPLCSIPNPKKVLVIGGGDGGVLREVARHASIEQIDMCEIDKMVVDVSKQFFPDVAIGYEDPRVNLVIGDGVAFLKNAAEGSYDAVIVDSSDPIGPAKELFEKPFFQSVARALRPGGVVCTQAESLWLHMDIIEDIVSNCREIFKGSVNYAWTSVPTYPSGVIGFMLCSTEGPDVDFKHPLNPIDESSSKSNGPLKFYNAEIHSAAFCLPSFAKKVIESKAN

SEQ ID NO: 30665 - protein, 309 aa, Arabidopsis thaliana
  peptide (1)..(309): Ceres Seq. ID no. 12394777
  misc_feature (21)..(266): Pfam Name: Spermine/spermidine synthase Pfam Description: Spermine/spermidine synthase
  misc_feature (5)..(309): Homolog of NCBI NO: 6094335 NR Description: Spermidine synthase (Putrescine
  misc_feature (4)..(307): Homolog of NCBI NO: 6094327 NR Description: Spermidine synthase 1 (Putrescine
  misc_feature (1)..(308): Homolog of NCBI NO: 6094330 NR Description: Spermidine synthase 2 (Putrescine
  misc_feature (22)..(309): Homolog of NCBI NO: 2821961 NR Description: spermidine synthase [Arabidopsis thaliana]
  misc_feature (1)..(307): Homolog of NCBI NO: 12230013 NR Description: Spermidine synthase (Putrescine
  misc_feature (1)..(308): Homolog of NCBI NO: 23495352 NR Description: spermidine synthase [Malus x domestica]
  misc_feature (1)..(309): Homolog of NCBI NO: 12229958 NR Description: Spermidine synthase 1 (Putrescine
  misc_feature (1)..(308): Homolog of NCBI NO: 23495354 NR Description: spermidine synthase [Malus x domestica]
  misc_feature (1)..(309): Homolog of NCBI NO: 15223115 NR Description: spermidine synthase, putative
  misc_feature (1)..(309): Homolog of NCBI NO: 15220885 NR Description: putative spermidine synthase
METENGDQKKEPACFSTVIPGWFSEMSPMWPGEAHSLKVEKVLFQGKSDYQDVIVFQSATYGKVLVLDGVIQLTERDECAYQEMITHLPLCSIPNPKKVLVIGGGDGGVLREVARHASIEQIDMCEIDKMVVDVSKQFFPDVAIGYEDPRVNLVIGDGVAFLKNAAEGSYDAVIVDSSDPIGPAKELFEKPFFQSVARALRPGGVVCTQAESLWLHMDIIEDIVSNCREIFKGSVNYAWTSVPTYPSGVIGFMLCSTEGPDVDFKHPLNPIDESSSKSNGPLKFYNAEIHSAAFCLPSFAKKVIESKAN

SEQ ID NO: 30666 - DNA, 865 bp, Arabidopsis thaliana
  misc_feature (1)..(865): Ceres Seq. ID no. 12603611
  misc_feature: MA Experiment ID: 108434 Result: Down-regulated in Transcription
  misc_feature: MA Experiment 108434 PARAMETER Experiment Name: At_Root_Tips_cDNA_P Parameter: Tissue Value: Root Tips
  misc_feature: MA Experiment ID: 108435 Result: Down-regulated in Transcription
  misc_feature: MA Experiment 108435 PARAMETER Experiment Name: At_stm_Mutants_cDNA_P Parameter: Plant Line Value: wt Landsburg vs stm
  misc_feature: MA Experiment 108435 PARAMETER Experiment Name: At_stm_Mutants_cDNA_P Parameter: Tissue Value: Shoot Apical Meristem Region
  misc_feature: MA Experiment ID: 108462 Result: Up-regulated in Transcription
  misc_feature: MA Experiment 108462 PARAMETER Experiment Name: At_Germinating_Seeds_cDNA_P Parameter: Age (day) Value: 2 vs. 0
  misc_feature: MA Experiment 108462 PARAMETER Experiment Name: At_Germinating_Seeds_cDNA_P Parameter: Tissue Value: Germinating Seeds
  misc_feature: MA Experiment ID: 108464 Result: Up-regulated in Transcription
  misc_feature: MA Experiment 108464 PARAMETER Experiment Name: At_Germinating_Seeds_cDNA_P Parameter: Age (day) Value: 4 vs. 0
  misc_feature: MA Experiment 108464 PARAMETER Experiment Name: At_Germinating_Seeds_cDNA_P Parameter: Tissue Value: Germinating Seeds
  misc_feature: MA Experiment ID: 108488 Result: Down-regulated in Transcription
  misc_feature: MA Experiment ID: 108574 Result: Up-regulated in Transcription
  misc_feature: MA Experiment 108574 PARAMETER Experiment Name: At_Wounding__cDNA_P Parameter: Timepoint (hr) Value: 1
  misc_feature: MA Experiment 108574 PARAMETER Experiment Name: At_Wounding__cDNA_P Parameter: Tissue Value: Aerial
  misc_feature: MA Experiment 108574 PARAMETER Experiment Name: At_Wounding__cDNA_P Parameter: Treatment Value: Wounding vs. No Wounding
  misc_feature: MA Experiment ID: 108579 Result: Up-regulated in Transcription
  misc_feature: MA Experiment 108579 PARAMETER Experiment Name: At_4deg_Cold_cDNA_P Parameter: Temperature (deg C) Value: 4 vs. 22
  misc_feature: MA Experiment 108579 PARAMETER Experiment Name: At_4deg_Cold_cDNA_P Parameter: Timepoint (hr) Value: 6
  misc_feature: MA Experiment 108579 PARAMETER Experiment Name: At_4deg_Cold_cDNA_P Parameter: Tissue Value: Aerial
  misc_feature: MA Experiment ID: 108594 Result: Up-regulated in Transcription
  misc_feature: MA Experiment 108594 PARAMETER Experiment Name: At_Ler-rhl_Root_cDNA_P Parameter: Plant Line Value: null
  misc_feature: MA Experiment ID: 20000113 Result: Up-regulated in Transcription
  misc_feature: MA Experiment 20000113 PARAMETER Experiment Name: At_42deg_Heat_cDNA_P Parameter: Temperature (deg C) Value: 42 vs. 22
  misc_feature: MA Experiment 20000113 PARAMETER Experiment Name: At_42deg_Heat_cDNA_P Parameter: Timepoint (hr) Value: 8
  misc_feature: MA Experiment 20000113 PARAMETER Experiment Name: At_42deg_Heat_cDNA_P Parameter: Tissue Value: Aerial
  misc_feature: MA Experiment ID: 20000224 Result: Up-regulated in Transcription
  misc_feature: MA Experiment ID: 20000234 Result: Down-regulated in Transcription
  misc_feature: MA Experiment 20000234 PARAMETER Experiment Name: At_Siliques_P Parameter: Age (day) Value: 21
  misc_feature: MA Experiment 20000234 PARAMETER Experiment Name: At_Siliques_P Parameter: Organism Value: A. thaliana
  misc_feature: MA Experiment 20000234 PARAMETER Experiment Name: At_Siliques_P Parameter: Plant Line Value: WS
  misc_feature: MA Experiment 20000234 PARAMETER Experiment Name: At_Siliques_P Parameter: Tissue Value: Less Than 5mm Siliques vs. Whole Plant
  misc_feature: MA Experiment ID: 20001450 Result: Up-regulated in Transcription
  misc_feature: MA Experiment 20001450 PARAMETER Experiment Name: At_Far-red-induction_P Parameter: Age (day) Value: 7
  misc_feature: MA Experiment 20001450 PARAMETER Experiment Name: At_Far-red-induction_P Parameter: Light Value: Far-red vs. White
  misc_feature: MA Experiment 20001450 PARAMETER Experiment Name: At_Far-red-induction_P Parameter: Organism Value: A. thaliana
  misc_feature: MA Experiment 20001450 PARAMETER Experiment Name: At_Far-red-induction_P Parameter: Plant Line Value: Columbia
  misc_feature: MA Experiment 20001450 PARAMETER Experiment Name: At_Far-red-induction_P Parameter: Timepoint (hr) Value: 8
  misc_feature: MA Experiment 20001450 PARAMETER Experiment Name: At_Far-red-induction_P Parameter: Tissue Value: Whole Plant
  misc_feature: MA Experiment ID: 20001451 Result: Up-regulated in Transcription
  misc_feature: MA Experiment 20001451 PARAMETER Experiment Name: At_Far-red-induction_P Parameter: Age (day) Value: 7
  misc_feature: MA Experiment 20001451 PARAMETER Experiment Name: At_Far-red-induction_P Parameter: Light Value: Far-red vs. White
  misc_feature: MA Experiment 20001451 PARAMETER Experiment Name: At_Far-red-induction_P Parameter: Organism Value: A. thaliana
  misc_feature: MA Experiment 20001451 PARAMETER Experiment Name: At_Far-red-induction_P Parameter: Plant Line Value: Columbia
  misc_feature: MA Experiment 20001451 PARAMETER Experiment Name: At_Far-red-induction_P Parameter: Timepoint (hr) Value: 24
  misc_feature: MA Experiment 20001451 PARAMETER Experiment Name: At_Far-red-induction_P Parameter: Tissue Value: Whole Plant
aacggaggatataaaaactctttaactcattattgtcctaaaatctcaattttatccattttcacggaaaaaacataaaatctgttcttcttcttcggctgagagacaatggcggaggagcaaaagacgagtaaggttgacgtagaatctccggctgttttagctccggcgaaggaaccgactcctgctccggtggaagtcgcggatgagaaaattcataatccacctcccgtcgagtccaaagctcttgccgttgtagaaaaacccatcgaggagcatacacctaagaaagcttcatctggttcggccgatagagatgtgatacttgccgacttggaaaaagagaagaaaacgtcattcatcaaagcatgggaagagagtgagaagtcaaaggctgagaacagggcacaaaagaagatctctgatgtgcatgcttgggaaaatagcaagaaagcagccgtagaagctcaacttaggaagatcgaggaaaaattagagaagaaaaaagcgcagtacggtgagaaaatgaagaacaaagtagctgcaatccacaagttagcagaagagaagagagcaatggttgaagctaaaaaaggagaagagcttctcaaagctgaagaaatgggtgctaagtatagagccactggtgtagtaccaaaggcaacgtgtggatgtttctaagcctttattgaatttgtatctttgtaacaattcatctctgtttctttcttcttcttttgtttttgtgtgattcaacaactctttttagtttttgttatttgtttggtcgtttgtgtcttgtttacatattgggtgattgtgtgtaaaagtgaaagattaatggagtataattgtatgaagcatc

SEQ ID NO: 30667 - protein, 190 aa, Arabidopsis thaliana
  peptide (1)..(190): Ceres Seq. ID no. 12603612
  misc_feature (78)..(187): Pfam Name: Remorin, C-terminal region Pfam Description: Remorin, C-terminal region
  misc_feature (78)..(187): Pfam Name: Remorin, C-terminal region Pfam Description: Remorin, C-terminal region
  misc_feature (3)..(190): Homolog of NCBI NO: 15229057 NR Description: remorin -like protein; protein id: At3g48940.1
  misc_feature (39)..(189): Homolog of NCBI NO: 4883530 NR Description: remorin 2 [Lycopersicon esculentum]
  misc_feature (1)..(189): Homolog of NCBI NO: 21555669 NR Description: remorin [Arabidopsis thaliana]
  misc_feature (1)..(189): Homolog of NCBI NO: 15237822 NR Description: putative protein
  misc_feature (4)..(190): Homolog of NCBI NO: 34925093 NR Description: Remorin (pp34)
  misc_feature (3)..(190): Homolog of NCBI NO: 15229057 NR Description: remorin -like protein; protein id: At3g48940.1
  misc_feature (1)..(189): Homolog of NCBI NO: 21555669 NR Description: remorin [Arabidopsis thaliana]
  misc_feature (4)..(190): Homolog of NCBI NO: 34925093 NR Description: Remorin (pp34)
  misc_feature (1)..(190): Homolog of NCBI NO: 15225899 NR Description: remorin
  misc_feature (1)..(190): Homolog of NCBI NO: 601843 NR Description: DNA-binding protein
  misc_feature (1)..(190): Homolog of NCBI NO: 15233068 NR Description: putative DNA-binding protein
  misc_feature (1)..(190): Homolog of NCBI NO: 32489830 NR Description: OSJNBb0039L24.13 [Oryza sativa (japonica
  misc_feature (4)..(190): Homolog of NCBI NO: 4731573 NR Description: remorin 1 [Lycopersicon esculentum]
  misc_feature (1)..(189): Homolog of NCBI NO: 15237822 NR Description: putative protein
  misc_feature (39)..(189): Homolog of NCBI NO: 4883530 NR Description: remorin 2 [Lycopersicon esculentum]
  misc_feature (4)..(190): Homolog of NCBI NO: 4731573 NR Description: remorin 1 [Lycopersicon esculentum]
  misc_feature (1)..(190): Homolog of NCBI NO: 32489830 NR Description: OSJNBb0039L24.13 [Oryza sativa (japonica
  misc_feature (1)..(190): Homolog of NCBI NO: 15233068 NR Description: putative DNA-binding protein
  misc_feature (1)..(190): Homolog of NCBI NO: 601843 NR Description: DNA-binding protein
  misc_feature (1)..(190): Homolog of NCBI NO: 15225899 NR Description: remorin
MAEEQKTSKVDVESPAVLAPAKEPTPAPVEVADEKIHNPPPVESKALAVVEKPIEEHTPKKASSGSADRDVILADLEKEKKTSFIKAWEESEKSKAENRAQKKISDVHAWENSKKAAVEAQLRKIEEKLEKKKAQYGEKMKNKVAAIHKLAEEKRAMVEAKKGEELLKAEEMGAKYRATGVVPKATCGCF

SEQ ID NO: 30668 - DNA, 1371 bp, Arabidopsis thaliana
  misc_feature (1)..(1371): Ceres Seq. ID no. 12722627
  misc_feature: MA Experiment ID: 20000184 Result: Up-regulated in Transcription
  misc_feature: MA Experiment 20000184 PARAMETER Experiment Name: At_Shoots__P Parameter: Age (day) Value: 7
  misc_feature: MA Experiment 20000184 PARAMETER Experiment Name: At_Shoots__P Parameter: Tissue Value: Shoots vs. Whole Plant
  misc_feature: MA Experiment ID: 20000234 Result: Up-regulated in Transcription
  misc_feature: MA Experiment 20000234 PARAMETER Experiment Name: At_Siliques_P Parameter: Age (day) Value: 21
  misc_feature: MA Experiment 20000234 PARAMETER Experiment Name: At_Siliques_P Parameter: Organism Value: A. thaliana
  misc_feature: MA Experiment 20000234 PARAMETER Experiment Name: At_Siliques_P Parameter: Plant Line Value: WS
  misc_feature: MA Experiment 20000234 PARAMETER Experiment Name: At_Siliques_P Parameter: Tissue Value: Less Than 5mm Siliques vs. Whole Plant
  misc_feature: MA Experiment ID: 20000235 Result: Up-regulated in Transcription
  misc_feature: MA Experiment 20000235 PARAMETER Experiment Name: At_Siliques_P Parameter: Age (day) Value: 21
  misc_feature: MA Experiment 20000235 PARAMETER Experiment Name: At_Siliques_P Parameter: Organism Value: A. thaliana
  misc_feature: MA Experiment 20000235 PARAMETER Experiment Name: At_Siliques_P Parameter: Plant Line Value: WS
  misc_feature: MA Experiment 20000235 PARAMETER Experiment Name: At_Siliques_P Parameter: Tissue Value: 5-10mm Siliques vs. Whole Plant
  misc_feature: MA Experiment ID: 20000495 Result: Up-regulated in Transcription
  misc_feature: MA Experiment 20000495 PARAMETER Experiment Name: At_Guard_Cells_P Parameter: Harvest Date Value: 8/2/2002
  misc_feature: MA Experiment 20000495 PARAMETER Experiment Name: At_Guard_Cells_P Parameter: Organism Value: A. thaliana
  misc_feature: MA Experiment 20000495 PARAMETER Experiment Name: At_Guard_Cells_P Parameter: Tissue Value: Guard Cells vs. Leaves
  misc_feature: MA Experiment ID: 20001557 Result: Up-regulated in Transcription
  misc_feature: MA Experiment 20001557 PARAMETER Experiment Name: At_Drought_Soil_Dry_P Parameter: Age (day) Value: 27
  misc_feature: MA Experiment 20001557 PARAMETER Experiment Name: At_Drought_Soil_Dry_P Parameter: Organism Value: A. thaliana
  misc_feature: MA Experiment 20001557 PARAMETER Experiment Name: At_Drought_Soil_Dry_P Parameter: Plant Line Value: WS
  misc_feature: MA Experiment 20001557 PARAMETER Experiment Name: At_Drought_Soil_Dry_P Parameter: Post Timepoint (hr) Value: 3
  misc_feature: MA Experiment 20001557 PARAMETER Experiment Name: At_Drought_Soil_Dry_P Parameter: Post-Treatment Value: Re-Water vs. No Drought
  misc_feature: MA Experiment 20001557 PARAMETER Experiment Name: At_Drought_Soil_Dry_P Parameter: Timepoint (day) Value: 13
  misc_feature: MA Experiment 20001557 PARAMETER Experiment Name: At_Drought_Soil_Dry_P Parameter: Treatment Value: Drought vs. No Drought
gacgagacattgaaaactcccatctaccttttctctttctctctctctccctcccaaagtcgaacctgcaatccctaaatccccaatttgagaccatctccagttcgtcatcgtacgacgactctctctctctctctcctcttctctgtatagtcgaattatattacaagttagatagatagcatgaattggttacctgaagctgaagctgaggatgacttcaaaggtcttctctctggtgatttctttgatgatctcatcaatcaccttgacgtccctcttgatgacattgataccaccaatggtgaaggagattgggttgacaggtttcaagaccttgagcctcctcccatggatatgttccccactttgccttctgacctcacctcttgcggctctggcatggccaaggcccctcgtgtggatattcaaaggaacattcctgctttgaaacagtcctattcttctgaagccttgtccagcactctccaccaatcttcagctcctcctgaaatcaaagtttcgaaactatttcagtctttaagtccagtgtcagttctcgagaacagttatggttctctctcgacccacaacaatggatctcagagattggctttccctgtgaaaggcatgagaagcaagcgcaaacgccccacaacactgagacttagctaccttttcccctctgaaccccgaaagcccgagaagtcaaccccgggcaaacctgaatccgagtgttacttttcttctgagcaacatgccaagaagaaacgcaagatccacctgaccacccgcacggtctcttccactctggaggcaagcaactcggatgggatagtccgcaaatgcactcattgcgagacaaccaagaccccacagtggagggaaggacccagtggaccgaagaccctctgcaatgcttgcggagtgaggttcagatctggtcgcctagttccagaataccgaccagcctcaagccccaccttcatcccagctgtgcattcaaactcacacaggaagatcattgagatgagaaggaaggacgacgaacagtttgatagcagcatgattcgggcagtgatatccagagggtaaagcagttttttttttaaagtttggtctctgatccgcagaaatgggaagtcagtggaggaagaagatggtataaaagtagggtttagtgactgttttcaaatctgatgaagagagtttagtggtttagttcaagttagggatatgaaatattttgttgtttcattatgtgtttttatctttatctcttggctgacatttgtgtatcagaggaaaacaggtgaagccaaagtttgctctctttttttcgctatttcaaatctattctttttattcttc

SEQ ID NO: 30669 - protein, 303 aa, Arabidopsis thaliana
  peptide (1)..(303): Ceres Seq. ID no. 12722628
  misc_feature (83)..(286): Homolog of NCBI NO: 37572451 NR Description: AG-motif binding protein-5 [Nicotiana tabacum]
  misc_feature (114)..(286): Homolog of NCBI NO: 37572445 NR Description: AG-motif binding protein-2 [Nicotiana tabacum]
  misc_feature (114)..(286): Homolog of NCBI NO: 12711287 NR Description: GATA-1 zinc finger protein [Nicotiana tabacum]
  misc_feature (19)..(286): Homolog of NCBI NO: 15233101 NR Description: GATA zinc finger protein
  misc_feature (3)..(301): Homolog of NCBI NO: 15226388 NR Description: GATA zinc finger protein; protein id: At2g28340.1
  misc_feature (1)..(302): Homolog of NCBI NO: 15223085 NR Description: GATA zinc finger protein
  misc_feature (1)..(302): Homolog of NCBI NO: 8778844 NR Description: T6D22.9 [Arabidopsis thaliana]
  misc_feature (1)..(303): Homolog of NCBI NO: 15223086 NR Description: GATA zinc finger protein; protein id: At1g08010.1
  misc_feature (1)..(99): Homolog of NCBI NO: 8778844 NR Description: T6D22.9 [Arabidopsis thaliana]
  misc_feature (90)..(303): Homolog of NCBI NO: 8778844 NR Description: T6D22.9 [Arabidopsis thaliana]
MNWLPEAEAEDDFKGLLSGDFFDDLINHLDVPLDDIDTTNGEGDWVDRFQDLEPPPMDMFPTLPSDLTSCGSGMAKAPRVDIQRNIPALKQSYSSEALSSTLHQSSAPPEIKVSKLFQSLSPVSVLENSYGSLSTHNNGSQRLAFPVKGMRSKRKRPTTLRLSYLFPSEPRKPEKSTPGKPESECYFSSEQHAKKKRKIHLTTRTVSSTLEASNSDGIVRKCTHCETTKTPQWREGPSGPKTLCNACGVRFRSGRLVPEYRPASSPTFIPAVHSNSHRKIIEMRRKDDEQFDSSMIRAVISRG

SEQ ID NO: 30670 - protein, 247 aa, Arabidopsis thaliana
  peptide (1)..(247): Ceres Seq. ID no. 12722629
  misc_feature (27)..(230): Homolog of NCBI NO: 37572451 NR Description: AG-motif binding protein-5 [Nicotiana tabacum]
  misc_feature (58)..(230): Homolog of NCBI NO: 37572445 NR Description: AG-motif binding protein-2 [Nicotiana tabacum]
  misc_feature (58)..(230): Homolog of NCBI NO: 12711287 NR Description: GATA-1 zinc finger protein [Nicotiana tabacum]
  misc_feature (1)..(230): Homolog of NCBI NO: 15233101 NR Description: GATA zinc finger protein
  misc_feature (1)..(245): Homolog of NCBI NO: 15226388 NR Description: GATA zinc finger protein; protein id: At2g28340.1
  misc_feature (1)..(246): Homolog of NCBI NO: 15223085 NR Description: GATA zinc finger protein
  misc_feature (1)..(246): Homolog of NCBI NO: 8778844 NR Description: T6D22.9 [Arabidopsis thaliana]
  misc_feature (1)..(247): Homolog of NCBI NO: 15223086 NR Description: GATA zinc finger protein; protein id: At1g08010.1
  misc_feature (1)..(43): Homolog of NCBI NO: 8778844 NR Description: T6D22.9 [Arabidopsis thaliana]
  misc_feature (34)..(247): Homolog of NCBI NO: 8778844 NR Description: T6D22.9 [Arabidopsis thaliana]
MDMFPTLPSDLTSCGSGMAKAPRVDIQRNIPALKQSYSSEALSSTLHQSSAPPEIKVSKLFQSLSPVSVLENSYGSLSTHNNGSQRLAFPVKGMRSKRKRPTTLRLSYLFPSEPRKPEKSTPGKPESECYFSSEQHAKKKRKIHLTTRTVSSTLEASNSDGIVRKCTHCETTKTPQWREGPSGPKTLCNACGVRFRSGRLVPEYRPASSPTFIPAVHSNSHRKIIEMRRKDDEQFDSSMIRAVISRG

SEQ ID NO: 30671 - protein, 245 aa, Arabidopsis thaliana
  peptide (1)..(245): Ceres Seq. ID no. 12722630
  misc_feature (25)..(228): Homolog of NCBI NO: 37572451 NR Description: AG-motif binding protein-5 [Nicotiana tabacum]
  misc_feature (56)..(228): Homolog of NCBI NO: 37572445 NR Description: AG-motif binding protein-2 [Nicotiana tabacum]
  misc_feature (56)..(228): Homolog of NCBI NO: 12711287 NR Description: GATA-1 zinc finger protein [Nicotiana tabacum]
  misc_feature (1)..(228): Homolog of NCBI NO: 15233101 NR Description: GATA zinc finger protein
  misc_feature (1)..(243): Homolog of NCBI NO: 15226388 NR Description: GATA zinc finger protein; protein id: At2g28340.1
  misc_feature (1)..(244): Homolog of NCBI NO: 15223085 NR Description: GATA zinc finger protein
  misc_feature (1)..(244): Homolog of NCBI NO: 8778844 NR Description: T6D22.9 [Arabidopsis thaliana]
  misc_feature (1)..(245): Homolog of NCBI NO: 15223086 NR Description: GATA zinc finger protein; protein id: At1g08010.1
  misc_feature (1)..(41): Homolog of NCBI NO: 8778844 NR Description: T6D22.9 [Arabidopsis thaliana]
  misc_feature (32)..(245): Homolog of NCBI NO: 8778844 NR Description: T6D22.9 [Arabidopsis thaliana]
MFPTLPSDLTSCGSGMAKAPRVDIQRNIPALKQSYSSEALSSTLHQSSAPPEIKVSKLFQSLSPVSVLENSYGSLSTHNNGSQRLAFPVKGMRSKRKRPTTLRLSYLFPSEPRKPEKSTPGKPESECYFSSEQHAKKKRKIHLTTRTVSSTLEASNSDGIVRKCTHCETTKTPQWREGPSGPKTLCNACGVRFRSGRLVPEYRPASSPTFIPAVHSNSHRKIIEMRRKDDEQFDSSMIRAVISRG

SEQ ID NO: 30672 - DNA, 1359 bp, Arabidopsis thaliana
  misc_feature (1)..(1359): Ceres Seq. ID no. 12384828
  misc_feature: MA Experiment ID: 108434 Result: Down-regulated in Transcription
  misc_feature: MA Experiment 108434 PARAMETER Experiment Name: At_Root_Tips_cDNA_P Parameter: Tissue Value: Root Tips
  misc_feature: MA Experiment ID: 108462 Result: Up-regulated in Transcription
  misc_feature: MA Experiment 108462 PARAMETER Experiment Name: At_Germinating_Seeds_cDNA_P Parameter: Age (day) Value: 2 vs. 0
  misc_feature: MA Experiment 108462 PARAMETER Experiment Name: At_Germinating_Seeds_cDNA_P Parameter: Tissue Value: Germinating Seeds
  misc_feature: MA Experiment ID: 108463 Result: Up-regulated in Transcription
  misc_feature: MA Experiment 108463 PARAMETER Experiment Name: At_Germinating_Seeds_cDNA_P Parameter: Age (day) Value: 3 vs. 0
  misc_feature: MA Experiment 108463 PARAMETER Experiment Name: At_Germinating_Seeds_cDNA_P Parameter: Tissue Value: Germinating Seeds
  misc_feature: MA Experiment ID: 108464 Result: Up-regulated in Transcription
  misc_feature: MA Experiment 108464 PARAMETER Experiment Name: At_Germinating_Seeds_cDNA_P Parameter: Age (day) Value: 4 vs. 0
  misc_feature: MA Experiment 108464 PARAMETER Experiment Name: At_Germinating_Seeds_cDNA_P Parameter: Tissue Value: Germinating Seeds
  misc_feature: MA Experiment ID: 108573 Result: Up-regulated in Transcription
  misc_feature: MA Experiment 108573 PARAMETER Experiment Name: At_Drought_cDNA_P Parameter: Timepoint (hr) Value: 6
  misc_feature: MA Experiment 108573 PARAMETER Experiment Name: At_Drought_cDNA_P Parameter: Tissue Value: Aerial
  misc_feature: MA Experiment 108573 PARAMETER Experiment Name: At_Drought_cDNA_P Parameter: Treatment Value: Drought vs. No Drought
  misc_feature: MA Experiment ID: 20000090 Result: Down-regulated in Transcription
  misc_feature: MA Experiment ID: 20000111 Result: Down-regulated in Transcription
  misc_feature: MA Experiment 20000111 PARAMETER Experiment Name: At_42deg_Heat_cDNA_P Parameter: Temperature (deg C) Value: 42 vs. 22
  misc_feature: MA Experiment 20000111 PARAMETER Experiment Name: At_42deg_Heat_cDNA_P Parameter: Timepoint (hr) Value: 6
  misc_feature: MA Experiment 20000111 PARAMETER Experiment Name: At_42deg_Heat_cDNA_P Parameter: Tissue Value: Aerial
  misc_feature: MA Experiment ID: 20000171 Result: Down-regulated in Transcription
  misc_feature: MA Experiment 20000171 PARAMETER Experiment Name: At_42deg_Heat_P Parameter: Age (day) Value: 14
  misc_feature: MA Experiment 20000171 PARAMETER Experiment Name: At_42deg_Heat_P Parameter: Organism Value: A. thaliana
  misc_feature: MA Experiment 20000171 PARAMETER Experiment Name: At_42deg_Heat_P Parameter: Plant Line Value: WS
  misc_feature: MA Experiment 20000171 PARAMETER Experiment Name: At_42deg_Heat_P Parameter: Temperature (deg C) Value: 42 vs. 22
  misc_feature: MA Experiment 20000171 PARAMETER Experiment Name: At_42deg_Heat_P Parameter: Timepoint (hr) Value: 1
  misc_feature: MA Experiment 20000171 PARAMETER Experiment Name: At_42deg_Heat_P Parameter: Tissue Value: Aerial
  misc_feature: MA Experiment ID: 20000173 Result: Down-regulated in Transcription
  misc_feature: MA Experiment 20000173 PARAMETER Experiment Name: At_42deg_Heat_P Parameter: Age (day) Value: 14
  misc_feature: MA Experiment 20000173 PARAMETER Experiment Name: At_42deg_Heat_P Parameter: Organism Value: A. thaliana
  misc_feature: MA Experiment 20000173 PARAMETER Experiment Name: At_42deg_Heat_P Parameter: Plant Line Value: WS
  misc_feature: MA Experiment 20000173 PARAMETER Experiment Name: At_42deg_Heat_P Parameter: Temperature (deg C) Value: 42 vs. 22
  misc_feature: MA Experiment 20000173 PARAMETER Experiment Name: At_42deg_Heat_P Parameter: Timepoint (hr) Value: 6
  misc_feature: MA Experiment 20000173 PARAMETER Experiment Name: At_42deg_Heat_P Parameter: Tissue Value: Aerial
  misc_feature: MA Experiment ID: 20000185 Result: Down-regulated in Transcription
  misc_feature: MA Experiment 20000185 PARAMETER Experiment Name: At_Roots__P Parameter: Age (day) Value: 7 vs. 21
  misc_feature: MA Experiment 20000185 PARAMETER Experiment Name: At_Roots__P Parameter: Organism Value: A. thaliana
  misc_feature: MA Experiment 20000185 PARAMETER Experiment Name: At_Roots__P Parameter: Tissue Value: Roots vs. Whole Plant
  misc_feature: MA Experiment ID: 20000235 Result: Down-regulated in Transcription
  misc_feature: MA Experiment 20000235 PARAMETER Experiment Name: At_Siliques_P Parameter: Age (day) Value: 21
  misc_feature: MA Experiment 20000235 PARAMETER Experiment Name: At_Siliques_P Parameter: Organism Value: A. thaliana
  misc_feature: MA Experiment 20000235 PARAMETER Experiment Name: At_Siliques_P Parameter: Plant Line Value: WS
  misc_feature: MA Experiment 20000235 PARAMETER Experiment Name: At_Siliques_P Parameter: Tissue Value: 5-10mm Siliques vs. Whole Plant
  misc_feature: MA Experiment ID: 20000265 Result: Down-regulated in Transcription
  misc_feature: MA Experiment 20000265 PARAMETER Experiment Name: At_Open_Flower_P Parameter: Age (day) Value: 21
  misc_feature: MA Experiment 20000265 PARAMETER Experiment Name: At_Open_Flower_P Parameter: Plant Line Value: WS
  misc_feature: MA Experiment 20000265 PARAMETER Experiment Name: At_Open_Flower_P Parameter: Tissue Value: Closed Flower vs. Whole Plant
  misc_feature: MA Experiment ID: 20000268 Result: Down-regulated in Transcription
  misc_feature: MA Experiment 20000268 PARAMETER Experiment Name: At_100mM_NaCl__P Parameter: Age (day) Value: 14
  misc_feature: MA Experiment 20000268 PARAMETER Experiment Name: At_100mM_NaCl__P Parameter: Organism Value: A. thaliana
  misc_feature: MA Experiment 20000268 PARAMETER Experiment Name: At_100mM_NaCl__P Parameter: Plant Line Value: WS
  misc_feature: MA Experiment 20000268 PARAMETER Experiment Name: At_100mM_NaCl__P Parameter: Timepoint (hr) Value: 6
  misc_feature: MA Experiment 20000268 PARAMETER Experiment Name: At_100mM_NaCl__P Parameter: Tissue Value: Whole Plant
  misc_feature: MA Experiment 20000268 PARAMETER Experiment Name: At_100mM_NaCl__P Parameter: Treatment Value: 100mM NaCl vs. No Treatment
  misc_feature: MA Experiment ID: 20000286 Result: Down-regulated in Transcription
  misc_feature: MA Experiment 20000286 PARAMETER Experiment Name: At_Open_Flower_P Parameter: Age (day) Value: 21
  misc_feature: MA Experiment 20000286 PARAMETER Experiment Name: At_Open_Flower_P Parameter: Plant Line Value: WS
  misc_feature: MA Experiment 20000286 PARAMETER Experiment Name: At_Open_Flower_P Parameter: Tissue Value: Half Open vs. Whole Plant
  misc_feature: MA Experiment ID: 20000439 Result: Down-regulated in Transcription
  misc_feature: MA Experiment 20000439 PARAMETER Experiment Name: At_Roots__P Parameter: Age (day) Value: 14 vs. 21
  misc_feature: MA Experiment 20000439 PARAMETER Experiment Name: At_Roots__P Parameter: Organism Value: A. thaliana
  misc_feature: MA Experiment 20000439 PARAMETER Experiment Name: At_Roots__P Parameter: Tissue Value: Roots vs. Whole Plant
  misc_feature: MA Experiment ID: 20000441 Result: Up-regulated in Transcription
  misc_feature: MA Experiment 20000441 PARAMETER Experiment Name: At_1uM_BR-BRZ__P Parameter: Tissue Value: Shoot Apices
  misc_feature: MA Experiment 20000441 PARAMETER Experiment Name: At_1uM_BR-BRZ__P Parameter: Treatment Value: 1uM BR vs. No Treatment
  misc_feature: MA Experiment ID: 20000443 Result: Up-regulated in Transcription
  misc_feature: MA Experiment 20000443 PARAMETER Experiment Name: At_1uM_BR-BRZ__P Parameter: Tissue Value: Shoot Apices
  misc_feature: MA Experiment 20000443 PARAMETER Experiment Name: At_1uM_BR-BRZ__P Parameter: Treatment Value: 1uM BRZ vs. No Treatment
  misc_feature: MA Experiment ID: 20000495 Result: Down-regulated in Transcription
  misc_feature: MA Experiment 20000495 PARAMETER Experiment Name: At_Guard_Cells_P Parameter: Harvest Date Value: 8/2/2002
  misc_feature: MA Experiment 20000495 PARAMETER Experiment Name: At_Guard_Cells_P Parameter: Organism Value: A. thaliana
  misc_feature: MA Experiment 20000495 PARAMETER Experiment Name: At_Guard_Cells_P Parameter: Tissue Value: Guard Cells vs. Leaves
  misc_feature: MA Experiment ID: 20000496 Result: Down-regulated in Transcription
  misc_feature: MA Experiment 20000496 PARAMETER Experiment Name: At_Guard_Cells_P Parameter: Harvest Date Value: 7/19/2002
  misc_feature: MA Experiment 20000496 PARAMETER Experiment Name: At_Guard_Cells_P Parameter: Organism Value: Canola
  misc_feature: MA Experiment 20000496 PARAMETER Experiment Name: At_Guard_Cells_P Parameter: Tissue Value: Guard Cells vs. Leaves
  misc_feature: MA Experiment ID: 20000709 Result: Up-regulated in Transcription
  misc_feature: MA Experiment 20000709 PARAMETER Experiment Name: At_15mM_NH4NO3_L-to-H_P Parameter: Age (hr) Value: 14
  misc_feature: MA Experiment 20000709 PARAMETER Experiment Name: At_15mM_NH4NO3_L-to-H_P Parameter: Organism Value: A. thaliana
  misc_feature: MA Experiment 20000709 PARAMETER Experiment Name: At_15mM_NH4NO3_L-to-H_P Parameter: Plant Line Value: WS
  misc_feature: MA Experiment 20000709 PARAMETER Experiment Name: At_15mM_NH4NO3_L-to-H_P Parameter: Timepoint (hr) Value: 4
  misc_feature: MA Experiment 20000709 PARAMETER Experiment Name: At_15mM_NH4NO3_L-to-H_P Parameter: Tissue Value: Aerial
  misc_feature: MA Experiment 20000709 PARAMETER Experiment Name: At_15mM_NH4NO3_L-to-H_P Parameter: Treatment Value: 15mM NH4NO3 vs. 30mM Mannitol
  misc_feature: MA Experiment ID: 20001247 Result: Up-regulated in Transcription
  misc_feature: MA Experiment 20001247 PARAMETER Experiment Name: At_Far-red-induction_P Parameter: Age (day) Value: 7
  misc_feature: MA Experiment 20001247 PARAMETER Experiment Name: At_Far-red-induction_P Parameter: Light Value: Far-red vs. White
  misc_feature: MA Experiment 20001247 PARAMETER Experiment Name: At_Far-red-induction_P Parameter: Organism Value: A. thaliana
  misc_feature: MA Experiment 20001247 PARAMETER Experiment Name: At_Far-red-induction_P Parameter: Plant Line Value: Columbia
  misc_feature: MA Experiment 20001247 PARAMETER Experiment Name: At_Far-red-induction_P Parameter: Timepoint (hr) Value: 1
  misc_feature: MA Experiment 20001247 PARAMETER Experiment Name: At_Far-red-induction_P Parameter: Tissue Value: Whole Plant
  misc_feature: MA Experiment ID: 20001450 Result: Up-regulated in Transcription
  misc_feature: MA Experiment 20001450 PARAMETER Experiment Name: At_Far-red-induction_P Parameter: Age (day) Value: 7
  misc_feature: MA Experiment 20001450 PARAMETER Experiment Name: At_Far-red-induction_P Parameter: Light Value: Far-red vs. White
  misc_feature: MA Experiment 20001450 PARAMETER Experiment Name: At_Far-red-induction_P Parameter: Organism Value: A. thaliana
  misc_feature: MA Experiment 20001450 PARAMETER Experiment Name: At_Far-red-induction_P Parameter: Plant Line Value: Columbia
  misc_feature: MA Experiment 20001450 PARAMETER Experiment Name: At_Far-red-induction_P Parameter: Timepoint (hr) Value: 8
  misc_feature: MA Experiment 20001450 PARAMETER Experiment Name: At_Far-red-induction_P Parameter: Tissue Value: Whole Plant
  misc_feature: MA Experiment ID: 20001451 Result: Up-regulated in Transcription
  misc_feature: MA Experiment 20001451 PARAMETER Experiment Name: At_Far-red-induction_P Parameter: Age (day) Value: 7
  misc_feature: MA Experiment 20001451 PARAMETER Experiment Name: At_Far-red-induction_P Parameter: Light Value: Far-red vs. White
  misc_feature: MA Experiment 20001451 PARAMETER Experiment Name: At_Far-red-induction_P Parameter: Organism Value: A. thaliana
  misc_feature: MA Experiment 20001451 PARAMETER Experiment Name: At_Far-red-induction_P Parameter: Plant Line Value: Columbia
  misc_feature: MA Experiment 20001451 PARAMETER Experiment Name: At_Far-red-induction_P Parameter: Timepoint (hr) Value: 24
  misc_feature: MA Experiment 20001451 PARAMETER Experiment Name: At_Far-red-induction_P Parameter: Tissue Value: Whole Plant
  misc_feature: MA Experiment ID: 20001558 Result: Up-regulated in Transcription
  misc_feature: MA Experiment 20001558 PARAMETER Experiment Name: At_Drought_Soil_Dry_P Parameter: Age (day) Value: 27
  misc_feature: MA Experiment 20001558 PARAMETER Experiment Name: At_Drought_Soil_Dry_P Parameter: Organism Value: A. thaliana
  misc_feature: MA Experiment 20001558 PARAMETER Experiment Name: At_Drought_Soil_Dry_P Parameter: Plant Line Value: WS
  misc_feature: MA Experiment 20001558 PARAMETER Experiment Name: At_Drought_Soil_Dry_P Parameter: Post Timepoint (hr) Value: 6
  misc_feature: MA Experiment 20001558 PARAMETER Experiment Name: At_Drought_Soil_Dry_P Parameter: Post-Treatment Value: Re-Water vs. No Drought
  misc_feature: MA Experiment 20001558 PARAMETER Experiment Name: At_Drought_Soil_Dry_P Parameter: Timepoint (day) Value: 13
  misc_feature: MA Experiment 20001558 PARAMETER Experiment Name: At_Drought_Soil_Dry_P Parameter: Treatment Value: Drought vs. No Drought
  misc_feature: MA Experiment ID: 20001911 Result: Up-regulated in Transcription
  misc_feature: MA Experiment 20001911 PARAMETER Experiment Name: At_Drought_Reproduction_P Parameter: Age (day) Value: 40
  misc_feature: MA Experiment 20001911 PARAMETER Experiment Name: At_Drought_Reproduction_P Parameter: Organism Value: A. thaliana
  misc_feature: MA Experiment 20001911 PARAMETER Experiment Name: At_Drought_Reproduction_P Parameter: Plant Line Value: WS
  misc_feature: MA Experiment 20001911 PARAMETER Experiment Name: At_Drought_Reproduction_P Parameter: Timepoint (day) Value: 10
  misc_feature: MA Experiment 20001911 PARAMETER Experiment Name: At_Drought_Reproduction_P Parameter: Tissue Value: Flowers
  misc_feature: MA Experiment 20001911 PARAMETER Experiment Name: At_Drought_Reproduction_P Parameter: Treatment Value: Drought vs. No Drought
atattcactctctcttcttcattagcctttcgtctccttcttctcttctctatctctctttagcttctctacgcaagcttattatctctttctcttaaagctttttctatatacaaacagaagcgtttgatactgtaaaaaagatttagaaatggagactctgagtcgtttattggttttcatgtctctgttttccggtttagtttctggatttgctctgcaaaatcttccaatcacatcttttgaagaaagttacactcaactttttggtgacaagaacttatttgttcatcaagatggcaaatctgtccggttaacgctcgatgaaagaaccggttccggttttgtttcaaatgattattacttgcatggattcttcagtgcttcaattaaattaccttctgattatacagctggagttgttgttgccttttatatgtctaatggagatatgtatgagaagaatcatgatgagatagattttgagtttcttggtaacattagagaaaaagaatggagagttcagacaaacatttacggtaatggaagtactcattcaggaagagaagagagatataatctctggtttgatcctactgaagattttcatcaatacagtatcctctggtctgattctcacatcatattctttgtagacaatgttcctattagagaggtcaaacgtactgcggaaatgggtggtcactttccatcaaagccgatgtctctctacacaacaatatgggacggttctaaatgggcaactaacggtggaaagtacggtgtaaactacaaatatgcgccttacattgcgcggttctcggatctagtcctgcacggctgccccgtggaccctatcgagcagtttccgaggtgcgatgaaggcgcggctgaggatatgcgtgcggcgcaagagattactccttcacaaaggagtaaaatggatgttttcagacggagactcatgacatattcatattgctatgatcgggctaggtacaatgttgctttatcggagtgtgtggtgaatcccgctgaggctcaaaggcttagggtttatgatccggtcagatttggcggcattccgaggcgccaccgcaatggaaagcaccggagcaagagaagccgggttgatggaaccgagtcgatatgataacatatataggcaaaatagtatgggtgagatttgggggttctataataagtccattattttggttatttatgattcaatgcattttcacatatagaggaggcatttttgtcatttgttagttgtatatcattataagaaaagaaaaaataattaatttatttatttgtgatattttttttatatatgataaattgtttcttgct

SEQ ID NO: 30673 - protein, 333 aa, Arabidopsis thaliana
  peptide (1)..(333): Ceres Seq. ID no. 12384829
  misc_feature (31)..(216): Pfam Name: Glycosyl hydrolases family 16 Pfam Description: Glycosyl hydrolases family 16
  misc_feature (25)..(332): Homolog of NCBI NO: 32470643 NR Description: putative xyloglucan endotransglycosylase-related
  misc_feature (17)..(324): Homolog of NCBI NO: 21618261 NR Description: endoxyloglucan transferase, putative [Arabidopsis
  misc_feature (17)..(324): Homolog of NCBI NO: 15222593 NR Description: xyloglucan endotransglycosylase (XTR4), putative
  misc_feature (17)..(324): Homolog of NCBI NO: 2129774 NR Description: xyloglucan endo-1,4-beta-D-glucanase (EC 3.2.1.-)
  misc_feature (24)..(333): Homolog of NCBI NO: 13560781 NR Description: endoxyloglucan transferase [Daucus carota]
  misc_feature (17)..(332): Homolog of NCBI NO: 6681351 NR Description: ETAG-A3 [Lycopersicon esculentum]
  misc_feature (1)..(333): Homolog of NCBI NO: 15223878 NR Description: xyloglucan endotransglycosylase (XTR2)
  misc_feature (1)..(333): Homolog of NCBI NO: 21553969 NR Description: putative xyloglucan-specific glucanase
  misc_feature (1)..(333): Homolog of NCBI NO: 5533313 NR Description: endoxyloglucan transferase [Arabidopsis thaliana]
  misc_feature (1)..(333): Homolog of NCBI NO: 15226364 NR Description: xyloglucan endotransglycosylase (EXGT-A3)
METLSRLLVFMSLFSGLVSGFALQNLPITSFEESYTQLFGDKNLFVHQDGKSVRLTLDERTGSGFVSNDYYLHGFFSASIKLPSDYTAGVVVAFYMSNGDMYEKNHDEIDFEFLGNIREKEWRVQTNIYGNGSTHSGREERYNLWFDPTEDFHQYSILWSDSHIIFFVDNVPIREVKRTAEMGGHFPSKPMSLYTTIWDGSKWATNGGKYGVNYKYAPYIARFSDLVLHGCPVDPIEQFPRCDEGAAEDMRAAQEITPSQRSKMDVFRRRLMTYSYCYDRARYNVALSECVVNPAEAQRLRVYDPVRFGGIPRRHRNGKHRSKRSRVDGTESI

SEQ ID NO: 30674 - protein, 323 aa, Arabidopsis thaliana
  peptide (1)..(323): Ceres Seq. ID no. 12384830
  misc_feature (21)..(206): Pfam Name: Glycosyl hydrolases family 16 Pfam Description: Glycosyl hydrolases family 16
  misc_feature (15)..(322): Homolog of NCBI NO: 32470643 NR Description: putative xyloglucan endotransglycosylase-related
  misc_feature (7)..(314): Homolog of NCBI NO: 21618261 NR Description: endoxyloglucan transferase, putative [Arabidopsis
  misc_feature (7)..(314): Homolog of NCBI NO: 15222593 NR Description: xyloglucan endotransglycosylase (XTR4), putative
  misc_feature (7)..(314): Homolog of NCBI NO: 2129774 NR Description: xyloglucan endo-1,4-beta-D-glucanase (EC 3.2.1.-)
  misc_feature (14)..(323): Homolog of NCBI NO: 13560781 NR Description: endoxyloglucan transferase [Daucus carota]
  misc_feature (7)..(322): Homolog of NCBI NO: 6681351 NR Description: ETAG-A3 [Lycopersicon esculentum]
  misc_feature (1)..(323): Homolog of NCBI NO: 15223878 NR Description: xyloglucan endotransglycosylase (XTR2)
  misc_feature (1)..(323): Homolog of NCBI NO: 21553969 NR Description: putative xyloglucan-specific glucanase
  misc_feature (1)..(323): Homolog of NCBI NO: 5533313 NR Description: endoxyloglucan transferase [Arabidopsis thaliana]
  misc_feature (1)..(323): Homolog of NCBI NO: 15226364 NR Description: xyloglucan endotransglycosylase (EXGT-A3)
MSLFSGLVSGFALQNLPITSFEESYTQLFGDKNLFVHQDGKSVRLTLDERTGSGFVSNDYYLHGFFSASIKLPSDYTAGVVVAFYMSNGDMYEKNHDEIDFEFLGNIREKEWRVQTNIYGNGSTHSGREERYNLWFDPTEDFHQYSILWSDSHIIFFVDNVPIREVKRTAEMGGHFPSKPMSLYTTIWDGSKWATNGGKYGVNYKYAPYIARFSDLVLHGCPVDPIEQFPRCDEGAAEDMRAAQEITPSQRSKMDVFRRRLMTYSYCYDRARYNVALSECVVNPAEAQRLRVYDPVRFGGIPRRHRNGKHRSKRSRVDGTESI

SEQ ID NO: 30675 - protein, 238 aa, Arabidopsis thaliana
  peptide (1)..(238): Ceres Seq. ID no. 12384831
  misc_feature (1)..(121): Pfam Name: Glycosyl hydrolases family 16 Pfam Description: Glycosyl hydrolases family 16
  misc_feature (1)..(237): Homolog of NCBI NO: 32470643 NR Description: putative xyloglucan endotransglycosylase-related
  misc_feature (1)..(229): Homolog of NCBI NO: 21618261 NR Description: endoxyloglucan transferase, putative [Arabidopsis
  misc_feature (1)..(229): Homolog of NCBI NO: 15222593 NR Description: xyloglucan endotransglycosylase (XTR4), putative
  misc_feature (1)..(229): Homolog of NCBI NO: 2129774 NR Description: xyloglucan endo-1,4-beta-D-glucanase (EC 3.2.1.-)
  misc_feature (1)..(238): Homolog of NCBI NO: 13560781 NR Description: endoxyloglucan transferase [Daucus carota]
  misc_feature (1)..(237): Homolog of NCBI NO: 6681351 NR Description: ETAG-A3 [Lycopersicon esculentum]
  misc_feature (1)..(238): Homolog of NCBI NO: 15223878 NR Description: xyloglucan endotransglycosylase (XTR2)
  misc_feature (1)..(238): Homolog of NCBI NO: 21553969 NR Description: putative xyloglucan-specific glucanase
  misc_feature (1)..(238): Homolog of NCBI NO: 5533313 NR Description: endoxyloglucan transferase [Arabidopsis thaliana]
  misc_feature (1)..(238): Homolog of NCBI NO: 15226364 NR Description: xyloglucan endotransglycosylase (EXGT-A3)
MSNGDMYEKNHDEIDFEFLGNIREKEWRVQTNIYGNGSTHSGREERYNLWFDPTEDFHQYSILWSDSHIIFFVDNVPIREVKRTAEMGGHFPSKPMSLYTTIWDGSKWATNGGKYGVNYKYAPYIARFSDLVLHGCPVDPIEQFPRCDEGAAEDMRAAQEITPSQRSKMDVFRRRLMTYSYCYDRARYNVALSECVVNPAEAQRLRVYDPVRFGGIPRRHRNGKHRSKRSRVDGTESI

SEQ ID NO: 30676 - DNA, 1810 bp, Arabidopsis thaliana
  misc_feature (1)..(1810): Ceres Seq. ID no. 12327223
  misc_feature: MA Experiment ID: 108434 Result: Down-regulated in Transcription
  misc_feature: MA Experiment 108434 PARAMETER Experiment Name: At_Root_Tips_cDNA_P Parameter: Tissue Value: Root Tips
  misc_feature: MA Experiment ID: 108488 Result: Up-regulated in Transcription
  misc_feature: MA Experiment ID: 108573 Result: Up-regulated in Transcription
  misc_feature: MA Experiment 108573 PARAMETER Experiment Name: At_Drought_cDNA_P Parameter: Timepoint (hr) Value: 6
  misc_feature: MA Experiment 108573 PARAMETER Experiment Name: At_Drought_cDNA_P Parameter: Tissue Value: Aerial
  misc_feature: MA Experiment 108573 PARAMETER Experiment Name: At_Drought_cDNA_P Parameter: Treatment Value: Drought vs. No Drought
  misc_feature: MA Experiment ID: 20000113 Result: Down-regulated in Transcription
  misc_feature: MA Experiment 20000113 PARAMETER Experiment Name: At_42deg_Heat_cDNA_P Parameter: Temperature (deg C) Value: 42 vs. 22
  misc_feature: MA Experiment 20000113 PARAMETER Experiment Name: At_42deg_Heat_cDNA_P Parameter: Timepoint (hr) Value: 8
  misc_feature: MA Experiment 20000113 PARAMETER Experiment Name: At_42deg_Heat_cDNA_P Parameter: Tissue Value: Aerial
  misc_feature: MA Experiment ID: 20000184 Result: Up-regulated in Transcription
  misc_feature: MA Experiment 20000184 PARAMETER Experiment Name: At_Shoots__P Parameter: Age (day) Value: 7
  misc_feature: MA Experiment 20000184 PARAMETER Experiment Name: At_Shoots__P Parameter: Tissue Value: Shoots vs. Whole Plant
  misc_feature: MA Experiment ID: 20000185 Result: Up-regulated in Transcription
  misc_feature: MA Experiment 20000185 PARAMETER Experiment Name: At_Roots__P Parameter: Age (day) Value: 7 vs. 21
  misc_feature: MA Experiment 20000185 PARAMETER Experiment Name: At_Roots__P Parameter: Organism Value: A. thaliana
  misc_feature: MA Experiment 20000185 PARAMETER Experiment Name: At_Roots__P Parameter: Tissue Value: Roots vs. Whole Plant
  misc_feature: MA Experiment ID: 20000234 Result: Up-regulated in Transcription
  misc_feature: MA Experiment 20000234 PARAMETER Experiment Name: At_Siliques_P Parameter: Age (day) Value: 21
  misc_feature: MA Experiment 20000234 PARAMETER Experiment Name: At_Siliques_P Parameter: Organism Value: A. thaliana
  misc_feature: MA Experiment 20000234 PARAMETER Experiment Name: At_Siliques_P Parameter: Plant Line Value: WS
  misc_feature: MA Experiment 20000234 PARAMETER Experiment Name: At_Siliques_P Parameter: Tissue Value: Less Than 5mm Siliques vs. Whole Plant
  misc_feature: MA Experiment ID: 20000235 Result: Up-regulated in Transcription
  misc_feature: MA Experiment 20000235 PARAMETER Experiment Name: At_Siliques_P Parameter: Age (day) Value: 21
  misc_feature: MA Experiment 20000235 PARAMETER Experiment Name: At_Siliques_P Parameter: Organism Value: A. thaliana
  misc_feature: MA Experiment 20000235 PARAMETER Experiment Name: At_Siliques_P Parameter: Plant Line Value: WS
  misc_feature: MA Experiment 20000235 PARAMETER Experiment Name: At_Siliques_P Parameter: Tissue Value: 5-10mm Siliques vs. Whole Plant
  misc_feature: MA Experiment ID: 20000307 Result: Up-regulated in Transcription
  misc_feature: MA Experiment 20000307 PARAMETER Experiment Name: At_Germinating_Seeds_Sub_P Parameter: Age (hr) Value: 24 vs. 0
  misc_feature: MA Experiment 20000307 PARAMETER Experiment Name: At_Germinating_Seeds_Sub_P Parameter: Organism Value: A. thaliana
  misc_feature: MA Experiment 20000307 PARAMETER Experiment Name: At_Germinating_Seeds_Sub_P Parameter: Plant Line Value: WS
  misc_feature: MA Experiment 20000307 PARAMETER Experiment Name: At_Germinating_Seeds_Sub_P Parameter: Tissue Value: Germinating Seeds
  misc_feature: MA Experiment ID: 20000314 Result: Up-regulated in Transcription
  misc_feature: MA Experiment 20000314 PARAMETER Experiment Name: At_14day_Shoots-Roots_Sub_P Parameter: Age (day) Value: 14
  misc_feature: MA Experiment 20000314 PARAMETER Experiment Name: At_14day_Shoots-Roots_Sub_P Parameter: Organism Value: A. thaliana
  misc_feature: MA Experiment 20000314 PARAMETER Experiment Name: At_14day_Shoots-Roots_Sub_P Parameter: Plant Line Value: WS
  misc_feature: MA Experiment 20000314 PARAMETER Experiment Name: At_14day_Shoots-Roots_Sub_P Parameter: Tissue Value: Roots vs. Whole Plant
  misc_feature: MA Experiment ID: 20000315 Result: Up-regulated in Transcription
  misc_feature: MA Experiment 20000315 PARAMETER Experiment Name: At_14day_Shoots-Roots_Sub_P Parameter: Age (day) Value: 14
  misc_feature: MA Experiment 20000315 PARAMETER Experiment Name: At_14day_Shoots-Roots_Sub_P Parameter: Organism Value: A. thaliana
  misc_feature: MA Experiment 20000315 PARAMETER Experiment Name: At_14day_Shoots-Roots_Sub_P Parameter: Plant Line Value: WS
  misc_feature: MA Experiment 20000315 PARAMETER Experiment Name: At_14day_Shoots-Roots_Sub_P Parameter: Tissue Value: Shoots vs. Whole Plant
  misc_feature: MA Experiment ID: 20000355 Result: Up-regulated in Transcription
  misc_feature: MA Experiment 20000355 PARAMETER Experiment Name: At_Siliques_Sub_P Parameter: Age (day) Value: 21
  misc_feature: MA Experiment 20000355 PARAMETER Experiment Name: At_Siliques_Sub_P Parameter: Organism Value: A. thaliana
  misc_feature: MA Experiment 20000355 PARAMETER Experiment Name: At_Siliques_Sub_P Parameter: Plant Line Value: WS
  misc_feature: MA Experiment 20000355 PARAMETER Experiment Name: At_Siliques_Sub_P Parameter: Tissue Value: Less Than 5mm Siliques vs. Whole Plant
  misc_feature: MA Experiment ID: 20000440 Result: Up-regulated in Transcription
  misc_feature: MA Experiment 20000440 PARAMETER Experiment Name: At_Closed-Flower__Sub_P Parameter: Tissue Value: Closed Flower vs. Whole Plant
  misc_feature: MA Experiment ID: 20001248 Result: Down-regulated in Transcription
  misc_feature: MA Experiment 20001248 PARAMETER Experiment Name: At_Far-red-induction_P Parameter: Age (day) Value: 7
  misc_feature: MA Experiment 20001248 PARAMETER Experiment Name: At_Far-red-induction_P Parameter: Light Value: Far-red vs. White
  misc_feature: MA Experiment 20001248 PARAMETER Experiment Name: At_Far-red-induction_P Parameter: Organism Value: A. thaliana
  misc_feature: MA Experiment 20001248 PARAMETER Experiment Name: At_Far-red-induction_P Parameter: Plant Line Value: Columbia
  misc_feature: MA Experiment 20001248 PARAMETER Experiment Name: At_Far-red-induction_P Parameter: Timepoint (hr) Value: 4
  misc_feature: MA Experiment 20001248 PARAMETER Experiment Name: At_Far-red-induction_P Parameter: Tissue Value: Whole Plant
  misc_feature: MA Experiment ID: 20001451 Result: Up-regulated in Transcription
  misc_feature: MA Experiment 20001451 PARAMETER Experiment Name: At_Far-red-induction_P Parameter: Age (day) Value: 7
  misc_feature: MA Experiment 20001451 PARAMETER Experiment Name: At_Far-red-induction_P Parameter: Light Value: Far-red vs. White
  misc_feature: MA Experiment 20001451 PARAMETER Experiment Name: At_Far-red-induction_P Parameter: Organism Value: A. thaliana
  misc_feature: MA Experiment 20001451 PARAMETER Experiment Name: At_Far-red-induction_P Parameter: Plant Line Value: Columbia
  misc_feature: MA Experiment 20001451 PARAMETER Experiment Name: At_Far-red-induction_P Parameter: Timepoint (hr) Value: 24
  misc_feature: MA Experiment 20001451 PARAMETER Experiment Name: At_Far-red-induction_P Parameter: Tissue Value: Whole Plant
  misc_feature: MA Experiment ID: 20001557 Result: Up-regulated in Transcription
  misc_feature: MA Experiment 20001557 PARAMETER Experiment Name: At_Drought_Soil_Dry_P Parameter: Age (day) Value: 27
  misc_feature: MA Experiment 20001557 PARAMETER Experiment Name: At_Drought_Soil_Dry_P Parameter: Organism Value: A. thaliana
  misc_feature: MA Experiment 20001557 PARAMETER Experiment Name: At_Drought_Soil_Dry_P Parameter: Plant Line Value: WS
  misc_feature: MA Experiment 20001557 PARAMETER Experiment Name: At_Drought_Soil_Dry_P Parameter: Post Timepoint (hr) Value: 3
  misc_feature: MA Experiment 20001557 PARAMETER Experiment Name: At_Drought_Soil_Dry_P Parameter: Post-Treatment Value: Re-Water vs. No Drought
  misc_feature: MA Experiment 20001557 PARAMETER Experiment Name: At_Drought_Soil_Dry_P Parameter: Timepoint (day) Value: 13
  misc_feature: MA Experiment 20001557 PARAMETER Experiment Name: At_Drought_Soil_Dry_P Parameter: Treatment Value: Drought vs. No Drought
aatctctctttatctctctttctctgtttactaaatcgccagtattcgccgcaagaaagatgtctccggcgaagaagagccgaagttttcctccgataagcgagtgtaaaagcagagagtatgattcgatcgctgcggatctcgacgggactctgcttctgtcaagaagctctttcccttacttcatgctggtggccattgaagcaggtagtctcttccgtggattgatccttcttctttctcttcccatcgtcatcatcgcttatctcttcgtctccgaatctctcggaatccaaatccttatcttcatctccttcgccggtatcaagatcaagaacatcgaactcgtctctcgcgccgttcttacacggttttacgcggcggatgtgaggaaagatagttttgaggtgtttgataaatgtaagaagaggaaagtagtggtgactgcgaatccgatagtgatggttgagccattcgtcaaagactatttgggaggagataaagttttgggaacagagattgaagttaaccccaaaacgatgaaagctactggttttgtgaaaaagcctggtgttcttgttggtgatctcaagagattagccatcttgaaagagttcggcgatgactcaccggatcttggcctcggtgaccgcacctccgatcacgatttcaagtccatttgcaaggaaggttacatggtgcatgagaccaaatcagccacaacagtccctatagagagtctcaagaaccgcataatcttccatgatggccgtcttgtccaacgtccgaccccattaaacgccttaatcatttacctttggcttcctttcggcttcatgctctctgtcttccgcgtctacttcaacctccctttacccgaacgcttcgtccgctacacttacgagatcctcggcattcacctcacaatccgtggccaccgtcctccacctccttcccccggaaaacctggaaacctctacgttctcaaccaccgcaccgcccttgaccccattatcatcgccattgctctcggccgtaagatcacatgtgtcacttatagtgtctctcgcctctccctgatgctctcacccattcctgctgttgctctgacccgagaccgtgtcgctgacgcagcccgcatgaggcaactcctcgagaaaggtgatttggtgatctgtcctgaaggcacaacgtgtagagaaccatatctactaaggttcagtgctctatttgcagagctgagcgaccggatcgtgcctgtggccatgaactgcaagcaagggatgttcaacgggacgacagttagaggtgtgaaattctgggatccgtacttcttcttcatgaacccccgacctagctacgaggccactttcttggaccgtttgcccgaagaaatgacggtaaacggtggtggcaagactccttttgaggtggctaattacgttcagaaggtgatcggtggagttttggggttcgaatgtactgaacttacaaggaaggataagtatctgttgcttggaggcaacgacggaaaggttgagtctatcaataagaccaagtccatggagtaataatccagctagtctggttgctgctattttgcttgggagtgaagttaggtctttcgggttttcccaattacttttttttttgttttttttcatgtattgttcgaggaaaatgttttgttgaatatgcactggataatgaaactacatttgaatcaaagtacgtacatgtagtgtaccatttccccttgccttaactatgaatgatttgtaaactcaccttgtattataagatatcctgg

SEQ ID NO: 30677 - protein, 522 aa, Arabidopsis thaliana
  peptide (1)..(522): Ceres Seq. ID no. 12327224
  misc_feature (306)..(423): Pfam Name: Acyltransferase Pfam Description: Acyltransferase
  misc_feature (41)..(512): Homolog of NCBI NO: 18390661 NR Description: expressed protein
  misc_feature (42)..(516): Homolog of NCBI NO: 15239924 NR Description: putative protein; protein id: At5g06090.1
  misc_feature (42)..(516): Homolog of NCBI NO: 15229747 NR Description: unknown protein; protein id: At3g11430.1
  misc_feature (64)..(521): Homolog of NCBI NO: 29788867 NR Description: hypothetical protein [Oryza sativa (japonica
  misc_feature (29)..(514): Homolog of NCBI NO: 37534314 NR Description: hypothetical protein [Oryza sativa (japonica
  misc_feature (29)..(521): Homolog of NCBI NO: 38000002 NR Description: unknown protein [Oryza sativa (japonica
  misc_feature (232)..(519): Homolog of NCBI NO: 15236797 NR Description: putative protein; protein id: At4g00400.1
  misc_feature (20)..(520): Homolog of NCBI NO: 15224445 NR Description: unknown protein
  misc_feature (20)..(522): Homolog of NCBI NO: 15223437 NR Description: hypothetical protein
  misc_feature (20)..(522): Homolog of NCBI NO: 17064780 NR Description: Unknown protein [Arabidopsis thaliana]
SLFISLSLFTKSPVFAARKMSPAKKSRSFPPISECKSREYDSIAADLDGTLLLSRSSFPYFMLVAIEAGSLFRGLILLLSLPIVIIAYLFVSESLGIQILIFISFAGIKIKNIELVSRAVLTRFYAADVRKDSFEVFDKCKKRKVVVTANPIVMVEPFVKDYLGGDKVLGTEIEVNPKTMKATGFVKKPGVLVGDLKRLAILKEFGDDSPDLGLGDRTSDHDFKSICKEGYMVHETKSATTVPIESLKNRIIFHDGRLVQRPTPLNALIIYLWLPFGFMLSVFRVYFNLPLPERFVRYTYEILGIHLTIRGHRPPPPSPGKPGNLYVLNHRTALDPIIIAIALGRKITCVTYSVSRLSLMLSPIPAVALTRDRVADAARMRQLLEKGDLVICPEGTTCREPYLLRFSALFAELSDRIVPVAMNCKQGMFNGTTVRGVKFWDPYFFFMNPRPSYEATFLDRLPEEMTVNGGGKTPFEVANYVQKVIGGVLGFECTELTRKDKYLLLGGNDGKVESINKTKSME

SEQ ID NO: 30678 - protein, 503 aa, Arabidopsis thaliana
  peptide (1)..(503): Ceres Seq. ID no. 12327225
  misc_feature (287)..(404): Pfam Name: Acyltransferase Pfam Description: Acyltransferase
  misc_feature (22)..(493): Homolog of NCBI NO: 18390661 NR Description: expressed protein
  misc_feature (23)..(497): Homolog of NCBI NO: 15239924 NR Description: putative protein; protein id: At5g06090.1
  misc_feature (23)..(497): Homolog of NCBI NO: 15229747 NR Description: unknown protein; protein id: At3g11430.1
  misc_feature (45)..(502): Homolog of NCBI NO: 29788867 NR Description: hypothetical protein [Oryza sativa (japonica
  misc_feature (10)..(495): Homolog of NCBI NO: 37534314 NR Description: hypothetical protein [Oryza sativa (japonica
  misc_feature (10)..(502): Homolog of NCBI NO: 38000002 NR Description: unknown protein [Oryza sativa (japonica
  misc_feature (213)..(500): Homolog of NCBI NO: 15236797 NR Description: putative protein; protein id: At4g00400.1
  misc_feature (1)..(501): Homolog of NCBI NO: 15224445 NR Description: unknown protein
  misc_feature (1)..(503): Homolog of NCBI NO: 15223437 NR Description: hypothetical protein
  misc_feature (1)..(503): Homolog of NCBI NO: 17064780 NR Description: Unknown protein [Arabidopsis thaliana]
MSPAKKSRSFPPISECKSREYDSIAADLDGTLLLSRSSFPYFMLVAIEAGSLFRGLILLLSLPIVIIAYLFVSESLGIQILIFISFAGIKIKNIELVSRAVLTRFYAADVRKDSFEVFDKCKKRKVVVTANPIVMVEPFVKDYLGGDKVLGTEIEVNPKTMKATGFVKKPGVLVGDLKRLAILKEFGDDSPDLGLGDRTSDHDFKSICKEGYMVHETKSATTVPIESLKNRIIFHDGRLVQRPTPLNALIIYLWLPFGFMLSVFRVYFNLPLPERFVRYTYEILGIHLTIRGHRPPPPSPGKPGNLYVLNHRTALDPIIIAIALGRKITCVTYSVSRLSLMLSPIPAVALTRDRVADAARMRQLLEKGDLVICPEGTTCREPYLLRFSALFAELSDRIVPVAMNCKQGMFNGTTVRGVKFWDPYFFFMNPRPSYEATFLDRLPEEMTVNGGGKTPFEVANYVQKVIGGVLGFECTELTRKDKYLLLGGNDGKVESINKTKSME

SEQ ID NO: 30679 - protein, 461 aa, Arabidopsis thaliana
  peptide (1)..(461): Ceres Seq. ID no. 12327226
  misc_feature (245)..(362): Pfam Name: Acyltransferase Pfam Description: Acyltransferase
  misc_feature (1)..(451): Homolog of NCBI NO: 18390661 NR Description: expressed protein
  misc_feature (1)..(455): Homolog of NCBI NO: 15239924 NR Description: putative protein; protein id: At5g06090.1
  misc_feature (1)..(455): Homolog of NCBI NO: 15229747 NR Description: unknown protein; protein id: At3g11430.1
  misc_feature (3)..(460): Homolog of NCBI NO: 29788867 NR Description: hypothetical protein [Oryza sativa (japonica
  misc_feature (1)..(453): Homolog of NCBI NO: 37534314 NR Description: hypothetical protein [Oryza sativa (japonica
  misc_feature (1)..(460): Homolog of NCBI NO: 38000002 NR Description: unknown protein [Oryza sativa (japonica
  misc_feature (171)..(458): Homolog of NCBI NO: 15236797 NR Description: putative protein; protein id: At4g00400.1
  misc_feature (1)..(459): Homolog of NCBI NO: 15224445 NR Description: unknown protein
  misc_feature (1)..(461): Homolog of NCBI NO: 15223437 NR Description: hypothetical protein
  misc_feature (1)..(461): Homolog of NCBI NO: 17064780 NR Description: Unknown protein [Arabidopsis thaliana]
MLVAIEAGSLFRGLILLLSLPIVIIAYLFVSESLGIQILIFISFAGIKIKNIELVSRAVLTRFYAADVRKDSFEVFDKCKKRKVVVTANPIVMVEPFVKDYLGGDKVLGTEIEVNPKTMKATGFVKKPGVLVGDLKRLAILKEFGDDSPDLGLGDRTSDHDFKSICKEGYMVHETKSATTVPIESLKNRIIFHDGRLVQRPTPLNALIIYLWLPFGFMLSVFRVYFNLPLPERFVRYTYEILGIHLTIRGHRPPPPSPGKPGNLYVLNHRTALDPIIIAIALGRKITCVTYSVSRLSLMLSPIPAVALTRDRVADAARMRQLLEKGDLVICPEGTTCREPYLLRFSALFAELSDRIVPVAMNCKQGMFNGTTVRGVKFWDPYFFFMNPRPSYEATFLDRLPEEMTVNGGGKTPFEVANYVQKVIGGVLGFECTELTRKDKYLLLGGNDGKVESINKTKSME

SEQ ID NO: 30680 - DNA, 921 bp, Arabidopsis thaliana
  misc_feature (1)..(921): Ceres Seq. ID no. 12385734
  misc_feature: MA Experiment ID: 20000087 Result: Down-regulated in Transcription
  misc_feature: MA Experiment 20000087 PARAMETER Experiment Name: At_100uM_ABA_Mutants_cDNA_P Parameter: Plant Line Value: WS
  misc_feature: MA Experiment 20000087 PARAMETER Experiment Name: At_100uM_ABA_Mutants_cDNA_P Parameter: Timepoint (hr) Value: 6
  misc_feature: MA Experiment 20000087 PARAMETER Experiment Name: At_100uM_ABA_Mutants_cDNA_P Parameter: Tissue Value: Aerial
  misc_feature: MA Experiment 20000087 PARAMETER Experiment Name: At_100uM_ABA_Mutants_cDNA_P Parameter: Treatment Value: 100uM ABA vs. No Treatment
  misc_feature: MA Experiment ID: 20000113 Result: Down-regulated in Transcription
  misc_feature: MA Experiment 20000113 PARAMETER Experiment Name: At_42deg_Heat_cDNA_P Parameter: Temperature (deg C) Value: 42 vs. 22
  misc_feature: MA Experiment 20000113 PARAMETER Experiment Name: At_42deg_Heat_cDNA_P Parameter: Timepoint (hr) Value: 8
  misc_feature: MA Experiment 20000113 PARAMETER Experiment Name: At_42deg_Heat_cDNA_P Parameter: Tissue Value: Aerial
  misc_feature: MA Experiment ID: 20000173 Result: Down-regulated in Transcription
  misc_feature: MA Experiment 20000173 PARAMETER Experiment Name: At_42deg_Heat_P Parameter: Age (day) Value: 14
  misc_feature: MA Experiment 20000173 PARAMETER Experiment Name: At_42deg_Heat_P Parameter: Organism Value: A. thaliana
  misc_feature: MA Experiment 20000173 PARAMETER Experiment Name: At_42deg_Heat_P Parameter: Plant Line Value: WS
  misc_feature: MA Experiment 20000173 PARAMETER Experiment Name: At_42deg_Heat_P Parameter: Temperature (deg C) Value: 42 vs. 22
  misc_feature: MA Experiment 20000173 PARAMETER Experiment Name: At_42deg_Heat_P Parameter: Timepoint (hr) Value: 6
  misc_feature: MA Experiment 20000173 PARAMETER Experiment Name: At_42deg_Heat_P Parameter: Tissue Value: Aerial
  misc_feature: MA Experiment ID: 20000184 Result: Down-regulated in Transcription
  misc_feature: MA Experiment 20000184 PARAMETER Experiment Name: At_Shoots__P Parameter: Age (day) Value: 7
  misc_feature: MA Experiment 20000184 PARAMETER Experiment Name: At_Shoots__P Parameter: Tissue Value: Shoots vs. Whole Plant
  misc_feature: MA Experiment ID: 20000185 Result: Down-regulated in Transcription
  misc_feature: MA Experiment 20000185 PARAMETER Experiment Name: At_Roots__P Parameter: Age (day) Value: 7 vs. 21
  misc_feature: MA Experiment 20000185 PARAMETER Experiment Name: At_Roots__P Parameter: Organism Value: A. thaliana
  misc_feature: MA Experiment 20000185 PARAMETER Experiment Name: At_Roots__P Parameter: Tissue Value: Roots vs. Whole Plant
  misc_feature: MA Experiment ID: 20000234 Result: Down-regulated in Transcription
  misc_feature: MA Experiment 20000234 PARAMETER Experiment Name: At_Siliques_P Parameter: Age (day) Value: 21
  misc_feature: MA Experiment 20000234 PARAMETER Experiment Name: At_Siliques_P Parameter: Organism Value: A. thaliana
  misc_feature: MA Experiment 20000234 PARAMETER Experiment Name: At_Siliques_P Parameter: Plant Line Value: WS
  misc_feature: MA Experiment 20000234 PARAMETER Experiment Name: At_Siliques_P Parameter: Tissue Value: Less Than 5mm Siliques vs. Whole Plant
  misc_feature: MA Experiment ID: 20000235 Result: Down-regulated in Transcription
  misc_feature: MA Experiment 20000235 PARAMETER Experiment Name: At_Siliques_P Parameter: Age (day) Value: 21
  misc_feature: MA Experiment 20000235 PARAMETER Experiment Name: At_Siliques_P Parameter: Organism Value: A. thaliana
  misc_feature: MA Experiment 20000235 PARAMETER Experiment Name: At_Siliques_P Parameter: Plant Line Value: WS
  misc_feature: MA Experiment 20000235 PARAMETER Experiment Name: At_Siliques_P Parameter: Tissue Value: 5-10mm Siliques vs. Whole Plant
  misc_feature: MA Experiment ID: 20000438 Result: Down-regulated in Transcription
  misc_feature: MA Experiment 20000438 PARAMETER Experiment Name: At_Shoots__P Parameter: Age (day) Value: 14
  misc_feature: MA Experiment 20000438 PARAMETER Experiment Name: At_Shoots__P Parameter: Tissue Value: Shoots vs. Whole Plant
  misc_feature: MA Experiment ID: 20000794 Result: Up-regulated in Transcription
  misc_feature: MA Experiment 20000794 PARAMETER Experiment Name: At_Petals_P Parameter: Age (day) Value: 23-25 days
  misc_feature: MA Experiment 20000794 PARAMETER Experiment Name: At_Petals_P Parameter: Plant Line Value: WS
  misc_feature: MA Experiment 20000794 PARAMETER Experiment Name: At_Petals_P Parameter: Tissue Value: Petals vs. Whole plant
  misc_feature: MA Experiment ID: 20001904 Result: Up-regulated in Transcription
  misc_feature: MA Experiment 20001904 PARAMETER Experiment Name: At_Drought_Reproduction_P Parameter: Age (day) Value: 37
  misc_feature: MA Experiment 20001904 PARAMETER Experiment Name: At_Drought_Reproduction_P Parameter: Organism Value: A. thaliana
  misc_feature: MA Experiment 20001904 PARAMETER Experiment Name: At_Drought_Reproduction_P Parameter: Plant Line Value: WS
  misc_feature: MA Experiment 20001904 PARAMETER Experiment Name: At_Drought_Reproduction_P Parameter: Timepoint (day) Value: 7
  misc_feature: MA Experiment 20001904 PARAMETER Experiment Name: At_Drought_Reproduction_P Parameter: Tissue Value: Rosettes
  misc_feature: MA Experiment 20001904 PARAMETER Experiment Name: At_Drought_Reproduction_P Parameter: Treatment Value: Drought vs. No Drought
  misc_feature: MA Experiment ID: 20001905 Result: Up-regulated in Transcription
  misc_feature: MA Experiment 20001905 PARAMETER Experiment Name: At_Drought_Reproduction_P Parameter: Age (day) Value: 40
  misc_feature: MA Experiment 20001905 PARAMETER Experiment Name: At_Drought_Reproduction_P Parameter: Organism Value: A. thaliana
  misc_feature: MA Experiment 20001905 PARAMETER Experiment Name: At_Drought_Reproduction_P Parameter: Plant Line Value: WS
  misc_feature: MA Experiment 20001905 PARAMETER Experiment Name: At_Drought_Reproduction_P Parameter: Timepoint (day) Value: 10
  misc_feature: MA Experiment 20001905 PARAMETER Experiment Name: At_Drought_Reproduction_P Parameter: Tissue Value: Rosettes
  misc_feature: MA Experiment 20001905 PARAMETER Experiment Name: At_Drought_Reproduction_P Parameter: Treatment Value: Drought vs. No Drought
tttcaataatctctcatcttctttcgtctctctttctacggttcaaacattaaaaagatagatggagaagaggagctctattaaaaacagaggagtacttagattaccaccagggttccgatttcacccgaccgatgaagagctagtggttcaatatttacgtcgaaaagtaaccggtttacccttaccagcttctgtaataccggaaaccgatgtttgtaaatccgatccatgggatttaccaggtgattgtgaatcagagatgtatttttttagcacgagggaagctaaatacccgaacggaaaccggtcgaaccggtctaccggttcgggttattggaaagcgactggtctcgataagcagatcggtaagaagaagcttgtcgtggggatgaagaaaactcttgttttctacaaaggtaaaccaccaaacggaacaagaactaactgggttcttcatgaatatcgtcttgttgattcacaacaagattcattatatggacagaacatgaattgggttttgtgtagagtgttcttgaagaagagaagcaatagtaatagtaagaggaaagaagatgagaaagaagaggtggagaatgagaaagagacagagacagagagagaacgtgaggaggagaacaagaagagtacttgtcccatattttatgactttatgagaaaagacacgaagaaaaagagaaggagaagaagatgctgtgatttgaatttgactcctgctacttgttgttgttgctcttcttcgacttcttcgtcgtctgtttgctcaagtgctttaactcacacatcttctaatgataatcgtcaagaaatcagttatcgggaaaataagttttgtttgtttctatagattaacaaacttgggaacaacttctattaactttaataaattagattatgatt

SEQ ID NO: 30681 - protein, 268 aa, Arabidopsis thaliana
  peptide (1)..(268): Ceres Seq. ID no. 12385735
  misc_feature (15)..(138): Pfam Name: No apical meristem (NAM) protein Pfam Description: No apical meristem (NAM) protein
  misc_feature (15)..(227): Homolog of NCBI NO: 6223651 NR Description: NAM-like protein (no apical meristem)
  misc_feature (15)..(179): Homolog of NCBI NO: 15148914 NR Description: NAC domain protein NAC2 [Phaseolus vulgaris]
  misc_feature (15)..(192): Homolog of NCBI NO: 21554255 NR Description: NAC domain protein NAC2 [Arabidopsis thaliana]
  misc_feature (7)..(183): Homolog of NCBI NO: 21593134 NR Description: GRAB1-like protein [Arabidopsis thaliana]
  misc_feature (7)..(183): Homolog of NCBI NO: 15223963 NR Description: GRAB1-like protein
  misc_feature (15)..(192): Homolog of NCBI NO: 18409291 NR Description: expressed protein
  misc_feature (13)..(255): Homolog of NCBI NO: 15221787 NR Description: NAM protein, putative; protein id: At1g54330.1
  misc_feature (1)..(267): Homolog of NCBI NO: 7489024 NR Description: hypothetical protein SENU5, senescence
  misc_feature (1)..(250): Homolog of NCBI NO: 15240042 NR Description: NAM-like protein
  misc_feature (1)..(268): Homolog of NCBI NO: 15226119 NR Description: putative NAM (no apical meristem)-like protein
MEKRSSIKNRGVLRLPPGFRFHPTDEELVVQYLRRKVTGLPLPASVIPETDVCKSDPWDLPGDCESEMYFFSTREAKYPNGNRSNRSTGSGYWKATGLDKQIGKKKLVVGMKKTLVFYKGKPPNGTRTNWVLHEYRLVDSQQDSLYGQNMNWVLCRVFLKKRSNSNSKRKEDEKEEVENEKETETEREREEENKKSTCPIFYDFMRKDTKKKRRRRRCCDLNLTPATCCCCSSSTSSSSVCSSALTHTSSNDNRQEISYRENKFCLFL

SEQ ID NO: 30682 - protein, 201 aa, Arabidopsis thaliana
  peptide (1)..(201): Ceres Seq. ID no. 12385736
  misc_feature (1)..(71): Pfam Name: No apical meristem (NAM) protein Pfam Description: No apical meristem (NAM) protein
  misc_feature (1)..(160): Homolog of NCBI NO: 6223651 NR Description: NAM-like protein (no apical meristem)
  misc_feature (1)..(112): Homolog of NCBI NO: 15148914 NR Description: NAC domain protein NAC2 [Phaseolus vulgaris]
  misc_feature (1)..(125): Homolog of NCBI NO: 21554255 NR Description: NAC domain protein NAC2 [Arabidopsis thaliana]
  misc_feature (1)..(116): Homolog of NCBI NO: 21593134 NR Description: GRAB1-like protein [Arabidopsis thaliana]
  misc_feature (1)..(116): Homolog of NCBI NO: 15223963 NR Description: GRAB1-like protein
  misc_feature (1)..(125): Homolog of NCBI NO: 18409291 NR Description: expressed protein
  misc_feature (1)..(188): Homolog of NCBI NO: 15221787 NR Description: NAM protein, putative; protein id: At1g54330.1
  misc_feature (1)..(200): Homolog of NCBI NO: 7489024 NR Description: hypothetical protein SENU5, senescence
  misc_feature (1)..(183): Homolog of NCBI NO: 15240042 NR Description: NAM-like protein
  misc_feature (1)..(201): Homolog of NCBI NO: 15226119 NR Description: putative NAM (no apical meristem)-like protein
MYFFSTREAKYPNGNRSNRSTGSGYWKATGLDKQIGKKKLVVGMKKTLVFYKGKPPNGTRTNWVLHEYRLVDSQQDSLYGQNMNWVLCRVFLKKRSNSNSKRKEDEKEEVENEKETETEREREEENKKSTCPIFYDFMRKDTKKKRRRRRCCDLNLTPATCCCCSSSTSSSSVCSSALTHTSSNDNRQEISYRENKFCLFL

SEQ ID NO: 30683 - protein, 158 aa, Arabidopsis thaliana
  peptide (1)..(158): Ceres Seq. ID no. 12385737
  misc_feature (1)..(117): Homolog of NCBI NO: 6223651 NR Description: NAM-like protein (no apical meristem)
  misc_feature (1)..(69): Homolog of NCBI NO: 15148914 NR Description: NAC domain protein NAC2 [Phaseolus vulgaris]
  misc_feature (1)..(82): Homolog of NCBI NO: 21554255 NR Description: NAC domain protein NAC2 [Arabidopsis thaliana]
  misc_feature (1)..(73): Homolog of NCBI NO: 21593134 NR Description: GRAB1-like protein [Arabidopsis thaliana]
  misc_feature (1)..(73): Homolog of NCBI NO: 15223963 NR Description: GRAB1-like protein
  misc_feature (1)..(82): Homolog of NCBI NO: 18409291 NR Description: expressed protein
  misc_feature (1)..(145): Homolog of NCBI NO: 15221787 NR Description: NAM protein, putative; protein id: At1g54330.1
  misc_feature (1)..(157): Homolog of NCBI NO: 7489024 NR Description: hypothetical protein SENU5, senescence
  misc_feature (1)..(140): Homolog of NCBI NO: 15240042 NR Description: NAM-like protein
  misc_feature (1)..(158): Homolog of NCBI NO: 15226119 NR Description: putative NAM (no apical meristem)-like protein
MKKTLVFYKGKPPNGTRTNWVLHEYRLVDSQQDSLYGQNMNWVLCRVFLKKRSNSNSKRKEDEKEEVENEKETETEREREEENKKSTCPIFYDFMRKDTKKKRRRRRCCDLNLTPATCCCCSSSTSSSSVCSSALTHTSSNDNRQEISYRENKFCLFL

SEQ ID NO: 30684 - DNA, 1781 bp, Arabidopsis thaliana
  misc_feature (1)..(1781): Ceres Seq. ID no. 12372041
  misc_feature: MA Experiment ID: 108434 Result: Down-regulated in Transcription
  misc_feature: MA Experiment 108434 PARAMETER Experiment Name: At_Root_Tips_cDNA_P Parameter: Tissue Value: Root Tips
  misc_feature: MA Experiment ID: 108577 Result: Down-regulated in Transcription
  misc_feature: MA Experiment 108577 PARAMETER Experiment Name: At_42deg_Heat_cDNA_P Parameter: Temperature (deg C) Value: 42 vs. 22
  misc_feature: MA Experiment 108577 PARAMETER Experiment Name: At_42deg_Heat_cDNA_P Parameter: Timepoint (hr) Value: 6
  misc_feature: MA Experiment 108577 PARAMETER Experiment Name: At_42deg_Heat_cDNA_P Parameter: Tissue Value: Aerial
  misc_feature: MA Experiment ID: 108585 Result: Up-regulated in Transcription
  misc_feature: MA Experiment 108585 PARAMETER Experiment Name: At_5mM_NaNP_cDNA_P Parameter: Timepoint (hr) Value: 6
  misc_feature: MA Experiment 108585 PARAMETER Experiment Name: At_5mM_NaNP_cDNA_P Parameter: Tissue Value: Aerial
  misc_feature: MA Experiment 108585 PARAMETER Experiment Name: At_5mM_NaNP_cDNA_P Parameter: Treatment Value: null
  misc_feature: MA Experiment ID: 108667 Result: Up-regulated in Transcription
  misc_feature: MA Experiment 108667 PARAMETER Experiment Name: At_2mM_SA_cDNA_P Parameter: Plant Line Value: WS
  misc_feature: MA Experiment 108667 PARAMETER Experiment Name: At_2mM_SA_cDNA_P Parameter: Timepoint (hr) Value: 1
  misc_feature: MA Experiment 108667 PARAMETER Experiment Name: At_2mM_SA_cDNA_P Parameter: Treatment Value: 2mM SA vs. No Treatment
  misc_feature: MA Experiment ID: 20000111 Result: Down-regulated in Transcription
  misc_feature: MA Experiment 20000111 PARAMETER Experiment Name: At_42deg_Heat_cDNA_P Parameter: Temperature (deg C) Value: 42 vs. 22
  misc_feature: MA Experiment 20000111 PARAMETER Experiment Name: At_42deg_Heat_cDNA_P Parameter: Timepoint (hr) Value: 6
  misc_feature: MA Experiment 20000111 PARAMETER Experiment Name: At_42deg_Heat_cDNA_P Parameter: Tissue Value: Aerial
  misc_feature: MA Experiment ID: 20000113 Result: Down-regulated in Transcription
  misc_feature: MA Experiment 20000113 PARAMETER Experiment Name: At_42deg_Heat_cDNA_P Parameter: Temperature (deg C) Value: 42 vs. 22
  misc_feature: MA Experiment 20000113 PARAMETER Experiment Name: At_42deg_Heat_cDNA_P Parameter: Timepoint (hr) Value: 8
  misc_feature: MA Experiment 20000113 PARAMETER Experiment Name: At_42deg_Heat_cDNA_P Parameter: Tissue Value: Aerial
  misc_feature: MA Experiment ID: 20000184 Result: Down-regulated in Transcription
  misc_feature: MA Experiment 20000184 PARAMETER Experiment Name: At_Shoots__P Parameter: Age (day) Value: 7
  misc_feature: MA Experiment 20000184 PARAMETER Experiment Name: At_Shoots__P Parameter: Tissue Value: Shoots vs. Whole Plant
  misc_feature: MA Experiment ID: 20000185 Result: Down-regulated in Transcription
  misc_feature: MA Experiment 20000185 PARAMETER Experiment Name: At_Roots__P Parameter: Age (day) Value: 7 vs. 21
  misc_feature: MA Experiment 20000185 PARAMETER Experiment Name: At_Roots__P Parameter: Organism Value: A. thaliana
  misc_feature: MA Experiment 20000185 PARAMETER Experiment Name: At_Roots__P Parameter: Tissue Value: Roots vs. Whole Plant
  misc_feature: MA Experiment ID: 20000234 Result: Down-regulated in Transcription
  misc_feature: MA Experiment 20000234 PARAMETER Experiment Name: At_Siliques_P Parameter: Age (day) Value: 21
  misc_feature: MA Experiment 20000234 PARAMETER Experiment Name: At_Siliques_P Parameter: Organism Value: A. thaliana
  misc_feature: MA Experiment 20000234 PARAMETER Experiment Name: At_Siliques_P Parameter: Plant Line Value: WS
  misc_feature: MA Experiment 20000234 PARAMETER Experiment Name: At_Siliques_P Parameter: Tissue Value: Less Than 5mm Siliques vs. Whole Plant
  misc_feature: MA Experiment ID: 20000235 Result: Down-regulated in Transcription
  misc_feature: MA Experiment 20000235 PARAMETER Experiment Name: At_Siliques_P Parameter: Age (day) Value: 21
  misc_feature: MA Experiment 20000235 PARAMETER Experiment Name: At_Siliques_P Parameter: Organism Value: A. thaliana
  misc_feature: MA Experiment 20000235 PARAMETER Experiment Name: At_Siliques_P Parameter: Plant Line Value: WS
  misc_feature: MA Experiment 20000235 PARAMETER Experiment Name: At_Siliques_P Parameter: Tissue Value: 5-10mm Siliques vs. Whole Plant
  misc_feature: MA Experiment ID: 20000264 Result: Down-regulated in Transcription
  misc_feature: MA Experiment 20000264 PARAMETER Experiment Name: At_Open_Flower_P Parameter: Age (day) Value: 21
  misc_feature: MA Experiment 20000264 PARAMETER Experiment Name: At_Open_Flower_P Parameter: Plant Line Value: WS
  misc_feature: MA Experiment 20000264 PARAMETER Experiment Name: At_Open_Flower_P Parameter: Tissue Value: Open Flower vs. Whole Plant
  misc_feature: MA Experiment ID: 20000265 Result: Down-regulated in Transcription
  misc_feature: MA Experiment 20000265 PARAMETER Experiment Name: At_Open_Flower_P Parameter: Age (day) Value: 21
  misc_feature: MA Experiment 20000265 PARAMETER Experiment Name: At_Open_Flower_P Parameter: Plant Line Value: WS
  misc_feature: MA Experiment 20000265 PARAMETER Experiment Name: At_Open_Flower_P Parameter: Tissue Value: Closed Flower vs. Whole Plant
  misc_feature: MA Experiment ID: 20000437 Result: Down-regulated in Transcription
  misc_feature: MA Experiment 20000437 PARAMETER Experiment Name: At_Drought_P Parameter: Age (day) Value: 8
  misc_feature: MA Experiment 20000437 PARAMETER Experiment Name: At_Drought_P Parameter: Organism Value: A. thaliana
  misc_feature: MA Experiment 20000437 PARAMETER Experiment Name: At_Drought_P Parameter: Plant Line Value: WS
  misc_feature: MA Experiment 20000437 PARAMETER Experiment Name: At_Drought_P Parameter: Timepoint (hr) Value: 24
  misc_feature: MA Experiment 20000437 PARAMETER Experiment Name: At_Drought_P Parameter: Tissue Value: Whole Plant
  misc_feature: MA Experiment 20000437 PARAMETER Experiment Name: At_Drought_P Parameter: Treatment Value: Drought vs. No Drought
  misc_feature: MA Experiment ID: 20000438 Result: Down-regulated in Transcription
  misc_feature: MA Experiment 20000438 PARAMETER Experiment Name: At_Shoots__P Parameter: Age (day) Value: 14
  misc_feature: MA Experiment 20000438 PARAMETER Experiment Name: At_Shoots__P Parameter: Tissue Value: Shoots vs. Whole Plant
  misc_feature: MA Experiment ID: 20000439 Result: Down-regulated in Transcription
  misc_feature: MA Experiment 20000439 PARAMETER Experiment Name: At_Roots__P Parameter: Age (day) Value: 14 vs. 21
  misc_feature: MA Experiment 20000439 PARAMETER Experiment Name: At_Roots__P Parameter: Organism Value: A. thaliana
  misc_feature: MA Experiment 20000439 PARAMETER Experiment Name: At_Roots__P Parameter: Tissue Value: Roots vs. Whole Plant
  misc_feature: MA Experiment ID: 20000460 Result: Up-regulated in Transcription
  misc_feature: MA Experiment 20000460 PARAMETER Experiment Name: At_10percent_PEG_P Parameter: Age (day) Value: 12
  misc_feature: MA Experiment 20000460 PARAMETER Experiment Name: At_10percent_PEG_P Parameter: Organism Value: A. thaliana
  misc_feature: MA Experiment 20000460 PARAMETER Experiment Name: At_10percent_PEG_P Parameter: Plant Line Value: WS
  misc_feature: MA Experiment 20000460 PARAMETER Experiment Name: At_10percent_PEG_P Parameter: Timepoint (day) Value: 12
  misc_feature: MA Experiment 20000460 PARAMETER Experiment Name: At_10percent_PEG_P Parameter: Tissue Value: Whole Plant
  misc_feature: MA Experiment 20000460 PARAMETER Experiment Name: At_10percent_PEG_P Parameter: Treatment Value: 10percent PEG vs. No Treatment
  misc_feature: MA Experiment ID: 20000527 Result: Up-regulated in Transcription
  misc_feature: MA Experiment 20000527 PARAMETER Experiment Name: At_10percent_PEG_P Parameter: Age (day) Value: 20
  misc_feature: MA Experiment 20000527 PARAMETER Experiment Name: At_10percent_PEG_P Parameter: Organism Value: A. thaliana
  misc_feature: MA Experiment 20000527 PARAMETER Experiment Name: At_10percent_PEG_P Parameter: Plant Line Value: WS
  misc_feature: MA Experiment 20000527 PARAMETER Experiment Name: At_10percent_PEG_P Parameter: Timepoint (day) Value: 20
  misc_feature: MA Experiment 20000527 PARAMETER Experiment Name: At_10percent_PEG_P Parameter: Tissue Value: Whole Plant
  misc_feature: MA Experiment 20000527 PARAMETER Experiment Name: At_10percent_PEG_P Parameter: Treatment Value: 10percent PEG vs. No Treatment
  misc_feature: MA Experiment ID: 20000573 Result: Down-regulated in Transcription
  misc_feature: MA Experiment 20000573 PARAMETER Experiment Name: At_100uM_ABA_Mutants__P Parameter: Organism Value: A. thaliana
  misc_feature: MA Experiment 20000573 PARAMETER Experiment Name: At_100uM_ABA_Mutants__P Parameter: Plant Line Value: CS22 vs. Ler wt
  misc_feature: MA Experiment 20000573 PARAMETER Experiment Name: At_100uM_ABA_Mutants__P Parameter: Timepoint (hr) Value: N/A
  misc_feature: MA Experiment 20000573 PARAMETER Experiment Name: At_100uM_ABA_Mutants__P Parameter: Tissue Value: Whole Plant
  misc_feature: MA Experiment 20000573 PARAMETER Experiment Name: At_100uM_ABA_Mutants__P Parameter: Treatment Value: None
  misc_feature: MA Experiment ID: 20000574 Result: Down-regulated in Transcription
  misc_feature: MA Experiment 20000574 PARAMETER Experiment Name: At_100uM_ABA_Mutants__P Parameter: Organism Value: A. thaliana
  misc_feature: MA Experiment 20000574 PARAMETER Experiment Name: At_100uM_ABA_Mutants__P Parameter: Plant Line Value: CS23 vs. Ler wt
  misc_feature: MA Experiment 20000574 PARAMETER Experiment Name: At_100uM_ABA_Mutants__P Parameter: Timepoint (hr) Value: N/A
  misc_feature: MA Experiment 20000574 PARAMETER Experiment Name: At_100uM_ABA_Mutants__P Parameter: Tissue Value: Whole Plant
  misc_feature: MA Experiment 20000574 PARAMETER Experiment Name: At_100uM_ABA_Mutants__P Parameter: Treatment Value: None
  misc_feature: MA Experiment ID: 20000794 Result: Down-regulated in Transcription
  misc_feature: MA Experiment 20000794 PARAMETER Experiment Name: At_Petals_P Parameter: Age (day) Value: 23-25 days
  misc_feature: MA Experiment 20000794 PARAMETER Experiment Name: At_Petals_P Parameter: Plant Line Value: WS
  misc_feature: MA Experiment 20000794 PARAMETER Experiment Name: At_Petals_P Parameter: Tissue Value: Petals vs. Whole plant
  misc_feature: MA Experiment ID: 20001248 Result: Up-regulated in Transcription
  misc_feature: MA Experiment 20001248 PARAMETER Experiment Name: At_Far-red-induction_P Parameter: Age (day) Value: 7
  misc_feature: MA Experiment 20001248 PARAMETER Experiment Name: At_Far-red-induction_P Parameter: Light Value: Far-red vs. White
  misc_feature: MA Experiment 20001248 PARAMETER Experiment Name: At_Far-red-induction_P Parameter: Organism Value: A. thaliana
  misc_feature: MA Experiment 20001248 PARAMETER Experiment Name: At_Far-red-induction_P Parameter: Plant Line Value: Columbia
  misc_feature: MA Experiment 20001248 PARAMETER Experiment Name: At_Far-red-induction_P Parameter: Timepoint (hr) Value: 4
  misc_feature: MA Experiment 20001248 PARAMETER Experiment Name: At_Far-red-induction_P Parameter: Tissue Value: Whole Plant
  misc_feature: MA Experiment ID: 20001905 Result: Down-regulated in Transcription
  misc_feature: MA Experiment 20001905 PARAMETER Experiment Name: At_Drought_Reproduction_P Parameter: Age (day) Value: 40
  misc_feature: MA Experiment 20001905 PARAMETER Experiment Name: At_Drought_Reproduction_P Parameter: Organism Value: A. thaliana
  misc_feature: MA Experiment 20001905 PARAMETER Experiment Name: At_Drought_Reproduction_P Parameter: Plant Line Value: WS
  misc_feature: MA Experiment 20001905 PARAMETER Experiment Name: At_Drought_Reproduction_P Parameter: Timepoint (day) Value: 10
  misc_feature: MA Experiment 20001905 PARAMETER Experiment Name: At_Drought_Reproduction_P Parameter: Tissue Value: Rosettes
  misc_feature: MA Experiment 20001905 PARAMETER Experiment Name: At_Drought_Reproduction_P Parameter: Treatment Value: Drought vs. No Drought
cttctttcatctctttcttttattaatcccctttcttttctaactttctcgattcatcagagccatgggtgtctgtttctccgccattagagtcactggtgctagcagcagtagacgaagcagtcagaccaaatccaaggctgctcctactcccatcgataccaaggcctctaccaaacgccgaaccggctccatcccctgcggcaagcgtaccgattttggctactccaaagacttccacgatcactacaccatcggcaagttgctcggccatggtcaattcggctacacctacgtcgccatccacagacccaatggagatcgcgtcgccgtcaaaagactcgataagtctaagatggttcttcctattgctgttgaggatgtcaagcgtgaggttcagattcttattgctctctctggccacgagaatgttgttcagtttcacaatgcctttgaggatgacgattacgtctatattgttatggagttgtgcgaaggaggcgaattgctggataggatattatccaagaaaggtaatcggtactccgagaaagatgcagccgttgtcgttaggcagatgctcaaagttgcaggagaatgtcatctacacgatcttgtacatagagatatgaaaccagagaactttttgttcaaatcagctcaactagattcgcctctaaaggctacggattttggtttatcggattttatcaaaccagggaaaaggttccatgacattgttggtagcgcctattatgtggctcctgaggtattaaagcgcagatcagggcctgaatcagatgtatggagcattggtgtgattacgtatatattactttgtgggaggcggcctttttgggatagaactgaagatggtatatttaaagaggttttaagaaataaacctgacttcagccgtaaaccttgggcaactataagtgacagcgccaaagattttgtgaaaaagttacttgtaaaagacccacgagcacggctaactgctgcacaagcactatcacatgcgtgggttagagaaggcgggaatgctactgatatccctgtcgacatttcagttctgaacaacttaagacaatttgtgagatacagccgtctaaagcaatttgctttaagggcgcttgctagcacacttgacgaggcagagatctctgacctcagagatcaatttgatgcgattgatgtggataaaaatggcgtcattagtcttgaagagatgagacaggcacttgccaaagatcttccttggaaactgaaagactcacgagttgctgagatccttgaagcgattgatagcaacactgatgggttagtggacttcacagagtttgtagcagcagctctacatgttcatcaactagaagaacatgattcagagaaatggcagctaaggtcaagagcagcttttgagaaattcgacctagacaaagacgggtacataacgcctgaggaacttcgaatgcacacggggttaagaggatcaatagatccactgctggatgaagcagacatagacagagatgggaaaataagcctgcatgagttcaggagacttctaagaacagcgagcataagttcacagagagcaccaagccctgcaggtcacaggaatcttcgatagtatatactagaagaggagtaagtaaaggatacagaatgtaatttgttgggatgtgatatgtcttatcttcttatatgtaatgttggttgtaagataagtggggtattttggcgtttgtagtgataagtaagtaatactttggttg

SEQ ID NO: 30685 - protein, 523 aa, Arabidopsis thaliana
  peptide (1)..(523): Ceres Seq. ID no. 12372042
  misc_feature (62)..(322): Pfam Name: Protein kinase domain Pfam Description: Protein kinase domain
  misc_feature (52)..(510): Homolog of NCBI NO: 33146627 NR Description: putative CDPK-related protein kinase
  misc_feature (1)..(510): Homolog of NCBI NO: 6689920 NR Description: calcium-dependent protein kinase [Oryza sativa]
  misc_feature (40)..(521): Homolog of NCBI NO: 34902680 NR Description: similar to calcium-dependent protein kinase
  misc_feature (1)..(520): Homolog of NCBI NO: 15234291 NR Description: Calcium-dependent serine/threonine protein kinase
  misc_feature (32)..(510): Homolog of NCBI NO: 3779218 NR Description: protein kinase CPK1 [Solanum tuberosum]
  misc_feature (1)..(521): Homolog of NCBI NO: 12592069 NR Description: calcium-dependent protein kinase [Oryza sativa]
  misc_feature (17)..(519): Homolog of NCBI NO: 15227920 NR Description: putative Ca2+-dependent ser/thr protein kinase
  misc_feature (38)..(516): Homolog of NCBI NO: 16904224 NR Description: calcium/calmodulin-dependent protein kinase CaMK2
  misc_feature (1)..(523): Homolog of NCBI NO: 15239300 NR Description: calcium-dependent protein kinase
  misc_feature (1)..(523): Homolog of NCBI NO: 21553971 NR Description: calcium-dependent protein kinase [Arabidopsis
MGVCFSAIRVTGASSSRRSSQTKSKAAPTPIDTKASTKRRTGSIPCGKRTDFGYSKDFHDHYTIGKLLGHGQFGYTYVAIHRPNGDRVAVKRLDKSKMVLPIAVEDVKREVQILIALSGHENVVQFHNAFEDDDYVYIVMELCEGGELLDRILSKKGNRYSEKDAAVVVRQMLKVAGECHLHDLVHRDMKPENFLFKSAQLDSPLKATDFGLSDFIKPGKRFHDIVGSAYYVAPEVLKRRSGPESDVWSIGVITYILLCGRRPFWDRTEDGIFKEVLRNKPDFSRKPWATISDSAKDFVKKLLVKDPRARLTAAQALSHAWVREGGNATDIPVDISVLNNLRQFVRYSRLKQFALRALASTLDEAEISDLRDQFDAIDVDKNGVISLEEMRQALAKDLPWKLKDSRVAEILEAIDSNTDGLVDFTEFVAAALHVHQLEEHDSEKWQLRSRAAFEKFDLDKDGYITPEELRMHTGLRGSIDPLLDEADIDRDGKISLHEFRRLLRTASISSQRAPSPAGHRNLR

SEQ ID NO: 30686 - protein, 426 aa, Arabidopsis thaliana
  peptide (1)..(426): Ceres Seq. ID no. 12372043
  misc_feature (1)..(225): Pfam Name: Protein kinase domain Pfam Description: Protein kinase domain
  misc_feature (1)..(413): Homolog of NCBI NO: 33146627 NR Description: putative CDPK-related protein kinase
  misc_feature (1)..(413): Homolog of NCBI NO: 6689920 NR Description: calcium-dependent protein kinase [Oryza sativa]
  misc_feature (1)..(424): Homolog of NCBI NO: 34902680 NR Description: similar to calcium-dependent protein kinase
  misc_feature (1)..(423): Homolog of NCBI NO: 15234291 NR Description: Calcium-dependent serine/threonine protein kinase
  misc_feature (1)..(413): Homolog of NCBI NO: 3779218 NR Description: protein kinase CPK1 [Solanum tuberosum]
  misc_feature (1)..(424): Homolog of NCBI NO: 12592069 NR Description: calcium-dependent protein kinase [Oryza sativa]
  misc_feature (1)..(422): Homolog of NCBI NO: 15227920 NR Description: putative Ca2+-dependent ser/thr protein kinase
  misc_feature (1)..(419): Homolog of NCBI NO: 16904224 NR Description: calcium/calmodulin-dependent protein kinase CaMK2
  misc_feature (1)..(426): Homolog of NCBI NO: 15239300 NR Description: calcium-dependent protein kinase
  misc_feature (1)..(426): Homolog of NCBI NO: 21553971 NR Description: calcium-dependent protein kinase [Arabidopsis
MVLPIAVEDVKREVQILIALSGHENVVQFHNAFEDDDYVYIVMELCEGGELLDRILSKKGNRYSEKDAAVVVRQMLKVAGECHLHDLVHRDMKPENFLFKSAQLDSPLKATDFGLSDFIKPGKRFHDIVGSAYYVAPEVLKRRSGPESDVWSIGVITYILLCGRRPFWDRTEDGIFKEVLRNKPDFSRKPWATISDSAKDFVKKLLVKDPRARLTAAQALSHAWVREGGNATDIPVDISVLNNLRQFVRYSRLKQFALRALASTLDEAEISDLRDQFDAIDVDKNGVISLEEMRQALAKDLPWKLKDSRVAEILEAIDSNTDGLVDFTEFVAAALHVHQLEEHDSEKWQLRSRAAFEKFDLDKDGYITPEELRMHTGLRGSIDPLLDEADIDRDGKISLHEFRRLLRTASISSQRAPSPAGHRNLR

SEQ ID NO: 30687 - protein, 384 aa, Arabidopsis thaliana
  peptide (1)..(384): Ceres Seq. ID no. 12372044
  misc_feature (1)..(183): Pfam Name: Protein kinase domain Pfam Description: Protein kinase domain
  misc_feature (1)..(371): Homolog of NCBI NO: 33146627 NR Description: putative CDPK-related protein kinase
  misc_feature (1)..(371): Homolog of NCBI NO: 6689920 NR Description: calcium-dependent protein kinase [Oryza sativa]
  misc_feature (1)..(382): Homolog of NCBI NO: 34902680 NR Description: similar to calcium-dependent protein kinase
  misc_feature (1)..(381): Homolog of NCBI NO: 15234291 NR Description: Calcium-dependent serine/threonine protein kinase
  misc_feature (1)..(371): Homolog of NCBI NO: 3779218 NR Description: protein kinase CPK1 [Solanum tuberosum]
  misc_feature (1)..(382): Homolog of NCBI NO: 12592069 NR Description: calcium-dependent protein kinase [Oryza sativa]
  misc_feature (1)..(380): Homolog of NCBI NO: 15227920 NR Description: putative Ca2+-dependent ser/thr protein kinase
  misc_feature (1)..(377): Homolog of NCBI NO: 16904224 NR Description: calcium/calmodulin-dependent protein kinase CaMK2
  misc_feature (1)..(384): Homolog of NCBI NO: 15239300 NR Description: calcium-dependent protein kinase
  misc_feature (1)..(384): Homolog of NCBI NO: 21553971 NR Description: calcium-dependent protein kinase [Arabidopsis
MELCEGGELLDRILSKKGNRYSEKDAAVVVRQMLKVAGECHLHDLVHRDMKPENFLFKSAQLDSPLKATDFGLSDFIKPGKRFHDIVGSAYYVAPEVLKRRSGPESDVWSIGVITYILLCGRRPFWDRTEDGIFKEVLRNKPDFSRKPWATISDSAKDFVKKLLVKDPRARLTAAQALSHAWVREGGNATDIPVDISVLNNLRQFVRYSRLKQFALRALASTLDEAEISDLRDQFDAIDVDKNGVISLEEMRQALAKDLPWKLKDSRVAEILEAIDSNTDGLVDFTEFVAAALHVHQLEEHDSEKWQLRSRAAFEKFDLDKDGYITPEELRMHTGLRGSIDPLLDEADIDRDGKISLHEFRRLLRTASISSQRAPSPAGHRNLR

SEQ ID NO: 30688 - DNA, 711 bp, Arabidopsis thaliana
  misc_feature (1)..(711): Ceres Seq. ID no. 12321740
  misc_feature: MA Experiment ID: 108434 Result: Up-regulated in Transcription
  misc_feature: MA Experiment 108434 PARAMETER Experiment Name: At_Root_Tips_cDNA_P Parameter: Tissue Value: Root Tips
  misc_feature: MA Experiment ID: 108435 Result: Up-regulated in Transcription
  misc_feature: MA Experiment 108435 PARAMETER Experiment Name: At_stm_Mutants_cDNA_P Parameter: Plant Line Value: wt Landsburg vs stm
  misc_feature: MA Experiment 108435 PARAMETER Experiment Name: At_stm_Mutants_cDNA_P Parameter: Tissue Value: Shoot Apical Meristem Region
  misc_feature: MA Experiment ID: 108462 Result: Down-regulated in Transcription
  misc_feature: MA Experiment 108462 PARAMETER Experiment Name: At_Germinating_Seeds_cDNA_P Parameter: Age (day) Value: 2 vs. 0
  misc_feature: MA Experiment 108462 PARAMETER Experiment Name: At_Germinating_Seeds_cDNA_P Parameter: Tissue Value: Germinating Seeds
  misc_feature: MA Experiment ID: 108463 Result: Down-regulated in Transcription
  misc_feature: MA Experiment 108463 PARAMETER Experiment Name: At_Germinating_Seeds_cDNA_P Parameter: Age (day) Value: 3 vs. 0
  misc_feature: MA Experiment 108463 PARAMETER Experiment Name: At_Germinating_Seeds_cDNA_P Parameter: Tissue Value: Germinating Seeds
  misc_feature: MA Experiment ID: 108489 Result: Up-regulated in Transcription
  misc_feature: MA Experiment ID: 108561 Result: Down-regulated in Transcription
  misc_feature: MA Experiment 108561 PARAMETER Experiment Name: At_100uM_ABA_cDNA_P Parameter: Timepoint (hr) Value: 6
  misc_feature: MA Experiment 108561 PARAMETER Experiment Name: At_100uM_ABA_cDNA_P Parameter: Tissue Value: Aerial
  misc_feature: MA Experiment 108561 PARAMETER Experiment Name: At_100uM_ABA_cDNA_P Parameter: Treatment Value: 100uM ABA vs. No Treatment
  misc_feature: MA Experiment ID: 108573 Result: Down-regulated in Transcription
  misc_feature: MA Experiment 108573 PARAMETER Experiment Name: At_Drought_cDNA_P Parameter: Timepoint (hr) Value: 6
  misc_feature: MA Experiment 108573 PARAMETER Experiment Name: At_Drought_cDNA_P Parameter: Tissue Value: Aerial
  misc_feature: MA Experiment 108573 PARAMETER Experiment Name: At_Drought_cDNA_P Parameter: Treatment Value: Drought vs. No Drought
  misc_feature: MA Experiment ID: 108607 Result: Down-regulated in Transcription
  misc_feature: MA Experiment 108607 PARAMETER Experiment Name: At_100uM_ABA_cDNA_P Parameter: Timepoint (hr) Value: 4
  misc_feature: MA Experiment 108607 PARAMETER Experiment Name: At_100uM_ABA_cDNA_P Parameter: Tissue Value: Aerial
  misc_feature: MA Experiment 108607 PARAMETER Experiment Name: At_100uM_ABA_cDNA_P Parameter: Treatment Value: 100uM ABA vs. No Treatment
  misc_feature: MA Experiment ID: 108609 Result: Down-regulated in Transcription
  misc_feature: MA Experiment 108609 PARAMETER Experiment Name: At_100uM_ABA_cDNA_P Parameter: Timepoint (hr) Value: 24
  misc_feature: MA Experiment 108609 PARAMETER Experiment Name: At_100uM_ABA_cDNA_P Parameter: Tissue Value: Aerial
  misc_feature: MA Experiment 108609 PARAMETER Experiment Name: At_100uM_ABA_cDNA_P Parameter: Treatment Value: 100uM ABA vs. No Treatment
  misc_feature: MA Experiment ID: 20000180 Result: Down-regulated in Transcription
  misc_feature: MA Experiment 20000180 PARAMETER Experiment Name: At_Germinating_Seeds_P Parameter: Age (hr) Value: 24 vs. 0
  misc_feature: MA Experiment 20000180 PARAMETER Experiment Name: At_Germinating_Seeds_P Parameter: Tissue Value: Germinating Seeds
  misc_feature: MA Experiment ID: 20000227 Result: Up-regulated in Transcription
  misc_feature: MA Experiment 20000227 PARAMETER Experiment Name: At_Root-Tips-vs-Tops_P Parameter: Tissue Value: Root Tips vs. Root Tops
  misc_feature: MA Experiment ID: 20000264 Result: Up-regulated in Transcription
  misc_feature: MA Experiment 20000264 PARAMETER Experiment Name: At_Open_Flower_P Parameter: Age (day) Value: 21
  misc_feature: MA Experiment 20000264 PARAMETER Experiment Name: At_Open_Flower_P Parameter: Plant Line Value: WS
  misc_feature: MA Experiment 20000264 PARAMETER Experiment Name: At_Open_Flower_P Parameter: Tissue Value: Open Flower vs. Whole Plant
  misc_feature: MA Experiment ID: 20000453 Result: Down-regulated in Transcription
  misc_feature: MA Experiment 20000453 PARAMETER Experiment Name: At_100uM_ABA_P Parameter: Age (day) Value: 15
  misc_feature: MA Experiment 20000453 PARAMETER Experiment Name: At_100uM_ABA_P Parameter: Organism Value: A. thaliana
  misc_feature: MA Experiment 20000453 PARAMETER Experiment Name: At_100uM_ABA_P Parameter: Plant Line Value: WS
  misc_feature: MA Experiment 20000453 PARAMETER Experiment Name: At_100uM_ABA_P Parameter: Timepoint (hr) Value: 24
  misc_feature: MA Experiment 20000453 PARAMETER Experiment Name: At_100uM_ABA_P Parameter: Tissue Value: Aerial
  misc_feature: MA Experiment 20000453 PARAMETER Experiment Name: At_100uM_ABA_P Parameter: Treatment Value: 100uM ABA vs. No Treatment
  misc_feature: MA Experiment ID: 20000456 Result: Up-regulated in Transcription
  misc_feature: MA Experiment 20000456 PARAMETER Experiment Name: At_100uM_BA_P Parameter: Age (day) Value: 14
  misc_feature: MA Experiment 20000456 PARAMETER Experiment Name: At_100uM_BA_P Parameter: Organism Value: A. thaliana
  misc_feature: MA Experiment 20000456 PARAMETER Experiment Name: At_100uM_BA_P Parameter: Plant Line Value: WS
  misc_feature: MA Experiment 20000456 PARAMETER Experiment Name: At_100uM_BA_P Parameter: Timepoint (hr) Value: 6
  misc_feature: MA Experiment 20000456 PARAMETER Experiment Name: At_100uM_BA_P Parameter: Tissue Value: Aerial
  misc_feature: MA Experiment 20000456 PARAMETER Experiment Name: At_100uM_BA_P Parameter: Treatment Value: 100uM BA vs. No Treatment
  misc_feature: MA Experiment ID: 20000495 Result: Up-regulated in Transcription
  misc_feature: MA Experiment 20000495 PARAMETER Experiment Name: At_Guard_Cells_P Parameter: Harvest Date Value: 8/2/2002
  misc_feature: MA Experiment 20000495 PARAMETER Experiment Name: At_Guard_Cells_P Parameter: Organism Value: A. thaliana
  misc_feature: MA Experiment 20000495 PARAMETER Experiment Name: At_Guard_Cells_P Parameter: Tissue Value: Guard Cells vs. Leaves
  misc_feature: MA Experiment ID: 20000794 Result: Down-regulated in Transcription
  misc_feature: MA Experiment 20000794 PARAMETER Experiment Name: At_Petals_P Parameter: Age (day) Value: 23-25 days
  misc_feature: MA Experiment 20000794 PARAMETER Experiment Name: At_Petals_P Parameter: Plant Line Value: WS
  misc_feature: MA Experiment 20000794 PARAMETER Experiment Name: At_Petals_P Parameter: Tissue Value: Petals vs. Whole plant
  misc_feature: MA Experiment ID: 20001247 Result: Down-regulated in Transcription
  misc_feature: MA Experiment 20001247 PARAMETER Experiment Name: At_Far-red-induction_P Parameter: Age (day) Value: 7
  misc_feature: MA Experiment 20001247 PARAMETER Experiment Name: At_Far-red-induction_P Parameter: Light Value: Far-red vs. White
  misc_feature: MA Experiment 20001247 PARAMETER Experiment Name: At_Far-red-induction_P Parameter: Organism Value: A. thaliana
  misc_feature: MA Experiment 20001247 PARAMETER Experiment Name: At_Far-red-induction_P Parameter: Plant Line Value: Columbia
  misc_feature: MA Experiment 20001247 PARAMETER Experiment Name: At_Far-red-induction_P Parameter: Timepoint (hr) Value: 1
  misc_feature: MA Experiment 20001247 PARAMETER Experiment Name: At_Far-red-induction_P Parameter: Tissue Value: Whole Plant
  misc_feature: MA Experiment ID: 20001458 Result: Up-regulated in Transcription
  misc_feature: MA Experiment 20001458 PARAMETER Experiment Name: At_50mM_NH4NO3_L-to-H_P Parameter: Age (day) Value: Undefined
  misc_feature: MA Experiment 20001458 PARAMETER Experiment Name: At_50mM_NH4NO3_L-to-H_P Parameter: Organism Value: Undefined
  misc_feature: MA Experiment 20001458 PARAMETER Experiment Name: At_50mM_NH4NO3_L-to-H_P Parameter: Plant Line Value: Undefined
  misc_feature: MA Experiment 20001458 PARAMETER Experiment Name: At_50mM_NH4NO3_L-to-H_P Parameter: Timepoint (hr) Value: 2
  misc_feature: MA Experiment 20001458 PARAMETER Experiment Name: At_50mM_NH4NO3_L-to-H_P Parameter: Tissue Value: Siliques
  misc_feature: MA Experiment 20001458 PARAMETER Experiment Name: At_50mM_NH4NO3_L-to-H_P Parameter: Treatment Value: 50mM NH4NO3 vs. 100mM Manitol
  misc_feature: MA Experiment ID: 20001556 Result: Up-regulated in Transcription
  misc_feature: MA Experiment 20001556 PARAMETER Experiment Name: At_Drought_Soil_Dry_P Parameter: Age (day) Value: 26
  misc_feature: MA Experiment 20001556 PARAMETER Experiment Name: At_Drought_Soil_Dry_P Parameter: Organism Value: A. thaliana
  misc_feature: MA Experiment 20001556 PARAMETER Experiment Name: At_Drought_Soil_Dry_P Parameter: Plant Line Value: WS
  misc_feature: MA Experiment 20001556 PARAMETER Experiment Name: At_Drought_Soil_Dry_P Parameter: Post Timepoint (hr) Value: None
  misc_feature: MA Experiment 20001556 PARAMETER Experiment Name: At_Drought_Soil_Dry_P Parameter: Post-Treatment Value: None
  misc_feature: MA Experiment 20001556 PARAMETER Experiment Name: At_Drought_Soil_Dry_P Parameter: Timepoint (day) Value: 12
  misc_feature: MA Experiment 20001556 PARAMETER Experiment Name: At_Drought_Soil_Dry_P Parameter: Treatment Value: Drought vs. No Drought
  misc_feature: MA Experiment ID: 20001557 Result: Up-regulated in Transcription
  misc_feature: MA Experiment 20001557 PARAMETER Experiment Name: At_Drought_Soil_Dry_P Parameter: Age (day) Value: 27
  misc_feature: MA Experiment 20001557 PARAMETER Experiment Name: At_Drought_Soil_Dry_P Parameter: Organism Value: A. thaliana
  misc_feature: MA Experiment 20001557 PARAMETER Experiment Name: At_Drought_Soil_Dry_P Parameter: Plant Line Value: WS
  misc_feature: MA Experiment 20001557 PARAMETER Experiment Name: At_Drought_Soil_Dry_P Parameter: Post Timepoint (hr) Value: 3
  misc_feature: MA Experiment 20001557 PARAMETER Experiment Name: At_Drought_Soil_Dry_P Parameter: Post-Treatment Value: Re-Water vs. No Drought
  misc_feature: MA Experiment 20001557 PARAMETER Experiment Name: At_Drought_Soil_Dry_P Parameter: Timepoint (day) Value: 13
  misc_feature: MA Experiment 20001557 PARAMETER Experiment Name: At_Drought_Soil_Dry_P Parameter: Treatment Value: Drought vs. No Drought
  misc_feature: MA Experiment ID: 20001558 Result: Up-regulated in Transcription
  misc_feature: MA Experiment 20001558 PARAMETER Experiment Name: At_Drought_Soil_Dry_P Parameter: Age (day) Value: 27
  misc_feature: MA Experiment 20001558 PARAMETER Experiment Name: At_Drought_Soil_Dry_P Parameter: Organism Value: A. thaliana
  misc_feature: MA Experiment 20001558 PARAMETER Experiment Name: At_Drought_Soil_Dry_P Parameter: Plant Line Value: WS
  misc_feature: MA Experiment 20001558 PARAMETER Experiment Name: At_Drought_Soil_Dry_P Parameter: Post Timepoint (hr) Value: 6
  misc_feature: MA Experiment 20001558 PARAMETER Experiment Name: At_Drought_Soil_Dry_P Parameter: Post-Treatment Value: Re-Water vs. No Drought
  misc_feature: MA Experiment 20001558 PARAMETER Experiment Name: At_Drought_Soil_Dry_P Parameter: Timepoint (day) Value: 13
  misc_feature: MA Experiment 20001558 PARAMETER Experiment Name: At_Drought_Soil_Dry_P Parameter: Treatment Value: Drought vs. No Drought
  misc_feature: MA Experiment ID: 20001560 Result: Up-regulated in Transcription
  misc_feature: MA Experiment 20001560 PARAMETER Experiment Name: At_Drought_Soil_Dry_P Parameter: Age (day) Value: 28
  misc_feature: MA Experiment 20001560 PARAMETER Experiment Name: At_Drought_Soil_Dry_P Parameter: Organism Value: A. thaliana
  misc_feature: MA Experiment 20001560 PARAMETER Experiment Name: At_Drought_Soil_Dry_P Parameter: Plant Line Value: WS
  misc_feature: MA Experiment 20001560 PARAMETER Experiment Name: At_Drought_Soil_Dry_P Parameter: Post Timepoint (hr) Value: None
  misc_feature: MA Experiment 20001560 PARAMETER Experiment Name: At_Drought_Soil_Dry_P Parameter: Post-Treatment Value: None
  misc_feature: MA Experiment 20001560 PARAMETER Experiment Name: At_Drought_Soil_Dry_P Parameter: Timepoint (day) Value: 14
  misc_feature: MA Experiment 20001560 PARAMETER Experiment Name: At_Drought_Soil_Dry_P Parameter: Treatment Value: Drought vs. No Drought
  misc_feature: MA Experiment ID: 20001756 Result: Up-regulated in Transcription
  misc_feature: MA Experiment 20001756 PARAMETER Experiment Name: At_50mM_NH4NO3_L-to-H_P Parameter: Timepoint (hr) Value: 4
  misc_feature: MA Experiment 20001756 PARAMETER Experiment Name: At_50mM_NH4NO3_L-to-H_P Parameter: Tissue Value: Leaf
  misc_feature: MA Experiment 20001756 PARAMETER Experiment Name: At_50mM_NH4NO3_L-to-H_P Parameter: Treatment Value: 50mM NH4NO3 vs 100mM Mannitol
  misc_feature: MA Experiment ID: 20001757 Result: Up-regulated in Transcription
  misc_feature: MA Experiment 20001757 PARAMETER Experiment Name: At_50mM_NH4NO3_L-to-H_P Parameter: Timepoint (hr) Value: 6
  misc_feature: MA Experiment 20001757 PARAMETER Experiment Name: At_50mM_NH4NO3_L-to-H_P Parameter: Tissue Value: Leaf
  misc_feature: MA Experiment 20001757 PARAMETER Experiment Name: At_50mM_NH4NO3_L-to-H_P Parameter: Treatment Value: 50mM NH4NO3 vs 100mM Mannitol
acatcctctcactgcctcttttctcactcactgttacttcgctaaaaccctaatttcgccattcccttctctaagttttgtgtgtagacatttagaaatggctttctgcaacaaacttagcggtatcttgagacaaggggtttctcagagctcaaatggtccagttacatctatgcttggctctcttcgttacatgtcctctaagctttttgttggtggtctctcttggggaactgatgacagctccttaaagcaagctttcactagctttggtgaagtcacagaagcaacggtgattgcagacagagagacagggaggtcgaggggattcggatttgttagcttcagctgtgaggattctgctaacaatgccataaaagaaatggatggaaaggagctgaatggtaggcaaatccgtgtgaatcttgcaaccgaaagatcgagtgccccgagatcatcatttggtggtggtggcggttacggtggtggcggtggtggtggctactaaagcaaacaagccagaggatttgagagagagaggagcctcagaactttcagtagttagttagtttgtttgtttcctctttgtttaactgcaaataaccttaactggttttgttaaacttatttagccctgttttttggttgtgtctgaataccgtagtattgttgctccatcttctgcaaatctattagcatcgagttcgattc

SEQ ID NO: 30689 - protein, 168 aa, Arabidopsis thaliana
  peptide (1)..(168): Ceres Seq. ID no. 12321741
  misc_feature (69)..(140): Pfam Name: RNA recognition motif. (a.k.a. RRM, RBD, or RNP domain) Pfam Description: RNA recognition motif. (a.k.a. RRM, RBD, or RNP
  misc_feature (155)..(168): Homolog of NCBI NO: 15239505 NR Description: glycine-rich RNA-binding protein
  misc_feature (33)..(166): Homolog of NCBI NO: 15239505 NR Description: glycine-rich RNA-binding protein
  misc_feature (33)..(168): Homolog of NCBI NO: 7439995 NR Description: RNA binding protein 3 - wood tobacco
  misc_feature (52)..(166): Homolog of NCBI NO: 322514 NR Description: glycine-rich RNA-binding protein (clone A81) -
  misc_feature (33)..(168): Homolog of NCBI NO: 7439994 NR Description: glycine-rich RNA-binding protein - garden pea
  misc_feature (33)..(166): Homolog of NCBI NO: 15236359 NR Description: glycine-rich RNA-binding protein AtGRP2
  misc_feature (33)..(168): Homolog of NCBI NO: 30682622 NR Description: glycine-rich RNA-binding protein (AtGRP2)
  misc_feature (33)..(168): Homolog of NCBI NO: 2826811 NR Description: AtGRP2 [Arabidopsis thaliana]
  misc_feature (33)..(168): Homolog of NCBI NO: 21553972 NR Description: glycine-rich RNA binding protein, putative
  misc_feature (33)..(168): Homolog of NCBI NO: 15229525 NR Description: glycine-rich RNA-binding protein
HPLTASFLTHCYFAKTLISPFPSLSFVCRHLEMAFCNKLSGILRQGVSQSSNGPVTSMLGSLRYMSSKLFVGGLSWGTDDSSLKQAFTSFGEVTEATVIADRETGRSRGFGFVSFSCEDSANNAIKEMDGKELNGRQIRVNLATERSSAPRSSFGGGGGYGGGGGGGY

SEQ ID NO: 30690 - protein, 136 aa, Arabidopsis thaliana; identical to SEQ ID NO: 25481
  peptide (1)..(136): Ceres Seq. ID no. 12321742
  misc_feature (37)..(108): Pfam Name: RNA recognition motif. (a.k.a. RRM, RBD, or RNP domain) Pfam Description: RNA recognition motif. (a.k.a. RRM, RBD, or RNP
  misc_feature (123)..(136): Homolog of NCBI NO: 15239505 NR Description: glycine-rich RNA-binding protein
  misc_feature (1)..(134): Homolog of NCBI NO: 15239505 NR Description: glycine-rich RNA-binding protein
  misc_feature (1)..(136): Homolog of NCBI NO: 7439995 NR Description: RNA binding protein 3 - wood tobacco
  misc_feature (20)..(134): Homolog of NCBI NO: 322514 NR Description: glycine-rich RNA-binding protein (clone A81) -
  misc_feature (1)..(136): Homolog of NCBI NO: 7439994 NR Description: glycine-rich RNA-binding protein - garden pea
  misc_feature (1)..(134): Homolog of NCBI NO: 15236359 NR Description: glycine-rich RNA-binding protein AtGRP2
  misc_feature (1)..(136): Homolog of NCBI NO: 30682622 NR Description: glycine-rich RNA-binding protein (AtGRP2)
  misc_feature (1)..(136): Homolog of NCBI NO: 2826811 NR Description: AtGRP2 [Arabidopsis thaliana]
  misc_feature (1)..(136): Homolog of NCBI NO: 21553972 NR Description: glycine-rich RNA binding protein, putative
  misc_feature (1)..(136): Homolog of NCBI NO: 15229525 NR Description: glycine-rich RNA-binding protein

SEQ ID NO: 30691 - protein, 111 aa, Arabidopsis thaliana; identical to SEQ ID NO: 25482
  peptide (1)..(111): Ceres Seq. ID no. 12321743
  misc_feature (12)..(83): Pfam Name: RNA recognition motif. (a.k.a. RRM, RBD, or RNP domain) Pfam Description: RNA recognition motif. (a.k.a. RRM, RBD, or RNP
  misc_feature (98)..(111): Homolog of NCBI NO: 15239505 NR Description: glycine-rich RNA-binding protein
  misc_feature (1)..(109): Homolog of NCBI NO: 15239505 NR Description: glycine-rich RNA-binding protein
  misc_feature (1)..(111): Homolog of NCBI NO: 7439995 NR Description: RNA binding protein 3 - wood tobacco
  misc_feature (1)..(109): Homolog of NCBI NO: 322514 NR Description: glycine-rich RNA-binding protein (clone A81) -
  misc_feature (1)..(111): Homolog of NCBI NO: 7439994 NR Description: glycine-rich RNA-binding protein - garden pea
  misc_feature (1)..(109): Homolog of NCBI NO: 15236359 NR Description: glycine-rich RNA-binding protein AtGRP2
  misc_feature (1)..(111): Homolog of NCBI NO: 30682622 NR Description: glycine-rich RNA-binding protein (AtGRP2)
  misc_feature (1)..(111): Homolog of NCBI NO: 2826811 NR Description: AtGRP2 [Arabidopsis thaliana]
  misc_feature (1)..(111): Homolog of NCBI NO: 21553972 NR Description: glycine-rich RNA binding protein, putative
  misc_feature (1)..(111): Homolog of NCBI NO: 15229525 NR Description: glycine-rich RNA-binding protein

SEQ ID NO: 30692 - DNA, 1207 bp, Arabidopsis thaliana
  misc_feature (1)..(1207): Ceres Seq. ID no. 13486911
  misc_feature: MA Experiment ID: 108573 Result: Down-regulated in Transcription
  misc_feature: MA Experiment 108573 PARAMETER Experiment Name: At_Drought_cDNA_P Parameter: Timepoint (hr) Value: 6
  misc_feature: MA Experiment 108573 PARAMETER Experiment Name: At_Drought_cDNA_P Parameter: Tissue Value: Aerial
  misc_feature: MA Experiment 108573 PARAMETER Experiment Name: At_Drought_cDNA_P Parameter: Treatment Value: Drought vs. No Drought
  misc_feature: MA Experiment ID: 108585 Result: Down-regulated in Transcription
  misc_feature: MA Experiment 108585 PARAMETER Experiment Name: At_5mM_NaNP_cDNA_P Parameter: Timepoint (hr) Value: 6
  misc_feature: MA Experiment 108585 PARAMETER Experiment Name: At_5mM_NaNP_cDNA_P Parameter: Tissue Value: Aerial
  misc_feature: MA Experiment 108585 PARAMETER Experiment Name: At_5mM_NaNP_cDNA_P Parameter: Treatment Value: null
  misc_feature: MA Experiment ID: 108595 Result: Down-regulated in Transcription
  misc_feature: MA Experiment 108595 PARAMETER Experiment Name: At_Ler-pi_Ovule_cDNA_P Parameter: Plant Line Value: null
  misc_feature: MA Experiment ID: 20000173 Result: Down-regulated in Transcription
  misc_feature: MA Experiment 20000173 PARAMETER Experiment Name: At_42deg_Heat_P Parameter: Age (day) Value: 14
  misc_feature: MA Experiment 20000173 PARAMETER Experiment Name: At_42deg_Heat_P Parameter: Organism Value: A. thaliana
  misc_feature: MA Experiment 20000173 PARAMETER Experiment Name: At_42deg_Heat_P Parameter: Plant Line Value: WS
  misc_feature: MA Experiment 20000173 PARAMETER Experiment Name: At_42deg_Heat_P Parameter: Temperature (deg C) Value: 42 vs. 22
  misc_feature: MA Experiment 20000173 PARAMETER Experiment Name: At_42deg_Heat_P Parameter: Timepoint (hr) Value: 6
  misc_feature: MA Experiment 20000173 PARAMETER Experiment Name: At_42deg_Heat_P Parameter: Tissue Value: Aerial
  misc_feature: MA Experiment ID: 20000185 Result: Down-regulated in Transcription
  misc_feature: MA Experiment 20000185 PARAMETER Experiment Name: At_Roots__P Parameter: Age (day) Value: 7 vs. 21
  misc_feature: MA Experiment 20000185 PARAMETER Experiment Name: At_Roots__P Parameter: Organism Value: A. thaliana
  misc_feature: MA Experiment 20000185 PARAMETER Experiment Name: At_Roots__P Parameter: Tissue Value: Roots vs. Whole Plant
  misc_feature: MA Experiment ID: 20000436 Result: Down-regulated in Transcription
  misc_feature: MA Experiment 20000436 PARAMETER Experiment Name: At_Drought_P Parameter: Age (day) Value: 7
  misc_feature: MA Experiment 20000436 PARAMETER Experiment Name: At_Drought_P Parameter: Organism Value: A. thaliana
  misc_feature: MA Experiment 20000436 PARAMETER Experiment Name: At_Drought_P Parameter: Plant Line Value: WS
  misc_feature: MA Experiment 20000436 PARAMETER Experiment Name: At_Drought_P Parameter: Timepoint (hr) Value: 12
  misc_feature: MA Experiment 20000436 PARAMETER Experiment Name: At_Drought_P Parameter: Tissue Value: Whole Plant
  misc_feature: MA Experiment 20000436 PARAMETER Experiment Name: At_Drought_P Parameter: Treatment Value: Drought vs. No Drought
  misc_feature: MA Experiment ID: 20000437 Result: Down-regulated in Transcription
  misc_feature: MA Experiment 20000437 PARAMETER Experiment Name: At_Drought_P Parameter: Age (day) Value: 8
  misc_feature: MA Experiment 20000437 PARAMETER Experiment Name: At_Drought_P Parameter: Organism Value: A. thaliana
  misc_feature: MA Experiment 20000437 PARAMETER Experiment Name: At_Drought_P Parameter: Plant Line Value: WS
  misc_feature: MA Experiment 20000437 PARAMETER Experiment Name: At_Drought_P Parameter: Timepoint (hr) Value: 24
  misc_feature: MA Experiment 20000437 PARAMETER Experiment Name: At_Drought_P Parameter: Tissue Value: Whole Plant
  misc_feature: MA Experiment 20000437 PARAMETER Experiment Name: At_Drought_P Parameter: Treatment Value: Drought vs. No Drought
  misc_feature: MA Experiment ID: 20000439 Result: Down-regulated in Transcription
  misc_feature: MA Experiment 20000439 PARAMETER Experiment Name: At_Roots__P Parameter: Age (day) Value: 14 vs. 21
  misc_feature: MA Experiment 20000439 PARAMETER Experiment Name: At_Roots__P Parameter: Organism Value: A. thaliana
  misc_feature: MA Experiment 20000439 PARAMETER Experiment Name: At_Roots__P Parameter: Tissue Value: Roots vs. Whole Plant
  misc_feature: MA Experiment ID: 20000495 Result: Down-regulated in Transcription
  misc_feature: MA Experiment 20000495 PARAMETER Experiment Name: At_Guard_Cells_P Parameter: Harvest Date Value: 8/2/2002
  misc_feature: MA Experiment 20000495 PARAMETER Experiment Name: At_Guard_Cells_P Parameter: Organism Value: A. thaliana
  misc_feature: MA Experiment 20000495 PARAMETER Experiment Name: At_Guard_Cells_P Parameter: Tissue Value: Guard Cells vs. Leaves
  misc_feature: MA Experiment ID: 20000496 Result: Down-regulated in Transcription
  misc_feature: MA Experiment 20000496 PARAMETER Experiment Name: At_Guard_Cells_P Parameter: Harvest Date Value: 7/19/2002
  misc_feature: MA Experiment 20000496 PARAMETER Experiment Name: At_Guard_Cells_P Parameter: Organism Value: Canola
  misc_feature: MA Experiment 20000496 PARAMETER Experiment Name: At_Guard_Cells_P Parameter: Tissue Value: Guard Cells vs. Leaves
  misc_feature: MA Experiment ID: 20001450 Result: Down-regulated in Transcription
  misc_feature: MA Experiment 20001450 PARAMETER Experiment Name: At_Far-red-induction_P Parameter: Age (day) Value: 7
  misc_feature: MA Experiment 20001450 PARAMETER Experiment Name: At_Far-red-induction_P Parameter: Light Value: Far-red vs. White
  misc_feature: MA Experiment 20001450 PARAMETER Experiment Name: At_Far-red-induction_P Parameter: Organism Value: A. thaliana
  misc_feature: MA Experiment 20001450 PARAMETER Experiment Name: At_Far-red-induction_P Parameter: Plant Line Value: Columbia
  misc_feature: MA Experiment 20001450 PARAMETER Experiment Name: At_Far-red-induction_P Parameter: Timepoint (hr) Value: 8
  misc_feature: MA Experiment 20001450 PARAMETER Experiment Name: At_Far-red-induction_P Parameter: Tissue Value: Whole Plant
  misc_feature: MA Experiment ID: 20001451 Result: Down-regulated in Transcription
  misc_feature: MA Experiment 20001451 PARAMETER Experiment Name: At_Far-red-induction_P Parameter: Age (day) Value: 7
  misc_feature: MA Experiment 20001451 PARAMETER Experiment Name: At_Far-red-induction_P Parameter: Light Value: Far-red vs. White
  misc_feature: MA Experiment 20001451 PARAMETER Experiment Name: At_Far-red-induction_P Parameter: Organism Value: A. thaliana
  misc_feature: MA Experiment 20001451 PARAMETER Experiment Name: At_Far-red-induction_P Parameter: Plant Line Value: Columbia
  misc_feature: MA Experiment 20001451 PARAMETER Experiment Name: At_Far-red-induction_P Parameter: Timepoint (hr) Value: 24
  misc_feature: MA Experiment 20001451 PARAMETER Experiment Name: At_Far-red-induction_P Parameter: Tissue Value: Whole Plant
  misc_feature: MA Experiment ID: 20001905 Result: Down-regulated in Transcription
  misc_feature: MA Experiment 20001905 PARAMETER Experiment Name: At_Drought_Reproduction_P Parameter: Age (day) Value: 40
  misc_feature: MA Experiment 20001905 PARAMETER Experiment Name: At_Drought_Reproduction_P Parameter: Organism Value: A. thaliana
  misc_feature: MA Experiment 20001905 PARAMETER Experiment Name: At_Drought_Reproduction_P Parameter: Plant Line Value: WS
  misc_feature: MA Experiment 20001905 PARAMETER Experiment Name: At_Drought_Reproduction_P Parameter: Timepoint (day) Value: 10
  misc_feature: MA Experiment 20001905 PARAMETER Experiment Name: At_Drought_Reproduction_P Parameter: Tissue Value: Rosettes
  misc_feature: MA Experiment 20001905 PARAMETER Experiment Name: At_Drought_Reproduction_P Parameter: Treatment Value: Drought vs. No Drought
  misc_feature: MA Experiment ID: 20001911 Result: Down-regulated in Transcription
  misc_feature: MA Experiment 20001911 PARAMETER Experiment Name: At_Drought_Reproduction_P Parameter: Age (day) Value: 40
  misc_feature: MA Experiment 20001911 PARAMETER Experiment Name: At_Drought_Reproduction_P Parameter: Organism Value: A. thaliana
  misc_feature: MA Experiment 20001911 PARAMETER Experiment Name: At_Drought_Reproduction_P Parameter: Plant Line Value: WS
  misc_feature: MA Experiment 20001911 PARAMETER Experiment Name: At_Drought_Reproduction_P Parameter: Timepoint (day) Value: 10
  misc_feature: MA Experiment 20001911 PARAMETER Experiment Name: At_Drought_Reproduction_P Parameter: Tissue Value: Flowers
  misc_feature: MA Experiment 20001911 PARAMETER Experiment Name: At_Drought_Reproduction_P Parameter: Treatment Value: Drought vs. No Drought
gaagcggataacgaaaagctcgccgagaaagcacaaatggcgggcgtgaaatctctgcaacctagactcatatcttcctttctcggcaacaattctattagatcaacgcaaccacttattcatctctttcgcttcgatttaggaagaagacatgtttcgatgcaattatcaagaaccttttctggattaaccgatctcctgtttaatagaagaaatgaagatgaagttattgatggcaagagaaaacgtctgagaccgggaaatgtatctcctcgtcgtcctgttccgggtcatataacaaaacctccttatgttgattctcttcaagctcccggaatctcaagtggacttgaagttcatgataagaaaggtatagaatgcatgagagcttctggaatacttgcagctagggttcgagattacgctggcactttggttaagccaggcgtaaccactgatgaaatcgatgaagcagttcacaatatgattattgagaatggagcttatccttcgcctcttggttatggaggtttcccgaaaagtgtttgcacatctgtgaatgaatgcatttgccatggtataccagattcaagaccacttgaggatggggatattatcaacatcgatgtcacagtttatttgaatggttatcatggtgatacttcagcaactttcttctgtggaaatgttgacgagaaggctaaaaagctagtcgaggtgacgaaagagtctctcgacaaagcaatatcaatatgtggtcccggagttgagtacaagaaaatcggcaaagtcattcatgatcttgcagataaacataaatatggagttgttcgacaatttgtaggccacggggttggcagcgtcttccacgctgatccagttgttctgcatttccggaacaatgaagctggacgtatggtcttgaatcaaaccttcaccattgaaccgatgcttacaataggaagcagaaacccgataatgtgggatgataactggaccgtggtaacagaagatgcaagcctctcggcgcaattcgagcataccattcttataaccaaagatggtgctgagattctaaccaagtgttaaaaaaatgattctgaaaaattgatcttcttggaatgaaacccaaagccttaaggtatgtaagaatcatattcttattcaaatattgttttgctcacaagcagatgcgaacagttactaa

SEQ ID NO: 30693 - protein, 362 aa, Arabidopsis thaliana
  peptide (1)..(362): Ceres Seq. ID no. 13486912
  misc_feature (87)..(360): Homolog of NCBI NO: 11320958 NR Description: methionine aminopeptidase-like protein
  misc_feature (87)..(360): Homolog of NCBI NO: 15230872 NR Description: methionine aminopeptidase -related [Arabidopsis
  misc_feature (80)..(361): Homolog of NCBI NO: 34394646 NR Description: putative methionine aminopeptidase I (MAP1)
  misc_feature (87)..(360): Homolog of NCBI NO: 7939560 NR Description: methionine aminopeptidase-like protein
  misc_feature (51)..(362): Homolog of NCBI NO: 15222218 NR Description: methionine aminopeptidase I (MAP1) -related
  misc_feature (51)..(362): Homolog of NCBI NO: 11320956 NR Description: methionine aminopeptidase-like protein
  misc_feature (80)..(362): Homolog of NCBI NO: 38345794 NR Description: OSJNBa0085I10.11 [Oryza sativa (japonica
  misc_feature (13)..(28): Homolog of NCBI NO: 25289731 NR Description: methionyl aminopeptidase-like protein
  misc_feature (74)..(362): Homolog of NCBI NO: 25289731 NR Description: methionyl aminopeptidase-like protein
  misc_feature (13)..(362): Homolog of NCBI NO: 18419957 NR Description: methionyl aminopeptidase-related protein
EADNEKLAEKAQMAGVKSLQPRLISSFLGNNSIRSTQPLIHLFRFDLGRRHVSMQLSRTFSGLTDLLFNRRNEDEVIDGKRKRLRPGNVSPRRPVPGHITKPPYVDSLQAPGISSGLEVHDKKGIECMRASGILAARVRDYAGTLVKPGVTTDEIDEAVHNMIIENGAYPSPLGYGGFPKSVCTSVNECICHGIPDSRPLEDGDIINIDVTVYLNGYHGDTSATFFCGNVDEKAKKLVEVTKESLDKAISICGPGVEYKKIGKVIHDLADKHKYGVVRQFVGHGVGSVFHADPVVLHFRNNEAGRMVLNQTFTIEPMLTIGSRNPIMWDDNWTVVTEDASLSAQFEHTILITKDGAEILTKC

SEQ ID NO: 30694 - protein, 350 aa, Arabidopsis thaliana
  peptide (1)..(350): Ceres Seq. ID no. 13486913
  misc_feature (75)..(348): Homolog of NCBI NO: 11320958 NR Description: methionine aminopeptidase-like protein
  misc_feature (75)..(348): Homolog of NCBI NO: 15230872 NR Description: methionine aminopeptidase -related [Arabidopsis
  misc_feature (68)..(349): Homolog of NCBI NO: 34394646 NR Description: putative methionine aminopeptidase I (MAP1)
  misc_feature (75)..(348): Homolog of NCBI NO: 7939560 NR Description: methionine aminopeptidase-like protein
  misc_feature (39)..(350): Homolog of NCBI NO: 15222218 NR Description: methionine aminopeptidase I (MAP1) -related
  misc_feature (39)..(350): Homolog of NCBI NO: 11320956 NR Description: methionine aminopeptidase-like protein
  misc_feature (68)..(350): Homolog of NCBI NO: 38345794 NR Description: OSJNBa0085I10.11 [Oryza sativa (japonica
  misc_feature (1)..(16): Homolog of NCBI NO: 25289731 NR Description: methionyl aminopeptidase-like protein
  misc_feature (62)..(350): Homolog of NCBI NO: 25289731 NR Description: methionyl aminopeptidase-like protein
  misc_feature (1)..(350): Homolog of NCBI NO: 18419957 NR Description: methionyl aminopeptidase-related protein
MAGVKSLQPRLISSFLGNNSIRSTQPLIHLFRFDLGRRHVSMQLSRTFSGLTDLLFNRRNEDEVIDGKRKRLRPGNVSPRRPVPGHITKPPYVDSLQAPGISSGLEVHDKKGIECMRASGILAARVRDYAGTLVKPGVTTDEIDEAVHNMIIENGAYPSPLGYGGFPKSVCTSVNECICHGIPDSRPLEDGDIINIDVTVYLNGYHGDTSATFFCGNVDEKAKKLVEVTKESLDKAISICGPGVEYKKIGKVIHDLADKHKYGVVRQFVGHGVGSVFHADPVVLHFRNNEAGRMVLNQTFTIEPMLTIGSRNPIMWDDNWTVVTEDASLSAQFEHTILITKDGAEILTKC

SEQ ID NO: 30695 - protein, 309 aa, Arabidopsis thaliana
  peptide (1)..(309): Ceres Seq. ID no. 13486914
  misc_feature (26)..(308): Homolog of NCBI NO: 24583427 NR Description: CG5188-PA [Drosophila melanogaster]
  misc_feature (34)..(307): Homolog of NCBI NO: 11320958 NR Description: methionine aminopeptidase-like protein
  misc_feature (34)..(307): Homolog of NCBI NO: 15230872 NR Description: methionine aminopeptidase -related [Arabidopsis
  misc_feature (27)..(308): Homolog of NCBI NO: 34394646 NR Description: putative methionine aminopeptidase I (MAP1)
  misc_feature (34)..(307): Homolog of NCBI NO: 7939560 NR Description: methionine aminopeptidase-like protein
  misc_feature (1)..(309): Homolog of NCBI NO: 15222218 NR Description: methionine aminopeptidase I (MAP1) -related
  misc_feature (1)..(309): Homolog of NCBI NO: 11320956 NR Description: methionine aminopeptidase-like protein
  misc_feature (27)..(309): Homolog of NCBI NO: 38345794 NR Description: OSJNBa0085I10.11 [Oryza sativa (japonica
  misc_feature (21)..(309): Homolog of NCBI NO: 25289731 NR Description: methionyl aminopeptidase-like protein
  misc_feature (1)..(309): Homolog of NCBI NO: 18419957 NR Description: methionyl aminopeptidase-related protein
MQLSRTFSGLTDLLFNRRNEDEVIDGKRKRLRPGNVSPRRPVPGHITKPPYVDSLQAPGISSGLEVHDKKGIECMRASGILAARVRDYAGTLVKPGVTTDEIDEAVHNMIIENGAYPSPLGYGGFPKSVCTSVNECICHGIPDSRPLEDGDIINIDVTVYLNGYHGDTSATFFCGNVDEKAKKLVEVTKESLDKAISICGPGVEYKKIGKVIHDLADKHKYGVVRQFVGHGVGSVFHADPVVLHFRNNEAGRMVLNQTFTIEPMLTIGSRNPIMWDDNWTVVTEDASLSAQFEHTILITKDGAEILTKC

SEQ ID NO: 30696 - DNA, 2350 bp, Arabidopsis thaliana
  misc_feature (1)..(2350): Ceres Seq. ID no. 13488462
  misc_feature: MA Experiment ID: 108434 Result: Up-regulated in Transcription
  misc_feature: MA Experiment 108434 PARAMETER Experiment Name: At_Root_Tips_cDNA_P Parameter: Tissue Value: Root Tips
  misc_feature: MA Experiment ID: 108569 Result: Up-regulated in Transcription
  misc_feature: MA Experiment 108569 PARAMETER Experiment Name: At_0.001%_MeJA__cDNA_P Parameter: Timepoint (hr) Value: 6
  misc_feature: MA Experiment 108569 PARAMETER Experiment Name: At_0.001%_MeJA__cDNA_P Parameter: Tissue Value: Aerial
  misc_feature: MA Experiment 108569 PARAMETER Experiment Name: At_0.001%_MeJA__cDNA_P Parameter: Treatment Value: 0.001% MeJA vs. No Treatment
  misc_feature: MA Experiment ID: 108573 Result: Up-regulated in Transcription
  misc_feature: MA Experiment 108573 PARAMETER Experiment Name: At_Drought_cDNA_P Parameter: Timepoint (hr) Value: 6
  misc_feature: MA Experiment 108573 PARAMETER Experiment Name: At_Drought_cDNA_P Parameter: Tissue Value: Aerial
  misc_feature: MA Experiment 108573 PARAMETER Experiment Name: At_Drought_cDNA_P Parameter: Treatment Value: Drought vs. No Drought
  misc_feature: MA Experiment ID: 108577 Result: Down-regulated in Transcription
  misc_feature: MA Experiment 108577 PARAMETER Experiment Name: At_42deg_Heat_cDNA_P Parameter: Temperature (deg C) Value: 42 vs. 22
  misc_feature: MA Experiment 108577 PARAMETER Experiment Name: At_42deg_Heat_cDNA_P Parameter: Timepoint (hr) Value: 6
  misc_feature: MA Experiment 108577 PARAMETER Experiment Name: At_42deg_Heat_cDNA_P Parameter: Tissue Value: Aerial
  misc_feature: MA Experiment ID: 20000087 Result: Down-regulated in Transcription
  misc_feature: MA Experiment 20000087 PARAMETER Experiment Name: At_100uM_ABA_Mutants_cDNA_P Parameter: Plant Line Value: WS
  misc_feature: MA Experiment 20000087 PARAMETER Experiment Name: At_100uM_ABA_Mutants_cDNA_P Parameter: Timepoint (hr) Value: 6
  misc_feature: MA Experiment 20000087 PARAMETER Experiment Name: At_100uM_ABA_Mutants_cDNA_P Parameter: Tissue Value: Aerial
  misc_feature: MA Experiment 20000087 PARAMETER Experiment Name: At_100uM_ABA_Mutants_cDNA_P Parameter: Treatment Value: 100uM ABA vs. No Treatment
  misc_feature: MA Experiment ID: 20000111 Result: Down-regulated in Transcription
  misc_feature: MA Experiment 20000111 PARAMETER Experiment Name: At_42deg_Heat_cDNA_P Parameter: Temperature (deg C) Value: 42 vs. 22
  misc_feature: MA Experiment 20000111 PARAMETER Experiment Name: At_42deg_Heat_cDNA_P Parameter: Timepoint (hr) Value: 6
  misc_feature: MA Experiment 20000111 PARAMETER Experiment Name: At_42deg_Heat_cDNA_P Parameter: Tissue Value: Aerial
  misc_feature: MA Experiment ID: 20000113 Result: Down-regulated in Transcription
  misc_feature: MA Experiment 20000113 PARAMETER Experiment Name: At_42deg_Heat_cDNA_P Parameter: Temperature (deg C) Value: 42 vs. 22
  misc_feature: MA Experiment 20000113 PARAMETER Experiment Name: At_42deg_Heat_cDNA_P Parameter: Timepoint (hr) Value: 8
  misc_feature: MA Experiment 20000113 PARAMETER Experiment Name: At_42deg_Heat_cDNA_P Parameter: Tissue Value: Aerial
  misc_feature: MA Experiment ID: 20000173 Result: Down-regulated in Transcription
  misc_feature: MA Experiment 20000173 PARAMETER Experiment Name: At_42deg_Heat_P Parameter: Age (day) Value: 14
  misc_feature: MA Experiment 20000173 PARAMETER Experiment Name: At_42deg_Heat_P Parameter: Organism Value: A. thaliana
  misc_feature: MA Experiment 20000173 PARAMETER Experiment Name: At_42deg_Heat_P Parameter: Plant Line Value: WS
  misc_feature: MA Experiment 20000173 PARAMETER Experiment Name: At_42deg_Heat_P Parameter: Temperature (deg C) Value: 42 vs. 22
  misc_feature: MA Experiment 20000173 PARAMETER Experiment Name: At_42deg_Heat_P Parameter: Timepoint (hr) Value: 6
  misc_feature: MA Experiment 20000173 PARAMETER Experiment Name: At_42deg_Heat_P Parameter: Tissue Value: Aerial
  misc_feature: MA Experiment ID: 20000179 Result: Up-regulated in Transcription
  misc_feature: MA Experiment 20000179 PARAMETER Experiment Name: At_Germinating_Seeds_P Parameter: Age (hr) Value: 6 vs. 0
  misc_feature: MA Experiment 20000179 PARAMETER Experiment Name: At_Germinating_Seeds_P Parameter: Tissue Value: Germinating Seeds
  misc_feature: MA Experiment ID: 20000180 Result: Up-regulated in Transcription
  misc_feature: MA Experiment 20000180 PARAMETER Experiment Name: At_Germinating_Seeds_P Parameter: Age (hr) Value: 24 vs. 0
  misc_feature: MA Experiment 20000180 PARAMETER Experiment Name: At_Germinating_Seeds_P Parameter: Tissue Value: Germinating Seeds
  misc_feature: MA Experiment ID: 20001451 Result: Down-regulated in Transcription
  misc_feature: MA Experiment 20001451 PARAMETER Experiment Name: At_Far-red-induction_P Parameter: Age (day) Value: 7
  misc_feature: MA Experiment 20001451 PARAMETER Experiment Name: At_Far-red-induction_P Parameter: Light Value: Far-red vs. White
  misc_feature: MA Experiment 20001451 PARAMETER Experiment Name: At_Far-red-induction_P Parameter: Organism Value: A. thaliana
  misc_feature: MA Experiment 20001451 PARAMETER Experiment Name: At_Far-red-induction_P Parameter: Plant Line Value: Columbia
  misc_feature: MA Experiment 20001451 PARAMETER Experiment Name: At_Far-red-induction_P Parameter: Timepoint (hr) Value: 24
  misc_feature: MA Experiment 20001451 PARAMETER Experiment Name: At_Far-red-induction_P Parameter: Tissue Value: Whole Plant
  misc_feature: MA Experiment ID: 20001911 Result: Down-regulated in Transcription
  misc_feature: MA Experiment 20001911 PARAMETER Experiment Name: At_Drought_Reproduction_P Parameter: Age (day) Value: 40
  misc_feature: MA Experiment 20001911 PARAMETER Experiment Name: At_Drought_Reproduction_P Parameter: Organism Value: A. thaliana
  misc_feature: MA Experiment 20001911 PARAMETER Experiment Name: At_Drought_Reproduction_P Parameter: Plant Line Value: WS
  misc_feature: MA Experiment 20001911 PARAMETER Experiment Name: At_Drought_Reproduction_P Parameter: Timepoint (day) Value: 10
  misc_feature: MA Experiment 20001911 PARAMETER Experiment Name: At_Drought_Reproduction_P Parameter: Tissue Value: Flowers
  misc_feature: MA Experiment 20001911 PARAMETER Experiment Name: At_Drought_Reproduction_P Parameter: Treatment Value: Drought vs. No Drought
aaaagctatagatcgatcctaggcttacctcaaacctcagtctccgttgactactgagactcgtcgacctctgatccgcttcttcgactatacggatctacttccgatcttgatgatggccggaggtaacgtacggtttctggttttgatactcgccgtagcaatttgcggtgctgcttctgttttccagccgatctcagactctcaccgatctgcggctctggatgtcttcgtaccagtcgatggatcatacaaaagcttggaggaggcatatgaagcattaaagactttggagattcttggaattgataaaaagtctgatcttagctcaaagacttgtgagaatgtggttaaagttcttcagtcgtcttcttctactcttaaggatgcattttatgcgttaaacgttaatgggattctaaaatgtaaaattggtgaagctggtcctaaggacattgtttctcaacttcaagctggtgttaaagatgcgaagctattgcttgatttctattattctgtcagaggcttggtgctggctaaggagcaatttcctggaactcatataagtcttggagatgccgaagccattttccgttccatcaagtctcttagccagagtgatggaagatggcgctacagctccaacaatcccgaatcaagcacttttgctgctggcttagcctatgaaacgcttgctggagtgatttcattagcaccttcagagtttgatccatctttgatccagtcggtgaagacgggtatcctgaagctttctgacagtatccaaaaatatgatgatgggacattttattttgatgagaagtctgttgatgcaagtcaaggcccgatctcaacaactgcatcagttattagagggctcacgtcatttgcagcttcagaatccacaggattgaaccttccaggtgataagatagttggtctggccaaattctttctgggtgttggaattcctggtgatgccaaggacttcttcaaccaaatagatgcactagcttgtttggaagacaacaagttttctgttccactcatcttgtctcttccatccactgtcatttcattgacaaagaaagagcctctgaaggttaaagttagcactgtactgggttcgaaggcaccagctcttagtgtgaagcttacacaagctctaagttctaagtcagtggattcatctgtaattaataaccaggagcttaagtttgacgctgacagtgcaacgtacttcctggactcctttcccaagaactttgacattggaaaatatacttttgtatttaagattgtgctggatgaatcagcacatgagaaagtatacataactgaagctcaaacaaaagtgcctatagctgccacaggagctattagcattgaaaatgcagaaattgctgtacttgacagtgacattggaagcgttgaatctcagaaaaagctagatttaactaaagatggagcggtatcattatcagcaaaccaccttcaaaagctacgcctgtcattccagttaactactccacttggcaatgcgtttaagccacaccaggcatttttcaagctgaaacatgagtcacaggtcgagcatatctttctcgtgaaaacttctggaaagaagtctgaattagttctagattttcttggattggttgagaagctctactacctctctggtaaatatgagatacagctaaccattggagatgcttctatggagaactctttactgagtaatattggtcacattgaactagacctaccagagcgtccagagaaggcgactcgtcctcctctacagtctactgagccttactcaagatatgggccaaaagctgaaatatcacacatattcaggattcctgaaaagcttccagcaaagcagctctcactagttttcttgggtgttatcgttctcccattcatcggtttcctgattgggcttacgcggttgggagtgaacataaagagcttcccatcgtcgactggatctgcaatatccgctttacttttccactgcggaattggagctgttttgcttctatatgtgctattctggttgaagttggatctattcacgactctcaaggcactttctttgttgggagtgtttctgttgttcgtgggacacagaacactatctcaacttgcatcagcatcaaacaagttgaaatctgcttgaagaagaagaactcactatgaaggatctttttttggtttatgcgtattttcagttttgtagtattgcttatagattatggtgatagacaaattcaaaagaagttcagagtttacatactctctcagtttagtcttaaaaagtaatcaagagtctctttccttg

SEQ ID NO: 30697 - protein, 691 aa, Arabidopsis thaliana
  peptide (1)..(691): Ceres Seq. ID no. 13488463
  misc_feature (415)..(687): Homolog of NCBI NO: 39598219 NR Description: Hypothetical protein CBG14887 [Caenorhabditis
  misc_feature (294)..(682): Homolog of NCBI NO: 13928974 NR Description: ribophorin 2 [Rattus norvegicus]
  misc_feature (71)..(682): Homolog of NCBI NO: 36049 NR Description: unnamed protein product [Homo sapiens]
  misc_feature (71)..(682): Homolog of NCBI NO: 88567 NR Description: ribophorin II precursor - human
  misc_feature (71)..(682): Homolog of NCBI NO: 35493916 NR Description: ribophorin II precursor
  misc_feature (82)..(682): Homolog of NCBI NO: 28279254 NR Description: Similar to ribophorin II [Danio rerio]
  misc_feature (299)..(682): Homolog of NCBI NO: 28436786 NR Description: Similar to ribophorin II [Xenopus laevis]
  misc_feature (10)..(691): Homolog of NCBI NO: 34906860 NR Description: P0470A12.7 [Oryza sativa (japonica
  misc_feature (1)..(204): Homolog of NCBI NO: 7486600 NR Description: hypothetical protein F7J7.90 - Arabidopsis
  misc_feature (209)..(660): Homolog of NCBI NO: 7486600 NR Description: hypothetical protein F7J7.90 - Arabidopsis
MMAGGNVRFLVLILAVAICGAASVFQPISDSHRSAALDVFVPVDGSYKSLEEAYEALKTLEILGIDKKSDLSSKTCENVVKVLQSSSSTLKDAFYALNVNGILKCKIGEAGPKDIVSQLQAGVKDAKLLLDFYYSVRGLVLAKEQFPGTHISLGDAEAIFRSIKSLSQSDGRWRYSSNNPESSTFAAGLAYETLAGVISLAPSEFDPSLIQSVKTGILKLSDSIQKYDDGTFYFDEKSVDASQGPISTTASVIRGLTSFAASESTGLNLPGDKIVGLAKFFLGVGIPGDAKDFFNQIDALACLEDNKFSVPLILSLPSTVISLTKKEPLKVKVSTVLGSKAPALSVKLTQALSSKSVDSSVINNQELKFDADSATYFLDSFPKNFDIGKYTFVFKIVLDESAHEKVYITEAQTKVPIAATGAISIENAEIAVLDSDIGSVESQKKLDLTKDGAVSLSANHLQKLRLSFQLTTPLGNAFKPHQAFFKLKHESQVEHIFLVKTSGKKSELVLDFLGLVEKLYYLSGKYEIQLTIGDASMENSLLSNIGHIELDLPERPEKATRPPLQSTEPYSRYGPKAEISHIFRIPEKLPAKQLSLVFLGVIVLPFIGFLIGLTRLGVNIKSFPSSTGSAISALLFHCGIGAVLLLYVLFWLKLDLFTTLKALSLLGVFLLFVGHRTLSQLASASNKLKSA

SEQ ID NO: 30698 - protein, 690 aa, Arabidopsis thaliana
  peptide (1)..(690): Ceres Seq. ID no. 13488464
  misc_feature (414)..(686): Homolog of NCBI NO: 39598219 NR Description: Hypothetical protein CBG14887 [Caenorhabditis
  misc_feature (293)..(681): Homolog of NCBI NO: 13928974 NR Description: ribophorin 2 [Rattus norvegicus]
  misc_feature (70)..(681): Homolog of NCBI NO: 36049 NR Description: unnamed protein product [Homo sapiens]
  misc_feature (70)..(681): Homolog of NCBI NO: 88567 NR Description: ribophorin II precursor - human
  misc_feature (70)..(681): Homolog of NCBI NO: 35493916 NR Description: ribophorin II precursor
  misc_feature (81)..(681): Homolog of NCBI NO: 28279254 NR Description: Similar to ribophorin II [Danio rerio]
  misc_feature (298)..(681): Homolog of NCBI NO: 28436786 NR Description: Similar to ribophorin II [Xenopus laevis]
  misc_feature (9)..(690): Homolog of NCBI NO: 34906860 NR Description: P0470A12.7 [Oryza sativa (japonica
  misc_feature (1)..(203): Homolog of NCBI NO: 7486600 NR Description: hypothetical protein F7J7.90 - Arabidopsis
  misc_feature (208)..(659): Homolog of NCBI NO: 7486600 NR Description: hypothetical protein F7J7.90 - Arabidopsis
MAGGNVRFLVLILAVAICGAASVFQPISDSHRSAALDVFVPVDGSYKSLEEAYEALKTLEILGIDKKSDLSSKTCENVVKVLQSSSSTLKDAFYALNVNGILKCKIGEAGPKDIVSQLQAGVKDAKLLLDFYYSVRGLVLAKEQFPGTHISLGDAEAIFRSIKSLSQSDGRWRYSSNNPESSTFAAGLAYETLAGVISLAPSEFDPSLIQSVKTGILKLSDSIQKYDDGTFYFDEKSVDASQGPISTTASVIRGLTSFAASESTGLNLPGDKIVGLAKFFLGVGIPGDAKDFFNQIDALACLEDNKFSVPLILSLPSTVISLTKKEPLKVKVSTVLGSKAPALSVKLTQALSSKSVDSSVINNQELKFDADSATYFLDSFPKNFDIGKYTFVFKIVLDESAHEKVYITEAQTKVPIAATGAISIENAEIAVLDSDIGSVESQKKLDLTKDGAVSLSANHLQKLRLSFQLTTPLGNAFKPHQAFFKLKHESQVEHIFLVKTSGKKSELVLDFLGLVEKLYYLSGKYEIQLTIGDASMENSLLSNIGHIELDLPERPEKATRPPLQSTEPYSRYGPKAEISHIFRIPEKLPAKQLSLVFLGVIVLPFIGFLIGLTRLGVNIKSFPSSTGSAISALLFHCGIGAVLLLYVLFWLKLDLFTTLKALSLLGVFLLFVGHRTLSQLASASNKLKSA

SEQ ID NO: 30699 - DNA, 1597 bp, Arabidopsis thaliana
  misc_feature (1)..(1597): Ceres Seq. ID no. 13491734
  misc_feature: MA Experiment ID: 108434 Result: Up-regulated in Transcription
  misc_feature: MA Experiment 108434 PARAMETER Experiment Name: At_Root_Tips_cDNA_P Parameter: Tissue Value: Root Tips
  misc_feature: MA Experiment ID: 108573 Result: Up-regulated in Transcription
  misc_feature: MA Experiment 108573 PARAMETER Experiment Name: At_Drought_cDNA_P Parameter: Timepoint (hr) Value: 6
  misc_feature: MA Experiment 108573 PARAMETER Experiment Name: At_Drought_cDNA_P Parameter: Tissue Value: Aerial
  misc_feature: MA Experiment 108573 PARAMETER Experiment Name: At_Drought_cDNA_P Parameter: Treatment Value: Drought vs. No Drought
  misc_feature: MA Experiment ID: 108595 Result: Down-regulated in Transcription
  misc_feature: MA Experiment 108595 PARAMETER Experiment Name: At_Ler-pi_Ovule_cDNA_P Parameter: Plant Line Value: null
  misc_feature: MA Experiment ID: 20000087 Result: Down-regulated in Transcription
  misc_feature: MA Experiment 20000087 PARAMETER Experiment Name: At_100uM_ABA_Mutants_cDNA_P Parameter: Plant Line Value: WS
  misc_feature: MA Experiment 20000087 PARAMETER Experiment Name: At_100uM_ABA_Mutants_cDNA_P Parameter: Timepoint (hr) Value: 6
  misc_feature: MA Experiment 20000087 PARAMETER Experiment Name: At_100uM_ABA_Mutants_cDNA_P Parameter: Tissue Value: Aerial
  misc_feature: MA Experiment 20000087 PARAMETER Experiment Name: At_100uM_ABA_Mutants_cDNA_P Parameter: Treatment Value: 100uM ABA vs. No Treatment
  misc_feature: MA Experiment ID: 20000117 Result: Down-regulated in Transcription
  misc_feature: MA Experiment 20000117 PARAMETER Experiment Name: At_100uM_ABA_Mutants_cDNA_P Parameter: Plant Line Value: Columbia
  misc_feature: MA Experiment 20000117 PARAMETER Experiment Name: At_100uM_ABA_Mutants_cDNA_P Parameter: Timepoint (hr) Value: 6
  misc_feature: MA Experiment 20000117 PARAMETER Experiment Name: At_100uM_ABA_Mutants_cDNA_P Parameter: Tissue Value: Aerial
  misc_feature: MA Experiment 20000117 PARAMETER Experiment Name: At_100uM_ABA_Mutants_cDNA_P Parameter: Treatment Value: 100uM ABA vs. No Treatment
  misc_feature: MA Experiment ID: 20000495 Result: Up-regulated in Transcription
  misc_feature: MA Experiment 20000495 PARAMETER Experiment Name: At_Guard_Cells_P Parameter: Harvest Date Value: 8/2/2002
  misc_feature: MA Experiment 20000495 PARAMETER Experiment Name: At_Guard_Cells_P Parameter: Organism Value: A. thaliana
  misc_feature: MA Experiment 20000495 PARAMETER Experiment Name: At_Guard_Cells_P Parameter: Tissue Value: Guard Cells vs. Leaves
  misc_feature: MA Experiment ID: 20001248 Result: Up-regulated in Transcription
  misc_feature: MA Experiment 20001248 PARAMETER Experiment Name: At_Far-red-induction_P Parameter: Age (day) Value: 7
  misc_feature: MA Experiment 20001248 PARAMETER Experiment Name: At_Far-red-induction_P Parameter: Light Value: Far-red vs. White
  misc_feature: MA Experiment 20001248 PARAMETER Experiment Name: At_Far-red-induction_P Parameter: Organism Value: A. thaliana
  misc_feature: MA Experiment 20001248 PARAMETER Experiment Name: At_Far-red-induction_P Parameter: Plant Line Value: Columbia
  misc_feature: MA Experiment 20001248 PARAMETER Experiment Name: At_Far-red-induction_P Parameter: Timepoint (hr) Value: 4
  misc_feature: MA Experiment 20001248 PARAMETER Experiment Name: At_Far-red-induction_P Parameter: Tissue Value: Whole Plant
  misc_feature: MA Experiment ID: 20001451 Result: Up-regulated in Transcription
  misc_feature: MA Experiment 20001451 PARAMETER Experiment Name: At_Far-red-induction_P Parameter: Age (day) Value: 7
  misc_feature: MA Experiment 20001451 PARAMETER Experiment Name: At_Far-red-induction_P Parameter: Light Value: Far-red vs. White
  misc_feature: MA Experiment 20001451 PARAMETER Experiment Name: At_Far-red-induction_P Parameter: Organism Value: A. thaliana
  misc_feature: MA Experiment 20001451 PARAMETER Experiment Name: At_Far-red-induction_P Parameter: Plant Line Value: Columbia
  misc_feature: MA Experiment 20001451 PARAMETER Experiment Name: At_Far-red-induction_P Parameter: Timepoint (hr) Value: 24
  misc_feature: MA Experiment 20001451 PARAMETER Experiment Name: At_Far-red-induction_P Parameter: Tissue Value: Whole Plant
aagcaaagagagaggaaaaattagactttactcattgttcagtggttgagagagaaaagagtaaaaaagcacatggcctcattaccattggggcctcagcctcatgctcttgctccgccgctgcagcttcacgacggcgacgctttgaaacgccgtcctgaattggattctgataaggaaatgtctgcagctgttattgagggaaatgacgctgttactggtcatatcatttccactactataggaggcaaaaacggcgaaccaaagcagaccattagttacatggctgagcgggttgttggaacaggttcattcgggattgtttttcaggcgaaatgcttggaaactggagaatcagtagccattaaaaaggtcttgcaagatcgacgctataaaaaccgtgagttgcaactaatgcgaccaatggatcacccaaatgtcatctccttgaagcactgtttcttctctacaacgagtagagatgagctcttcctcaaccttgttatggagtatgtacctgagactttataccgggttttgaggcactatactagttctaatcagaggatgccaattttctatgtcaagctttacacatatcaaatctttagaggtttggcttacatccatactgttcccggtgtttgccacagagatgtgaaaccacaaaatctcttggttgatcccttgacccatcaggttaagctgtgtgattttggaagtgcaaaagtattggtcaaaggtgaaccaaacatatcatatatctgctcccgttattatcgtgctccagaactcatctttggcgccacagagtatacagcatccatagatatatggtctgctggttgtgtactggcagagcttcttcttggccagccgttatttccaggagaaaattcagttgatcagcttgtggagatcataaaggttcttggtactccaactcgtgaagaaattcgatgtatgaacccgaactacacagattttaggttcccacaaatcaaagctcacccttggcacaaggtttttcataaacggatgcctccagaagcaatagaccttgcatctcggcttcttcaatattcaccaagtctacgctgcactgcgctcgaagcatgtgctcatccgtttttcaatgaactccgagagccaaacgcccgtcttccaaatggtcgtccattaccgccattgttcaatttcaaacaagagttaggtggagcttcaatggagctaatcaacaggctaatacctgagcatgtgagacgacaaatgagcacaggattacaaaacagttaaaaactgtgcatgtctgaagagaaagaggagaaaagcaggtttactacttttatttgatagttgacaggttcaacagtatattaaccacgactattatcagcttctatacccgtagtaaagtcatattcagctttttgagaaatcagatgctgataattgcgtctattttttttttattccttagcctggagagtggagagagacactgttcctcgtgtatttttgtatatgtttttgtctgtaaaacaattctgacagatacgtagagacaaaagaaaaacgaggtgataatattaaaccg

SEQ ID NO: 30700 - protein, 407 aa, Arabidopsis thaliana
  peptide (1)..(407): Ceres Seq. ID no. 13491735
  misc_feature (70)..(354): Pfam Name: Protein kinase domain Pfam Description: Protein kinase domain
  misc_feature (16)..(398): Homolog of NCBI NO: 7434282 NR Description: shaggy protein kinase (EC 2.7.1.-) 6 - common
  misc_feature (30)..(401): Homolog of NCBI NO: 22326813 NR Description: serine/threonine protein kinase, Msk family
  misc_feature (1)..(398): Homolog of NCBI NO: 7434281 NR Description: probable shaggy-like protein kinase etha (EC
  misc_feature (34)..(406): Homolog of NCBI NO: 18700188 NR Description: AT4g18710/F28A21_120 [Arabidopsis thaliana]
  misc_feature (34)..(406): Homolog of NCBI NO: 15233984 NR Description: shaggy-related protein kinase etha (EC 2.7.1.-)
  misc_feature (34)..(406): Homolog of NCBI NO: 12643751 NR Description: Shaggy-related protein kinase eta (ASK-eta)
  misc_feature (1)..(403): Homolog of NCBI NO: 21593135 NR Description: putative shaggy-like protein kinase dzeta
  misc_feature (1)..(403): Homolog of NCBI NO: 15224593 NR Description: shaggy-related protein kinase dzeta [Arabidopsis
  misc_feature (1)..(403): Homolog of NCBI NO: 12643750 NR Description: Shaggy-related protein kinase delta (ASK-delta)
  misc_feature (1)..(407): Homolog of NCBI NO: 15221476 NR Description: shaggy-related kinase [Arabidopsis thaliana]
MASLPLGPQPHALAPPLQLHDGDALKRRPELDSDKEMSAAVIEGNDAVTGHIISTTIGGKNGEPKQTISYMAERVVGTGSFGIVFQAKCLETGESVAIKKVLQDRRYKNRELQLMRPMDHPNVISLKHCFFSTTSRDELFLNLVMEYVPETLYRVLRHYTSSNQRMPIFYVKLYTYQIFRGLAYIHTVPGVCHRDVKPQNLLVDPLTHQVKLCDFGSAKVLVKGEPNISYICSRYYRAPELIFGATEYTASIDIWSAGCVLAELLLGQPLFPGENSVDQLVEIIKVLGTPTREEIRCMNPNYTDFRFPQIKAHPWHKVFHKRMPPEAIDLASRLLQYSPSLRCTALEACAHPFFNELREPNARLPNGRPLPPLFNFKQELGGASMELINRLIPEHVRRQMSTGLQNS

SEQ ID NO: 30701 - protein, 371 aa, Arabidopsis thaliana
  peptide (1)..(371): Ceres Seq. ID no. 13491736
  misc_feature (34)..(318): Pfam Name: Protein kinase domain Pfam Description: Protein kinase domain
  misc_feature (1)..(362): Homolog of NCBI NO: 7434282 NR Description: shaggy protein kinase (EC 2.7.1.-) 6 - common
  misc_feature (1)..(365): Homolog of NCBI NO: 22326813 NR Description: serine/threonine protein kinase, Msk family
  misc_feature (1)..(362): Homolog of NCBI NO: 7434281 NR Description: probable shaggy-like protein kinase etha (EC
  misc_feature (1)..(370): Homolog of NCBI NO: 18700188 NR Description: AT4g18710/F28A21_120 [Arabidopsis thaliana]
  misc_feature (1)..(370): Homolog of NCBI NO: 15233984 NR Description: shaggy-related protein kinase etha (EC 2.7.1.-)
  misc_feature (1)..(370): Homolog of NCBI NO: 12643751 NR Description: Shaggy-related protein kinase eta (ASK-eta)
  misc_feature (1)..(367): Homolog of NCBI NO: 21593135 NR Description: putative shaggy-like protein kinase dzeta
  misc_feature (1)..(367): Homolog of NCBI NO: 15224593 NR Description: shaggy-related protein kinase dzeta [Arabidopsis
  misc_feature (1)..(367): Homolog of NCBI NO: 12643750 NR Description: Shaggy-related protein kinase delta (ASK-delta)
  misc_feature (1)..(371): Homolog of NCBI NO: 15221476 NR Description: shaggy-related kinase [Arabidopsis thaliana]
MSAAVIEGNDAVTGHIISTTIGGKNGEPKQTISYMAERVVGTGSFGIVFQAKCLETGESVAIKKVLQDRRYKNRELQLMRPMDHPNVISLKHCFFSTTSRDELFLNLVMEYVPETLYRVLRHYTSSNQRMPIFYVKLYTYQIFRGLAYIHTVPGVCHRDVKPQNLLVDPLTHQVKLCDFGSAKVLVKGEPNISYICSRYYRAPELIFGATEYTASIDIWSAGCVLAELLLGQPLFPGENSVDQLVEIIKVLGTPTREEIRCMNPNYTDFRFPQIKAHPWHKVFHKRMPPEAIDLASRLLQYSPSLRCTALEACAHPFFNELREPNARLPNGRPLPPLFNFKQELGGASMELINRLIPEHVRRQMSTGLQNS

SEQ ID NO: 30702 - protein, 337 aa, Arabidopsis thaliana
  peptide (1)..(337): Ceres Seq. ID no. 13491737
  misc_feature (1)..(284): Pfam Name: Protein kinase domain Pfam Description: Protein kinase domain
  misc_feature (1)..(328): Homolog of NCBI NO: 7434282 NR Description: shaggy protein kinase (EC 2.7.1.-) 6 - common
  misc_feature (1)..(331): Homolog of NCBI NO: 22326813 NR Description: serine/threonine protein kinase, Msk family
  misc_feature (1)..(328): Homolog of NCBI NO: 7434281 NR Description: probable shaggy-like protein kinase etha (EC
  misc_feature (1)..(336): Homolog of NCBI NO: 18700188 NR Description: AT4g18710/F28A21_120 [Arabidopsis thaliana]
  misc_feature (1)..(336): Homolog of NCBI NO: 15233984 NR Description: shaggy-related protein kinase etha (EC 2.7.1.-)
  misc_feature (1)..(336): Homolog of NCBI NO: 12643751 NR Description: Shaggy-related protein kinase eta (ASK-eta)
  misc_feature (1)..(333): Homolog of NCBI NO: 21593135 NR Description: putative shaggy-like protein kinase dzeta
  misc_feature (1)..(333): Homolog of NCBI NO: 15224593 NR Description: shaggy-related protein kinase dzeta [Arabidopsis
  misc_feature (1)..(333): Homolog of NCBI NO: 12643750 NR Description: Shaggy-related protein kinase delta (ASK-delta)
  misc_feature (1)..(337): Homolog of NCBI NO: 15221476 NR Description: shaggy-related kinase [Arabidopsis thaliana]
MAERVVGTGSFGIVFQAKCLETGESVAIKKVLQDRRYKNRELQLMRPMDHPNVISLKHCFFSTTSRDELFLNLVMEYVPETLYRVLRHYTSSNQRMPIFYVKLYTYQIFRGLAYIHTVPGVCHRDVKPQNLLVDPLTHQVKLCDFGSAKVLVKGEPNISYICSRYYRAPELIFGATEYTASIDIWSAGCVLAELLLGQPLFPGENSVDQLVEIIKVLGTPTREEIRCMNPNYTDFRFPQIKAHPWHKVFHKRMPPEAIDLASRLLQYSPSLRCTALEACAHPFFNELREPNARLPNGRPLPPLFNFKQELGGASMELINRLIPEHVRRQMSTGLQNS

SEQ ID NO: 30703 - DNA, 1878 bp, Arabidopsis thaliana
  misc_feature (1)..(1878): Ceres Seq. ID no. 12639121
  misc_feature: MA Experiment ID: 108434 Result: Down-regulated in Transcription
  misc_feature: MA Experiment 108434 PARAMETER Experiment Name: At_Root_Tips_cDNA_P Parameter: Tissue Value: Root Tips
  misc_feature: MA Experiment ID: 108463 Result: Up-regulated in Transcription
  misc_feature: MA Experiment 108463 PARAMETER Experiment Name: At_Germinating_Seeds_cDNA_P Parameter: Age (day) Value: 3 vs. 0
  misc_feature: MA Experiment 108463 PARAMETER Experiment Name: At_Germinating_Seeds_cDNA_P Parameter: Tissue Value: Germinating Seeds
  misc_feature: MA Experiment ID: 108464 Result: Up-regulated in Transcription
  misc_feature: MA Experiment 108464 PARAMETER Experiment Name: At_Germinating_Seeds_cDNA_P Parameter: Age (day) Value: 4 vs. 0
  misc_feature: MA Experiment 108464 PARAMETER Experiment Name: At_Germinating_Seeds_cDNA_P Parameter: Tissue Value: Germinating Seeds
  misc_feature: MA Experiment ID: 108473 Result: Up-regulated in Transcription
  misc_feature: MA Experiment 108473 PARAMETER Experiment Name: At_Drought_Flowers_cDNA_P Parameter: Timepoint (hr) Value: 7 d
  misc_feature: MA Experiment 108473 PARAMETER Experiment Name: At_Drought_Flowers_cDNA_P Parameter: Tissue Value: Flower
  misc_feature: MA Experiment 108473 PARAMETER Experiment Name: At_Drought_Flowers_cDNA_P Parameter: Treatment Value: Drought vs. No Drought
  misc_feature: MA Experiment ID: 108561 Result: Up-regulated in Transcription
  misc_feature: MA Experiment 108561 PARAMETER Experiment Name: At_100uM_ABA_cDNA_P Parameter: Timepoint (hr) Value: 6
  misc_feature: MA Experiment 108561 PARAMETER Experiment Name: At_100uM_ABA_cDNA_P Parameter: Tissue Value: Aerial
  misc_feature: MA Experiment 108561 PARAMETER Experiment Name: At_100uM_ABA_cDNA_P Parameter: Treatment Value: 100uM ABA vs. No Treatment
  misc_feature: MA Experiment ID: 108572 Result: Up-regulated in Transcription
  misc_feature: MA Experiment 108572 PARAMETER Experiment Name: At_Drought_cDNA_P Parameter: Timepoint (hr) Value: 1
  misc_feature: MA Experiment 108572 PARAMETER Experiment Name: At_Drought_cDNA_P Parameter: Tissue Value: Aerial
  misc_feature: MA Experiment 108572 PARAMETER Experiment Name: At_Drought_cDNA_P Parameter: Treatment Value: Drought vs. No Drought
  misc_feature: MA Experiment ID: 108573 Result: Up-regulated in Transcription
  misc_feature: MA Experiment 108573 PARAMETER Experiment Name: At_Drought_cDNA_P Parameter: Timepoint (hr) Value: 6
  misc_feature: MA Experiment 108573 PARAMETER Experiment Name: At_Drought_cDNA_P Parameter: Tissue Value: Aerial
  misc_feature: MA Experiment 108573 PARAMETER Experiment Name: At_Drought_cDNA_P Parameter: Treatment Value: Drought vs. No Drought
  misc_feature: MA Experiment ID: 108574 Result: Up-regulated in Transcription
  misc_feature: MA Experiment 108574 PARAMETER Experiment Name: At_Wounding__cDNA_P Parameter: Timepoint (hr) Value: 1
  misc_feature: MA Experiment 108574 PARAMETER Experiment Name: At_Wounding__cDNA_P Parameter: Tissue Value: Aerial
  misc_feature: MA Experiment 108574 PARAMETER Experiment Name: At_Wounding__cDNA_P Parameter: Treatment Value: Wounding vs. No Wounding
  misc_feature: MA Experiment ID: 108585 Result: Up-regulated in Transcription
  misc_feature: MA Experiment 108585 PARAMETER Experiment Name: At_5mM_NaNP_cDNA_P Parameter: Timepoint (hr) Value: 6
  misc_feature: MA Experiment 108585 PARAMETER Experiment Name: At_5mM_NaNP_cDNA_P Parameter: Tissue Value: Aerial
  misc_feature: MA Experiment 108585 PARAMETER Experiment Name: At_5mM_NaNP_cDNA_P Parameter: Treatment Value: null
  misc_feature: MA Experiment ID: 108595 Result: Up-regulated in Transcription
  misc_feature: MA Experiment 108595 PARAMETER Experiment Name: At_Ler-pi_Ovule_cDNA_P Parameter: Plant Line Value: null
  misc_feature: MA Experiment ID: 108605 Result: Up-regulated in Transcription
  misc_feature: MA Experiment 108605 PARAMETER Experiment Name: At_100uM_ABA_cDNA_P Parameter: Timepoint (hr) Value: 6
  misc_feature: MA Experiment 108605 PARAMETER Experiment Name: At_100uM_ABA_cDNA_P Parameter: Tissue Value: Aerial
  misc_feature: MA Experiment 108605 PARAMETER Experiment Name: At_100uM_ABA_cDNA_P Parameter: Treatment Value: 100uM ABA vs. No Treatment
  misc_feature: MA Experiment ID: 108607 Result: Up-regulated in Transcription
  misc_feature: MA Experiment 108607 PARAMETER Experiment Name: At_100uM_ABA_cDNA_P Parameter: Timepoint (hr) Value: 4
  misc_feature: MA Experiment 108607 PARAMETER Experiment Name: At_100uM_ABA_cDNA_P Parameter: Tissue Value: Aerial
  misc_feature: MA Experiment 108607 PARAMETER Experiment Name: At_100uM_ABA_cDNA_P Parameter: Treatment Value: 100uM ABA vs. No Treatment
  misc_feature: MA Experiment ID: 108608 Result: Up-regulated in Transcription
  misc_feature: MA Experiment 108608 PARAMETER Experiment Name: At_100uM_ABA_cDNA_P Parameter: Timepoint (hr) Value: 1
  misc_feature: MA Experiment 108608 PARAMETER Experiment Name: At_100uM_ABA_cDNA_P Parameter: Tissue Value: Aerial
  misc_feature: MA Experiment 108608 PARAMETER Experiment Name: At_100uM_ABA_cDNA_P Parameter: Treatment Value: 100uM ABA vs. No Treatment
  misc_feature: MA Experiment ID: 108609 Result: Up-regulated in Transcription
  misc_feature: MA Experiment 108609 PARAMETER Experiment Name: At_100uM_ABA_cDNA_P Parameter: Timepoint (hr) Value: 24
  misc_feature: MA Experiment 108609 PARAMETER Experiment Name: At_100uM_ABA_cDNA_P Parameter: Tissue Value: Aerial
  misc_feature: MA Experiment 108609 PARAMETER Experiment Name: At_100uM_ABA_cDNA_P Parameter: Treatment Value: 100uM ABA vs. No Treatment
  misc_feature: MA Experiment ID: 108668 Result: Up-regulated in Transcription
  misc_feature: MA Experiment 108668 PARAMETER Experiment Name: At_2mM_SA_cDNA_P Parameter: Plant Line Value: WS
  misc_feature: MA Experiment 108668 PARAMETER Experiment Name: At_2mM_SA_cDNA_P Parameter: Timepoint (hr) Value: 6
  misc_feature: MA Experiment 108668 PARAMETER Experiment Name: At_2mM_SA_cDNA_P Parameter: Treatment Value: 2mM SA vs. No Treatment
  misc_feature: MA Experiment ID: 20000069 Result: Up-regulated in Transcription
  misc_feature: MA Experiment 20000069 PARAMETER Experiment Name: At_100uM_ABA_Mutants_cDNA_P Parameter: Plant Line Value: CS23
  misc_feature: MA Experiment 20000069 PARAMETER Experiment Name: At_100uM_ABA_Mutants_cDNA_P Parameter: Timepoint (hr) Value: 6
  misc_feature: MA Experiment 20000069 PARAMETER Experiment Name: At_100uM_ABA_Mutants_cDNA_P Parameter: Tissue Value: Aerial
  misc_feature: MA Experiment 20000069 PARAMETER Experiment Name: At_100uM_ABA_Mutants_cDNA_P Parameter: Treatment Value: 100uM ABA vs. No Treatment
  misc_feature: MA Experiment ID: 20000070 Result: Up-regulated in Transcription
  misc_feature: MA Experiment 20000070 PARAMETER Experiment Name: At_100uM_ABA_Mutants_cDNA_P Parameter: Plant Line Value: CS24
  misc_feature: MA Experiment 20000070 PARAMETER Experiment Name: At_100uM_ABA_Mutants_cDNA_P Parameter: Timepoint (hr) Value: 6
  misc_feature: MA Experiment 20000070 PARAMETER Experiment Name: At_100uM_ABA_Mutants_cDNA_P Parameter: Tissue Value: Aerial
  misc_feature: MA Experiment 20000070 PARAMETER Experiment Name: At_100uM_ABA_Mutants_cDNA_P Parameter: Treatment Value: 100uM ABA vs. No Treatment
  misc_feature: MA Experiment ID: 20000072 Result: Up-regulated in Transcription
  misc_feature: MA Experiment 20000072 PARAMETER Experiment Name: At_100uM_ABA_Mutants_cDNA_P Parameter: Plant Line Value: CS8105
  misc_feature: MA Experiment 20000072 PARAMETER Experiment Name: At_100uM_ABA_Mutants_cDNA_P Parameter: Timepoint (hr) Value: 6
  misc_feature: MA Experiment 20000072 PARAMETER Experiment Name: At_100uM_ABA_Mutants_cDNA_P Parameter: Tissue Value: Aerial
  misc_feature: MA Experiment 20000072 PARAMETER Experiment Name: At_100uM_ABA_Mutants_cDNA_P Parameter: Treatment Value: 100uM ABA vs. No Treatment
  misc_feature: MA Experiment ID: 20000086 Result: Up-regulated in Transcription
  misc_feature: MA Experiment 20000086 PARAMETER Experiment Name: At_100uM_ABA_Mutants_cDNA_P Parameter: Plant Line Value: CS22
  misc_feature: MA Experiment 20000086 PARAMETER Experiment Name: At_100uM_ABA_Mutants_cDNA_P Parameter: Timepoint (hr) Value: 6
  misc_feature: MA Experiment 20000086 PARAMETER Experiment Name: At_100uM_ABA_Mutants_cDNA_P Parameter: Tissue Value: Aerial
  misc_feature: MA Experiment 20000086 PARAMETER Experiment Name: At_100uM_ABA_Mutants_cDNA_P Parameter: Treatment Value: 100uM ABA vs. No Treatment
  misc_feature: MA Experiment ID: 20000087 Result: Up-regulated in Transcription
  misc_feature: MA Experiment 20000087 PARAMETER Experiment Name: At_100uM_ABA_Mutants_cDNA_P Parameter: Plant Line Value: WS
  misc_feature: MA Experiment 20000087 PARAMETER Experiment Name: At_100uM_ABA_Mutants_cDNA_P Parameter: Timepoint (hr) Value: 6
  misc_feature: MA Experiment 20000087 PARAMETER Experiment Name: At_100uM_ABA_Mutants_cDNA_P Parameter: Tissue Value: Aerial
  misc_feature: MA Experiment 20000087 PARAMETER Experiment Name: At_100uM_ABA_Mutants_cDNA_P Parameter: Treatment Value: 100uM ABA vs. No Treatment
  misc_feature: MA Experiment ID: 20000088 Result: Up-regulated in Transcription
  misc_feature: MA Experiment 20000088 PARAMETER Experiment Name: At_100uM_ABA_Mutants_cDNA_P Parameter: Plant Line Value: Landsberg
  misc_feature: MA Experiment 20000088 PARAMETER Experiment Name: At_100uM_ABA_Mutants_cDNA_P Parameter: Timepoint (hr) Value: 6
  misc_feature: MA Experiment 20000088 PARAMETER Experiment Name: At_100uM_ABA_Mutants_cDNA_P Parameter: Tissue Value: Aerial
  misc_feature: MA Experiment 20000088 PARAMETER Experiment Name: At_100uM_ABA_Mutants_cDNA_P Parameter: Treatment Value: 100uM ABA vs. No Treatment
  misc_feature: MA Experiment ID: 20000117 Result: Up-regulated in Transcription
  misc_feature: MA Experiment 20000117 PARAMETER Experiment Name: At_100uM_ABA_Mutants_cDNA_P Parameter: Plant Line Value: Columbia
  misc_feature: MA Experiment 20000117 PARAMETER Experiment Name: At_100uM_ABA_Mutants_cDNA_P Parameter: Timepoint (hr) Value: 6
  misc_feature: MA Experiment 20000117 PARAMETER Experiment Name: At_100uM_ABA_Mutants_cDNA_P Parameter: Tissue Value: Aerial
  misc_feature: MA Experiment 20000117 PARAMETER Experiment Name: At_100uM_ABA_Mutants_cDNA_P Parameter: Treatment Value: 100uM ABA vs. No Treatment
  misc_feature: MA Experiment ID: 20000144 Result: Down-regulated in Transcription
  misc_feature: MA Experiment 20000144 PARAMETER Experiment Name: At_42deg_Heat_cDNA_P Parameter: Temperature (deg C) Value: 42 vs. 22
  misc_feature: MA Experiment 20000144 PARAMETER Experiment Name: At_42deg_Heat_cDNA_P Parameter: Timepoint (hr) Value: 1
  misc_feature: MA Experiment 20000144 PARAMETER Experiment Name: At_42deg_Heat_cDNA_P Parameter: Tissue Value: Aerial
  misc_feature: MA Experiment ID: 20000166 Result: Up-regulated in Transcription
  misc_feature: MA Experiment 20000166 PARAMETER Experiment Name: At_100uM_ABA_P Parameter: Age (day) Value: 14
  misc_feature: MA Experiment 20000166 PARAMETER Experiment Name: At_100uM_ABA_P Parameter: Organism Value: A. thaliana
  misc_feature: MA Experiment 20000166 PARAMETER Experiment Name: At_100uM_ABA_P Parameter: Plant Line Value: WS
  misc_feature: MA Experiment 20000166 PARAMETER Experiment Name: At_100uM_ABA_P Parameter: Timepoint (hr) Value: 1
  misc_feature: MA Experiment 20000166 PARAMETER Experiment Name: At_100uM_ABA_P Parameter: Tissue Value: Aerial
  misc_feature: MA Experiment 20000166 PARAMETER Experiment Name: At_100uM_ABA_P Parameter: Treatment Value: 100uM ABA vs. No Treatment
  misc_feature: MA Experiment ID: 20000169 Result: Up-regulated in Transcription
  misc_feature: MA Experiment 20000169 PARAMETER Experiment Name: At_100uM_ABA_P Parameter: Age (day) Value: 14
  misc_feature: MA Experiment 20000169 PARAMETER Experiment Name: At_100uM_ABA_P Parameter: Organism Value: A. thaliana
  misc_feature: MA Experiment 20000169 PARAMETER Experiment Name: At_100uM_ABA_P Parameter: Plant Line Value: WS
  misc_feature: MA Experiment 20000169 PARAMETER Experiment Name: At_100uM_ABA_P Parameter: Timepoint (hr) Value: 6
  misc_feature: MA Experiment 20000169 PARAMETER Experiment Name: At_100uM_ABA_P Parameter: Tissue Value: Aerial
  misc_feature: MA Experiment 20000169 PARAMETER Experiment Name: At_100uM_ABA_P Parameter: Treatment Value: 100uM ABA vs. No Treatment
  misc_feature: MA Experiment ID: 20000171 Result: Down-regulated in Transcription
  misc_feature: MA Experiment 20000171 PARAMETER Experiment Name: At_42deg_Heat_P Parameter: Age (day) Value: 14
  misc_feature: MA Experiment 20000171 PARAMETER Experiment Name: At_42deg_Heat_P Parameter: Organism Value: A. thaliana
  misc_feature: MA Experiment 20000171 PARAMETER Experiment Name: At_42deg_Heat_P Parameter: Plant Line Value: WS
  misc_feature: MA Experiment 20000171 PARAMETER Experiment Name: At_42deg_Heat_P Parameter: Temperature (deg C) Value: 42 vs. 22
  misc_feature: MA Experiment 20000171 PARAMETER Experiment Name: At_42deg_Heat_P Parameter: Timepoint (hr) Value: 1
  misc_feature: MA Experiment 20000171 PARAMETER Experiment Name: At_42deg_Heat_P Parameter: Tissue Value: Aerial
  misc_feature: MA Experiment ID: 20000173 Result: Down-regulated in Transcription
  misc_feature: MA Experiment 20000173 PARAMETER Experiment Name: At_42deg_Heat_P Parameter: Age (day) Value: 14
  misc_feature: MA Experiment 20000173 PARAMETER Experiment Name: At_42deg_Heat_P Parameter: Organism Value: A. thaliana
  misc_feature: MA Experiment 20000173 PARAMETER Experiment Name: At_42deg_Heat_P Parameter: Plant Line Value: WS
  misc_feature: MA Experiment 20000173 PARAMETER Experiment Name: At_42deg_Heat_P Parameter: Temperature (deg C) Value: 42 vs. 22
  misc_feature: MA Experiment 20000173 PARAMETER Experiment Name: At_42deg_Heat_P Parameter: Timepoint (hr) Value: 6
  misc_feature: MA Experiment 20000173 PARAMETER Experiment Name: At_42deg_Heat_P Parameter: Tissue Value: Aerial
  misc_feature: MA Experiment ID: 20000180 Result: Up-regulated in Transcription
  misc_feature: MA Experiment 20000180 PARAMETER Experiment Name: At_Germinating_Seeds_P Parameter: Age (hr) Value: 24 vs. 0
  misc_feature: MA Experiment 20000180 PARAMETER Experiment Name: At_Germinating_Seeds_P Parameter: Tissue Value: Germinating Seeds
  misc_feature: MA Experiment ID: 20000182 Result: Up-regulated in Transcription
  misc_feature: MA Experiment 20000182 PARAMETER Experiment Name: At_2mM_SA_P Parameter: Age (day) Value: 14
  misc_feature: MA Experiment 20000182 PARAMETER Experiment Name: At_2mM_SA_P Parameter: Organism Value: A. thaliana
  misc_feature: MA Experiment 20000182 PARAMETER Experiment Name: At_2mM_SA_P Parameter: Plant Line Value: WS
  misc_feature: MA Experiment 20000182 PARAMETER Experiment Name: At_2mM_SA_P Parameter: Timepoint (hr) Value: 6
  misc_feature: MA Experiment 20000182 PARAMETER Experiment Name: At_2mM_SA_P Parameter: Tissue Value: Aerial
  misc_feature: MA Experiment 20000182 PARAMETER Experiment Name: At_2mM_SA_P Parameter: Treatment Value: 2mM SA vs. No Treatment
  misc_feature: MA Experiment ID: 20000184 Result: Down-regulated in Transcription
  misc_feature: MA Experiment 20000184 PARAMETER Experiment Name: At_Shoots__P Parameter: Age (day) Value: 7
  misc_feature: MA Experiment 20000184 PARAMETER Experiment Name: At_Shoots__P Parameter: Tissue Value: Shoots vs. Whole Plant
  misc_feature: MA Experiment ID: 20000185 Result: Up-regulated in Transcription
  misc_feature: MA Experiment 20000185 PARAMETER Experiment Name: At_Roots__P Parameter: Age (day) Value: 7 vs. 21
  misc_feature: MA Experiment 20000185 PARAMETER Experiment Name: At_Roots__P Parameter: Organism Value: A. thaliana
  misc_feature: MA Experiment 20000185 PARAMETER Experiment Name: At_Roots__P Parameter: Tissue Value: Roots vs. Whole Plant
  misc_feature: MA Experiment ID: 20000213 Result: Up-regulated in Transcription
  misc_feature: MA Experiment 20000213 PARAMETER Experiment Name: At_4deg_Cold_P Parameter: Timepoint (hr) Value: 2
  misc_feature: MA Experiment ID: 20000267 Result: Up-regulated in Transcription
  misc_feature: MA Experiment 20000267 PARAMETER Experiment Name: At_Drought_P Parameter: Age (day) Value: 7
  misc_feature: MA Experiment 20000267 PARAMETER Experiment Name: At_Drought_P Parameter: Organism Value: A. thaliana
  misc_feature: MA Experiment 20000267 PARAMETER Experiment Name: At_Drought_P Parameter: Plant Line Value: WS
  misc_feature: MA Experiment 20000267 PARAMETER Experiment Name: At_Drought_P Parameter: Timepoint (hr) Value: 6
  misc_feature: MA Experiment 20000267 PARAMETER Experiment Name: At_Drought_P Parameter: Tissue Value: Whole Plant
  misc_feature: MA Experiment 20000267 PARAMETER Experiment Name: At_Drought_P Parameter: Treatment Value: Drought vs. No Drought
  misc_feature: MA Experiment ID: 20000436 Result: Up-regulated in Transcription
  misc_feature: MA Experiment 20000436 PARAMETER Experiment Name: At_Drought_P Parameter: Age (day) Value: 7
  misc_feature: MA Experiment 20000436 PARAMETER Experiment Name: At_Drought_P Parameter: Organism Value: A. thaliana
  misc_feature: MA Experiment 20000436 PARAMETER Experiment Name: At_Drought_P Parameter: Plant Line Value: WS
  misc_feature: MA Experiment 20000436 PARAMETER Experiment Name: At_Drought_P Parameter: Timepoint (hr) Value: 12
  misc_feature: MA Experiment 20000436 PARAMETER Experiment Name: At_Drought_P Parameter: Tissue Value: Whole Plant
  misc_feature: MA Experiment 20000436 PARAMETER Experiment Name: At_Drought_P Parameter: Treatment Value: Drought vs. No Drought
  misc_feature: MA Experiment ID: 20000437 Result: Up-regulated in Transcription
  misc_feature: MA Experiment 20000437 PARAMETER Experiment Name: At_Drought_P Parameter: Age (day) Value: 8
  misc_feature: MA Experiment 20000437 PARAMETER Experiment Name: At_Drought_P Parameter: Organism Value: A. thaliana
  misc_feature: MA Experiment 20000437 PARAMETER Experiment Name: At_Drought_P Parameter: Plant Line Value: WS
  misc_feature: MA Experiment 20000437 PARAMETER Experiment Name: At_Drought_P Parameter: Timepoint (hr) Value: 24
  misc_feature: MA Experiment 20000437 PARAMETER Experiment Name: At_Drought_P Parameter: Tissue Value: Whole Plant
  misc_feature: MA Experiment 20000437 PARAMETER Experiment Name: At_Drought_P Parameter: Treatment Value: Drought vs. No Drought
  misc_feature: MA Experiment ID: 20000439 Result: Up-regulated in Transcription
  misc_feature: MA Experiment 20000439 PARAMETER Experiment Name: At_Roots__P Parameter: Age (day) Value: 14 vs. 21
  misc_feature: MA Experiment 20000439 PARAMETER Experiment Name: At_Roots__P Parameter: Organism Value: A. thaliana
  misc_feature: MA Experiment 20000439 PARAMETER Experiment Name: At_Roots__P Parameter: Tissue Value: Roots vs. Whole Plant
  misc_feature: MA Experiment ID: 20000453 Result: Up-regulated in Transcription
  misc_feature: MA Experiment 20000453 PARAMETER Experiment Name: At_100uM_ABA_P Parameter: Age (day) Value: 15
  misc_feature: MA Experiment 20000453 PARAMETER Experiment Name: At_100uM_ABA_P Parameter: Organism Value: A. thaliana
  misc_feature: MA Experiment 20000453 PARAMETER Experiment Name: At_100uM_ABA_P Parameter: Plant Line Value: WS
  misc_feature: MA Experiment 20000453 PARAMETER Experiment Name: At_100uM_ABA_P Parameter: Timepoint (hr) Value: 24
  misc_feature: MA Experiment 20000453 PARAMETER Experiment Name: At_100uM_ABA_P Parameter: Tissue Value: Aerial
  misc_feature: MA Experiment 20000453 PARAMETER Experiment Name: At_100uM_ABA_P Parameter: Treatment Value: 100uM ABA vs. No Treatment
  misc_feature: MA Experiment ID: 20000455 Result: Up-regulated in Transcription
  misc_feature: MA Experiment 20000455 PARAMETER Experiment Name: At_100uM_ABA_P Parameter: Age (day) Value: 16
  misc_feature: MA Experiment 20000455 PARAMETER Experiment Name: At_100uM_ABA_P Parameter: Organism Value: A. thaliana
  misc_feature: MA Experiment 20000455 PARAMETER Experiment Name: At_100uM_ABA_P Parameter: Plant Line Value: WS
  misc_feature: MA Experiment 20000455 PARAMETER Experiment Name: At_100uM_ABA_P Parameter: Timepoint (hr) Value: 48
  misc_feature: MA Experiment 20000455 PARAMETER Experiment Name: At_100uM_ABA_P Parameter: Tissue Value: Aerial
  misc_feature: MA Experiment 20000455 PARAMETER Experiment Name: At_100uM_ABA_P Parameter: Treatment Value: 100uM ABA vs. No Treatment
  misc_feature: MA Experiment ID: 20000794 Result: Up-regulated in Transcription
  misc_feature: MA Experiment 20000794 PARAMETER Experiment Name: At_Petals_P Parameter: Age (day) Value: 23-25 days
  misc_feature: MA Experiment 20000794 PARAMETER Experiment Name: At_Petals_P Parameter: Plant Line Value: WS
  misc_feature: MA Experiment 20000794 PARAMETER Experiment Name: At_Petals_P Parameter: Tissue Value: Petals vs. Whole plant
  misc_feature: MA Experiment ID: 20001247 Result: Up-regulated in Transcription
  misc_feature: MA Experiment 20001247 PARAMETER Experiment Name: At_Far-red-induction_P Parameter: Age (day) Value: 7
  misc_feature: MA Experiment 20001247 PARAMETER Experiment Name: At_Far-red-induction_P Parameter: Light Value: Far-red vs. White
  misc_feature: MA Experiment 20001247 PARAMETER Experiment Name: At_Far-red-induction_P Parameter: Organism Value: A. thaliana
  misc_feature: MA Experiment 20001247 PARAMETER Experiment Name: At_Far-red-induction_P Parameter: Plant Line Value: Columbia
  misc_feature: MA Experiment 20001247 PARAMETER Experiment Name: At_Far-red-induction_P Parameter: Timepoint (hr) Value: 1
  misc_feature: MA Experiment 20001247 PARAMETER Experiment Name: At_Far-red-induction_P Parameter: Tissue Value: Whole Plant
  misc_feature: MA Experiment ID: 20001451 Result: Up-regulated in Transcription
  misc_feature: MA Experiment 20001451 PARAMETER Experiment Name: At_Far-red-induction_P Parameter: Age (day) Value: 7
  misc_feature: MA Experiment 20001451 PARAMETER Experiment Name: At_Far-red-induction_P Parameter: Light Value: Far-red vs. White
  misc_feature: MA Experiment 20001451 PARAMETER Experiment Name: At_Far-red-induction_P Parameter: Organism Value: A. thaliana
  misc_feature: MA Experiment 20001451 PARAMETER Experiment Name: At_Far-red-induction_P Parameter: Plant Line Value: Columbia
  misc_feature: MA Experiment 20001451 PARAMETER Experiment Name: At_Far-red-induction_P Parameter: Timepoint (hr) Value: 24
  misc_feature: MA Experiment 20001451 PARAMETER Experiment Name: At_Far-red-induction_P Parameter: Tissue Value: Whole Plant
  misc_feature: MA Experiment ID: 20001554 Result: Up-regulated in Transcription
  misc_feature: MA Experiment 20001554 PARAMETER Experiment Name: At_Drought_Soil_Dry_P Parameter: Age (day) Value: 21
  misc_feature: MA Experiment 20001554 PARAMETER Experiment Name: At_Drought_Soil_Dry_P Parameter: Organism Value: A. thaliana
  misc_feature: MA Experiment 20001554 PARAMETER Experiment Name: At_Drought_Soil_Dry_P Parameter: Plant Line Value: WS
  misc_feature: MA Experiment 20001554 PARAMETER Experiment Name: At_Drought_Soil_Dry_P Parameter: Post Timepoint (hr) Value: None
  misc_feature: MA Experiment 20001554 PARAMETER Experiment Name: At_Drought_Soil_Dry_P Parameter: Post-Treatment Value: None
  misc_feature: MA Experiment 20001554 PARAMETER Experiment Name: At_Drought_Soil_Dry_P Parameter: Timepoint (day) Value: 7
  misc_feature: MA Experiment 20001554 PARAMETER Experiment Name: At_Drought_Soil_Dry_P Parameter: Treatment Value: Drought vs. No Drought
  misc_feature: MA Experiment ID: 20001555 Result: Up-regulated in Transcription
  misc_feature: MA Experiment 20001555 PARAMETER Experiment Name: At_Drought_Soil_Dry_P Parameter: Age (day) Value: 24
  misc_feature: MA Experiment 20001555 PARAMETER Experiment Name: At_Drought_Soil_Dry_P Parameter: Organism Value: A. thaliana
  misc_feature: MA Experiment 20001555 PARAMETER Experiment Name: At_Drought_Soil_Dry_P Parameter: Plant Line Value: WS
  misc_feature: MA Experiment 20001555 PARAMETER Experiment Name: At_Drought_Soil_Dry_P Parameter: Post Timepoint (hr) Value: None
  misc_feature: MA Experiment 20001555 PARAMETER Experiment Name: At_Drought_Soil_Dry_P Parameter: Post-Treatment Value: None
  misc_feature: MA Experiment 20001555 PARAMETER Experiment Name: At_Drought_Soil_Dry_P Parameter: Timepoint (day) Value: 10
  misc_feature: MA Experiment 20001555 PARAMETER Experiment Name: At_Drought_Soil_Dry_P Parameter: Treatment Value: Drought vs. No Drought
  misc_feature: MA Experiment ID: 20001905 Result: Up-regulated in Transcription
  misc_feature: MA Experiment 20001905 PARAMETER Experiment Name: At_Drought_Reproduction_P Parameter: Age (day) Value: 40
  misc_feature: MA Experiment 20001905 PARAMETER Experiment Name: At_Drought_Reproduction_P Parameter: Organism Value: A. thaliana
  misc_feature: MA Experiment 20001905 PARAMETER Experiment Name: At_Drought_Reproduction_P Parameter: Plant Line Value: WS
  misc_feature: MA Experiment 20001905 PARAMETER Experiment Name: At_Drought_Reproduction_P Parameter: Timepoint (day) Value: 10
  misc_feature: MA Experiment 20001905 PARAMETER Experiment Name: At_Drought_Reproduction_P Parameter: Tissue Value: Rosettes
  misc_feature: MA Experiment 20001905 PARAMETER Experiment Name: At_Drought_Reproduction_P Parameter: Treatment Value: Drought vs. No Drought
  misc_feature: MA Experiment ID: 20001906 Result: Up-regulated in Transcription
  misc_feature: MA Experiment 20001906 PARAMETER Experiment Name: At_Drought_Reproduction_P Parameter: Age (day) Value: 35
  misc_feature: MA Experiment 20001906 PARAMETER Experiment Name: At_Drought_Reproduction_P Parameter: Organism Value: A. thaliana
  misc_feature: MA Experiment 20001906 PARAMETER Experiment Name: At_Drought_Reproduction_P Parameter: Plant Line Value: WS
  misc_feature: MA Experiment 20001906 PARAMETER Experiment Name: At_Drought_Reproduction_P Parameter: Timepoint (day) Value: 5
  misc_feature: MA Experiment 20001906 PARAMETER Experiment Name: At_Drought_Reproduction_P Parameter: Tissue Value: Siliques
  misc_feature: MA Experiment 20001906 PARAMETER Experiment Name: At_Drought_Reproduction_P Parameter: Treatment Value: Drought vs. No Drought
actccaaaaaggaaaaaaaaaacaaaaaaaaacagcttctaaaaataaaaaataaaaaaaaatcccagccaccgtgggggtaattccgtaaatttgtaacagaaactccattcccgcggcgtatgcagagggcaatcccgtaaacttaacccatctccggtgatgaataagatccactccttcacatcggagtgattttccacggngtttctcttcttcttctcccctccaacaaaataaaataagatatgaaagcaaatcgcggcggcggagagcacggccaacacgaggctctaaagctttccagtttcttcttcatgccggagcggccacgtgattacctcgtgcttttcacacgtttctccgtcctcacgtgcctcatcgtctccgtatctcttgttctccgcgccacttttttatccccttccgctcgagactattccaccacctacggtctcaaattaaccgccgtacctcaaaaagccatagctctccctccgtccgcatccgtcggaccaaccaatatctcccatatcttcttctctatcgccggagcagctgagacatggatcgatcggagccagtacatctccttatggtggcgaaacacgacacgtggcttcgtctggctcgatgaaccggtgaaaatccctgaaaatcactccgatgtcagattctcgatcccgactcgagtttctgatccaggctggactcgattcaaattctccagctcaagagccgcggttcgaatcgctcgtataatctgggatagttatcggttaaatctaccaaatgtccggtggttcgtcatgggagatgacgataccgtcttcttcaccgagaatctcgtcaaggttctctcaaagtacgaccacgagcagatgtggtacatcggaggaaactcagagagcgtcgagcaagacgtgatgcacgcgtacgatatggcgtttggcggcggtggtttcgctctgagccgtccattagcggcgcgtttggccgccgcgatggatgattgtctccaacgttatttctatttttacggttctgatcagagaatcgcgtcttgcatcagcgagatcggcgttccgttcaccgaagaacgcggttttcatcagcttgacataagaggagatccatacgggtttctagcggcgcatccattggcaccgcttgtatcgttgcatcaccttgtttacttagacccaatgttccctaacaaaaacccgatcgagtcgttacagaccctaatgaaaccttataccttagacccgaatcgaatactccaacagattaattgtcatgatcgcaaacgtcaatggtctatatccatctcttggggatacaccattcagatatacacttacttcttgactgctacggagctgactacgccgttgcagaccttcaaaacttggcggtcttccagcgatggacctttcgtgtttaacactcggcccttgaaacctgacccctgtgagcgtccggtcacttatttcatggatggtgccgaggatgtacgggatagtgggacgaaaacttggtatagcataggggataagaactatggtcattgcggaaagattgagcatactcgattaactaaagtgaagaggatattggtgacttcaatgaagacggatcctgagtattggaacaaggcaccgaggagacagtgttgtgaggtgatggaaggaaaagtaggaaaaagaaaagagaaagaaatgttgttaaggattagaaaatgcagatctttggagaagatataaaaaaagcgttttaattagagagatttttgcacatacagatttagattcgatcattagttatttgtttctaaattcctcaattcctagtaccaagagaatgacgattttctct

SEQ ID NO: 30704 - protein, 505 aa, Arabidopsis thaliana
  peptide (1)..(505): Ceres Seq. ID no. 12639122
  misc_feature (224)..(478): Pfam Name: Protein of unknown function, DUF604 Pfam Description: Protein of unknown function, DUF604
  misc_feature (224)..(478): Pfam Name: Protein of unknown function, DUF604 Pfam Description: Protein of unknown function, DUF604
  misc_feature (91)..(503): Homolog of NCBI NO: 25336194 NR Description: F22L4.11 protein - Arabidopsis thaliana
  misc_feature (91)..(503): Homolog of NCBI NO: 15223433 NR Description: hypothetical protein; protein id: At1g01570.1
  misc_feature (73)..(483): Homolog of NCBI NO: 15238082 NR Description: putative protein; protein id: At5g41460.1
  misc_feature (91)..(503): Homolog of NCBI NO: 18416156 NR Description: Expressed protein
  misc_feature (91)..(503): Homolog of NCBI NO: 15529153 NR Description: AT4g23490/F16G20_190 [Arabidopsis thaliana]
  misc_feature (91)..(503): Homolog of NCBI NO: 25336194 NR Description: F22L4.11 protein - Arabidopsis thaliana
  misc_feature (73)..(483): Homolog of NCBI NO: 15238082 NR Description: putative protein; protein id: At5g41460.1
  misc_feature (91)..(503): Homolog of NCBI NO: 15529153 NR Description: AT4g23490/F16G20_190 [Arabidopsis thaliana]
  misc_feature (1)..(505): Homolog of NCBI NO: 15229746 NR Description: unknown protein; protein id: At3g11420.1
  misc_feature (27)..(505): Homolog of NCBI NO: 18404516 NR Description: putative zinc finger protein; protein id:
  misc_feature (74)..(292): Homolog of NCBI NO: 34902078 NR Description: unknown protein [Oryza sativa (japonica
  misc_feature (282)..(499): Homolog of NCBI NO: 34902078 NR Description: unknown protein [Oryza sativa (japonica
  misc_feature (85)..(503): Homolog of NCBI NO: 37536418 NR Description: hypothetical protein [Oryza sativa (japonica
  misc_feature (91)..(503): Homolog of NCBI NO: 18416156 NR Description: Expressed protein
  misc_feature (91)..(503): Homolog of NCBI NO: 15223433 NR Description: hypothetical protein; protein id: At1g01570.1
  misc_feature (85)..(503): Homolog of NCBI NO: 37536418 NR Description: hypothetical protein [Oryza sativa (japonica
  misc_feature (282)..(499): Homolog of NCBI NO: 34902078 NR Description: unknown protein [Oryza sativa (japonica
  misc_feature (74)..(292): Homolog of NCBI NO: 34902078 NR Description: unknown protein [Oryza sativa (japonica
  misc_feature (27)..(505): Homolog of NCBI NO: 18404516 NR Description: putative zinc finger protein; protein id:
  misc_feature (1)..(505): Homolog of NCBI NO: 15229746 NR Description: unknown protein; protein id: At3g11420.1
MKANRGGGEHGQHEALKLSSFFFMPERPRDYLVLFTRFSVLTCLIVSVSLVLRATFLSPSARDYSTTYGLKLTAVPQKAIALPPSASVGPTNISHIFFSIAGAAETWIDRSQYISLWWRNTTRGFVWLDEPVKIPENHSDVRFSIPTRVSDPGWTRFKFSSSRAAVRIARIIWDSYRLNLPNVRWFVMGDDDTVFFTENLVKVLSKYDHEQMWYIGGNSESVEQDVMHAYDMAFGGGGFALSRPLAARLAAAMDDCLQRYFYFYGSDQRIASCISEIGVPFTEERGFHQLDIRGDPYGFLAAHPLAPLVSLHHLVYLDPMFPNKNPIESLQTLMKPYTLDPNRILQQINCHDRKRQWSISISWGYTIQIYTYFLTATELTTPLQTFKTWRSSSDGPFVFNTRPLKPDPCERPVTYFMDGAEDVRDSGTKTWYSIGDKNYGHCGKIEHTRLTKVKRILVTSMKTDPEYWNKAPRRQCCEVMEGKVGKRKEKEMLLRIRKCRSLEKI

SEQ ID NO: 30705 - protein, 482 aa, Arabidopsis thaliana
  peptide (1)..(482): Ceres Seq. ID no. 12639123
  misc_feature (201)..(455): Pfam Name: Protein of unknown function, DUF604 Pfam Description: Protein of unknown function, DUF604
  misc_feature (201)..(455): Pfam Name: Protein of unknown function, DUF604 Pfam Description: Protein of unknown function, DUF604
  misc_feature (68)..(480): Homolog of NCBI NO: 25336194 NR Description: F22L4.11 protein - Arabidopsis thaliana
  misc_feature (68)..(480): Homolog of NCBI NO: 15223433 NR Description: hypothetical protein; protein id: At1g01570.1
  misc_feature (50)..(460): Homolog of NCBI NO: 15238082 NR Description: putative protein; protein id: At5g41460.1
  misc_feature (68)..(480): Homolog of NCBI NO: 18416156 NR Description: Expressed protein
  misc_feature (68)..(480): Homolog of NCBI NO: 15529153 NR Description: AT4g23490/F16G20_190 [Arabidopsis thaliana]
  misc_feature (68)..(480): Homolog of NCBI NO: 25336194 NR Description: F22L4.11 protein - Arabidopsis thaliana
  misc_feature (50)..(460): Homolog of NCBI NO: 15238082 NR Description: putative protein; protein id: At5g41460.1
  misc_feature (68)..(480): Homolog of NCBI NO: 15529153 NR Description: AT4g23490/F16G20_190 [Arabidopsis thaliana]
  misc_feature (1)..(482): Homolog of NCBI NO: 15229746 NR Description: unknown protein; protein id: At3g11420.1
  misc_feature (4)..(482): Homolog of NCBI NO: 18404516 NR Description: putative zinc finger protein; protein id:
  misc_feature (51)..(269): Homolog of NCBI NO: 34902078 NR Description: unknown protein [Oryza sativa (japonica
  misc_feature (259)..(476): Homolog of NCBI NO: 34902078 NR Description: unknown protein [Oryza sativa (japonica
  misc_feature (62)..(480): Homolog of NCBI NO: 37536418 NR Description: hypothetical protein [Oryza sativa (japonica
  misc_feature (68)..(480): Homolog of NCBI NO: 18416156 NR Description: Expressed protein
  misc_feature (68)..(480): Homolog of NCBI NO: 15223433 NR Description: hypothetical protein; protein id: At1g01570.1
  misc_feature (62)..(480): Homolog of NCBI NO: 37536418 NR Description: hypothetical protein [Oryza sativa (japonica
  misc_feature (259)..(476): Homolog of NCBI NO: 34902078 NR Description: unknown protein [Oryza sativa (japonica
  misc_feature (51)..(269): Homolog of NCBI NO: 34902078 NR Description: unknown protein [Oryza sativa (japonica
  misc_feature (4)..(482): Homolog of NCBI NO: 18404516 NR Description: putative zinc finger protein; protein id:
  misc_feature (1)..(482): Homolog of NCBI NO: 15229746 NR Description: unknown protein; protein id: At3g11420.1
MPERPRDYLVLFTRFSVLTCLIVSVSLVLRATFLSPSARDYSTTYGLKLTAVPQKAIALPPSASVGPTNISHIFFSIAGAAETWIDRSQYISLWWRNTTRGFVWLDEPVKIPENHSDVRFSIPTRVSDPGWTRFKFSSSRAAVRIARIIWDSYRLNLPNVRWFVMGDDDTVFFTENLVKVLSKYDHEQMWYIGGNSESVEQDVMHAYDMAFGGGGFALSRPLAARLAAAMDDCLQRYFYFYGSDQRIASCISEIGVPFTEERGFHQLDIRGDPYGFLAAHPLAPLVSLHHLVYLDPMFPNKNPIESLQTLMKPYTLDPNRILQQINCHDRKRQWSISISWGYTIQIYTYFLTATELTTPLQTFKTWRSSSDGPFVFNTRPLKPDPCERPVTYFMDGAEDVRDSGTKTWYSIGDKNYGHCGKIEHTRLTKVKRILVTSMKTDPEYWNKAPRRQCCEVMEGKVGKRKEKEMLLRIRKCRSLEKI

SEQ ID NO: 30706 - protein, 318 aa, Arabidopsis thaliana
  peptide (1)..(318): Ceres Seq. ID no. 12639124
  misc_feature (37)..(291): Pfam Name: Protein of unknown function, DUF604 Pfam Description: Protein of unknown function, DUF604
  misc_feature (37)..(291): Pfam Name: Protein of unknown function, DUF604 Pfam Description: Protein of unknown function, DUF604
  misc_feature (1)..(316): Homolog of NCBI NO: 25336194 NR Description: F22L4.11 protein - Arabidopsis thaliana
  misc_feature (1)..(316): Homolog of NCBI NO: 15223433 NR Description: hypothetical protein; protein id: At1g01570.1
  misc_feature (1)..(296): Homolog of NCBI NO: 15238082 NR Description: putative protein; protein id: At5g41460.1
  misc_feature (1)..(316): Homolog of NCBI NO: 18416156 NR Description: Expressed protein
  misc_feature (1)..(316): Homolog of NCBI NO: 15529153 NR Description: AT4g23490/F16G20_190 [Arabidopsis thaliana]
  misc_feature (1)..(316): Homolog of NCBI NO: 25336194 NR Description: F22L4.11 protein - Arabidopsis thaliana
  misc_feature (1)..(296): Homolog of NCBI NO: 15238082 NR Description: putative protein; protein id: At5g41460.1
  misc_feature (1)..(316): Homolog of NCBI NO: 15529153 NR Description: AT4g23490/F16G20_190 [Arabidopsis thaliana]
  misc_feature (1)..(318): Homolog of NCBI NO: 15229746 NR Description: unknown protein; protein id: At3g11420.1
  misc_feature (1)..(318): Homolog of NCBI NO: 18404516 NR Description: putative zinc finger protein; protein id:
  misc_feature (1)..(105): Homolog of NCBI NO: 34902078 NR Description: unknown protein [Oryza sativa (japonica
  misc_feature (95)..(312): Homolog of NCBI NO: 34902078 NR Description: unknown protein [Oryza sativa (japonica
  misc_feature (1)..(316): Homolog of NCBI NO: 37536418 NR Description: hypothetical protein [Oryza sativa (japonica
  misc_feature (1)..(316): Homolog of NCBI NO: 18416156 NR Description: Expressed protein
  misc_feature (1)..(316): Homolog of NCBI NO: 15223433 NR Description: hypothetical protein; protein id: At1g01570.1
  misc_feature (1)..(316): Homolog of NCBI NO: 37536418 NR Description: hypothetical protein [Oryza sativa (japonica
  misc_feature (95)..(312): Homolog of NCBI NO: 34902078 NR Description: unknown protein [Oryza sativa (japonica
  misc_feature (1)..(105): Homolog of NCBI NO: 34902078 NR Description: unknown protein [Oryza sativa (japonica
  misc_feature (1)..(318): Homolog of NCBI NO: 18404516 NR Description: putative zinc finger protein; protein id:
  misc_feature (1)..(318): Homolog of NCBI NO: 15229746 NR Description: unknown protein; protein id: At3g11420.1
MGDDDTVFFTENLVKVLSKYDHEQMWYIGGNSESVEQDVMHAYDMAFGGGGFALSRPLAARLAAAMDDCLQRYFYFYGSDQRIASCISEIGVPFTEERGFHQLDIRGDPYGFLAAHPLAPLVSLHHLVYLDPMFPNKNPIESLQTLMKPYTLDPNRILQQINCHDRKRQWSISISWGYTIQIYTYFLTATELTTPLQTFKTWRSSSDGPFVFNTRPLKPDPCERPVTYFMDGAEDVRDSGTKTWYSIGDKNYGHCGKIEHTRLTKVKRILVTSMKTDPEYWNKAPRRQCCEVMEGKVGKRKEKEMLLRIRKCRSLEKI

SEQ ID NO: 30707 - DNA, 1833 bp, Arabidopsis thaliana
  misc_feature (1)..(1833): Ceres Seq. ID no. 13509854
  misc_feature: MA Experiment ID: 108434 Result: Down-regulated in Transcription
  misc_feature: MA Experiment 108434 PARAMETER Experiment Name: At_Root_Tips_cDNA_P Parameter: Tissue Value: Root Tips
  misc_feature: MA Experiment ID: 108462 Result: Down-regulated in Transcription
  misc_feature: MA Experiment 108462 PARAMETER Experiment Name: At_Germinating_Seeds_cDNA_P Parameter: Age (day) Value: 2 vs. 0
  misc_feature: MA Experiment 108462 PARAMETER Experiment Name: At_Germinating_Seeds_cDNA_P Parameter: Tissue Value: Germinating Seeds
  misc_feature: MA Experiment ID: 108463 Result: Down-regulated in Transcription
  misc_feature: MA Experiment 108463 PARAMETER Experiment Name: At_Germinating_Seeds_cDNA_P Parameter: Age (day) Value: 3 vs. 0
  misc_feature: MA Experiment 108463 PARAMETER Experiment Name: At_Germinating_Seeds_cDNA_P Parameter: Tissue Value: Germinating Seeds
  misc_feature: MA Experiment ID: 108464 Result: Down-regulated in Transcription
  misc_feature: MA Experiment 108464 PARAMETER Experiment Name: At_Germinating_Seeds_cDNA_P Parameter: Age (day) Value: 4 vs. 0
  misc_feature: MA Experiment 108464 PARAMETER Experiment Name: At_Germinating_Seeds_cDNA_P Parameter: Tissue Value: Germinating Seeds
  misc_feature: MA Experiment ID: 108488 Result: Down-regulated in Transcription
  misc_feature: MA Experiment ID: 108501 Result: Down-regulated in Transcription
  misc_feature: MA Experiment 108501 PARAMETER Experiment Name: At_ap2_floral_buds_cDNA_P Parameter: Plant Line Value: ap2 (Ler.)
  misc_feature: MA Experiment 108501 PARAMETER Experiment Name: At_ap2_floral_buds_cDNA_P Parameter: Tissue Value: Closed Flower
  misc_feature: MA Experiment ID: 108573 Result: Up-regulated in Transcription
  misc_feature: MA Experiment 108573 PARAMETER Experiment Name: At_Drought_cDNA_P Parameter: Timepoint (hr) Value: 6
  misc_feature: MA Experiment 108573 PARAMETER Experiment Name: At_Drought_cDNA_P Parameter: Tissue Value: Aerial
  misc_feature: MA Experiment 108573 PARAMETER Experiment Name: At_Drought_cDNA_P Parameter: Treatment Value: Drought vs. No Drought
  misc_feature: MA Experiment ID: 108605 Result: Up-regulated in Transcription
  misc_feature: MA Experiment 108605 PARAMETER Experiment Name: At_100uM_ABA_cDNA_P Parameter: Timepoint (hr) Value: 6
  misc_feature: MA Experiment 108605 PARAMETER Experiment Name: At_100uM_ABA_cDNA_P Parameter: Tissue Value: Aerial
  misc_feature: MA Experiment 108605 PARAMETER Experiment Name: At_100uM_ABA_cDNA_P Parameter: Treatment Value: 100uM ABA vs. No Treatment
  misc_feature: MA Experiment ID: 20000088 Result: Up-regulated in Transcription
  misc_feature: MA Experiment 20000088 PARAMETER Experiment Name: At_100uM_ABA_Mutants_cDNA_P Parameter: Plant Line Value: Landsberg
  misc_feature: MA Experiment 20000088 PARAMETER Experiment Name: At_100uM_ABA_Mutants_cDNA_P Parameter: Timepoint (hr) Value: 6
  misc_feature: MA Experiment 20000088 PARAMETER Experiment Name: At_100uM_ABA_Mutants_cDNA_P Parameter: Tissue Value: Aerial
  misc_feature: MA Experiment 20000088 PARAMETER Experiment Name: At_100uM_ABA_Mutants_cDNA_P Parameter: Treatment Value: 100uM ABA vs. No Treatment
  misc_feature: MA Experiment ID: 20000184 Result: Down-regulated in Transcription
  misc_feature: MA Experiment 20000184 PARAMETER Experiment Name: At_Shoots__P Parameter: Age (day) Value: 7
  misc_feature: MA Experiment 20000184 PARAMETER Experiment Name: At_Shoots__P Parameter: Tissue Value: Shoots vs. Whole Plant
  misc_feature: MA Experiment ID: 20000264 Result: Up-regulated in Transcription
  misc_feature: MA Experiment 20000264 PARAMETER Experiment Name: At_Open_Flower_P Parameter: Age (day) Value: 21
  misc_feature: MA Experiment 20000264 PARAMETER Experiment Name: At_Open_Flower_P Parameter: Plant Line Value: WS
  misc_feature: MA Experiment 20000264 PARAMETER Experiment Name: At_Open_Flower_P Parameter: Tissue Value: Open Flower vs. Whole Plant
  misc_feature: MA Experiment ID: 20000265 Result: Up-regulated in Transcription
  misc_feature: MA Experiment 20000265 PARAMETER Experiment Name: At_Open_Flower_P Parameter: Age (day) Value: 21
  misc_feature: MA Experiment 20000265 PARAMETER Experiment Name: At_Open_Flower_P Parameter: Plant Line Value: WS
  misc_feature: MA Experiment 20000265 PARAMETER Experiment Name: At_Open_Flower_P Parameter: Tissue Value: Closed Flower vs. Whole Plant
  misc_feature: MA Experiment ID: 20000286 Result: Up-regulated in Transcription
  misc_feature: MA Experiment 20000286 PARAMETER Experiment Name: At_Open_Flower_P Parameter: Age (day) Value: 21
  misc_feature: MA Experiment 20000286 PARAMETER Experiment Name: At_Open_Flower_P Parameter: Plant Line Value: WS
  misc_feature: MA Experiment 20000286 PARAMETER Experiment Name: At_Open_Flower_P Parameter: Tissue Value: Half Open vs. Whole Plant
  misc_feature: MA Experiment ID: 20000438 Result: Down-regulated in Transcription
  misc_feature: MA Experiment 20000438 PARAMETER Experiment Name: At_Shoots__P Parameter: Age (day) Value: 14
  misc_feature: MA Experiment 20000438 PARAMETER Experiment Name: At_Shoots__P Parameter: Tissue Value: Shoots vs. Whole Plant
  misc_feature: MA Experiment ID: 20000794 Result: Up-regulated in Transcription
  misc_feature: MA Experiment 20000794 PARAMETER Experiment Name: At_Petals_P Parameter: Age (day) Value: 23-25 days
  misc_feature: MA Experiment 20000794 PARAMETER Experiment Name: At_Petals_P Parameter: Plant Line Value: WS
  misc_feature: MA Experiment 20000794 PARAMETER Experiment Name: At_Petals_P Parameter: Tissue Value: Petals vs. Whole plant
  misc_feature: MA Experiment ID: 20001248 Result: Down-regulated in Transcription
  misc_feature: MA Experiment 20001248 PARAMETER Experiment Name: At_Far-red-induction_P Parameter: Age (day) Value: 7
  misc_feature: MA Experiment 20001248 PARAMETER Experiment Name: At_Far-red-induction_P Parameter: Light Value: Far-red vs. White
  misc_feature: MA Experiment 20001248 PARAMETER Experiment Name: At_Far-red-induction_P Parameter: Organism Value: A. thaliana
  misc_feature: MA Experiment 20001248 PARAMETER Experiment Name: At_Far-red-induction_P Parameter: Plant Line Value: Columbia
  misc_feature: MA Experiment 20001248 PARAMETER Experiment Name: At_Far-red-induction_P Parameter: Timepoint (hr) Value: 4
  misc_feature: MA Experiment 20001248 PARAMETER Experiment Name: At_Far-red-induction_P Parameter: Tissue Value: Whole Plant
  misc_feature: MA Experiment ID: 20001559 Result: Up-regulated in Transcription
  misc_feature: MA Experiment 20001559 PARAMETER Experiment Name: At_Drought_Soil_Dry_P Parameter: Age (day) Value: 28
  misc_feature: MA Experiment 20001559 PARAMETER Experiment Name: At_Drought_Soil_Dry_P Parameter: Organism Value: A. thaliana
  misc_feature: MA Experiment 20001559 PARAMETER Experiment Name: At_Drought_Soil_Dry_P Parameter: Plant Line Value: WS
  misc_feature: MA Experiment 20001559 PARAMETER Experiment Name: At_Drought_Soil_Dry_P Parameter: Post Timepoint (hr) Value: 29
  misc_feature: MA Experiment 20001559 PARAMETER Experiment Name: At_Drought_Soil_Dry_P Parameter: Post-Treatment Value: Re-Water vs. No Drought
  misc_feature: MA Experiment 20001559 PARAMETER Experiment Name: At_Drought_Soil_Dry_P Parameter: Timepoint (day) Value: 14
  misc_feature: MA Experiment 20001559 PARAMETER Experiment Name: At_Drought_Soil_Dry_P Parameter: Treatment Value: Drought vs. No Drought
  misc_feature: MA Experiment ID: 20001904 Result: Up-regulated in Transcription
  misc_feature: MA Experiment 20001904 PARAMETER Experiment Name: At_Drought_Reproduction_P Parameter: Age (day) Value: 37
  misc_feature: MA Experiment 20001904 PARAMETER Experiment Name: At_Drought_Reproduction_P Parameter: Organism Value: A. thaliana
  misc_feature: MA Experiment 20001904 PARAMETER Experiment Name: At_Drought_Reproduction_P Parameter: Plant Line Value: WS
  misc_feature: MA Experiment 20001904 PARAMETER Experiment Name: At_Drought_Reproduction_P Parameter: Timepoint (day) Value: 7
  misc_feature: MA Experiment 20001904 PARAMETER Experiment Name: At_Drought_Reproduction_P Parameter: Tissue Value: Rosettes
  misc_feature: MA Experiment 20001904 PARAMETER Experiment Name: At_Drought_Reproduction_P Parameter: Treatment Value: Drought vs. No Drought
  misc_feature: MA Experiment ID: 20001905 Result: Up-regulated in Transcription
  misc_feature: MA Experiment 20001905 PARAMETER Experiment Name: At_Drought_Reproduction_P Parameter: Age (day) Value: 40
  misc_feature: MA Experiment 20001905 PARAMETER Experiment Name: At_Drought_Reproduction_P Parameter: Organism Value: A. thaliana
  misc_feature: MA Experiment 20001905 PARAMETER Experiment Name: At_Drought_Reproduction_P Parameter: Plant Line Value: WS
  misc_feature: MA Experiment 20001905 PARAMETER Experiment Name: At_Drought_Reproduction_P Parameter: Timepoint (day) Value: 10
  misc_feature: MA Experiment 20001905 PARAMETER Experiment Name: At_Drought_Reproduction_P Parameter: Tissue Value: Rosettes
  misc_feature: MA Experiment 20001905 PARAMETER Experiment Name: At_Drought_Reproduction_P Parameter: Treatment Value: Drought vs. No Drought
  misc_feature: MA Experiment ID: 20001906 Result: Up-regulated in Transcription
  misc_feature: MA Experiment 20001906 PARAMETER Experiment Name: At_Drought_Reproduction_P Parameter: Age (day) Value: 35
  misc_feature: MA Experiment 20001906 PARAMETER Experiment Name: At_Drought_Reproduction_P Parameter: Organism Value: A. thaliana
  misc_feature: MA Experiment 20001906 PARAMETER Experiment Name: At_Drought_Reproduction_P Parameter: Plant Line Value: WS
  misc_feature: MA Experiment 20001906 PARAMETER Experiment Name: At_Drought_Reproduction_P Parameter: Timepoint (day) Value: 5
  misc_feature: MA Experiment 20001906 PARAMETER Experiment Name: At_Drought_Reproduction_P Parameter: Tissue Value: Siliques
  misc_feature: MA Experiment 20001906 PARAMETER Experiment Name: At_Drought_Reproduction_P Parameter: Treatment Value: Drought vs. No Drought
  misc_feature: MA Experiment ID: 20001908 Result: Up-regulated in Transcription
  misc_feature: MA Experiment 20001908 PARAMETER Experiment Name: At_Drought_Reproduction_P Parameter: Age (day) Value: 40
  misc_feature: MA Experiment 20001908 PARAMETER Experiment Name: At_Drought_Reproduction_P Parameter: Organism Value: A. thaliana
  misc_feature: MA Experiment 20001908 PARAMETER Experiment Name: At_Drought_Reproduction_P Parameter: Plant Line Value: WS
  misc_feature: MA Experiment 20001908 PARAMETER Experiment Name: At_Drought_Reproduction_P Parameter: Timepoint (day) Value: 10
  misc_feature: MA Experiment 20001908 PARAMETER Experiment Name: At_Drought_Reproduction_P Parameter: Tissue Value: Siliques
  misc_feature: MA Experiment 20001908 PARAMETER Experiment Name: At_Drought_Reproduction_P Parameter: Treatment Value: Drought vs. No Drought
gtaaataaaacaaaatgcttttaggatactaaataagtaactttttaatatttttgatccacgatttgtttagtagacaaacaaggcaactatataagtaacatcatcgtttcttcaatcccataacccaaaaattctctcacagaaaaccaaaaaaaaaatggactccaaaacaacttttctcacatttctcctctgtattttcattttctctcatttttcaccctcaacttccaaatctctgacagaaaagcccttatctttctcaccgtcggcgagtttgccgactctcacggcggagagacttatcaaaggattcaatttgatgcctacacgcgacgtcaatgtcatcgatgaagaaggttctgaggctccgagactggtcgagagagcattcgatttgccggcggcggttgaccgtcgtggctccggtggttctccgtcggttcaagattttggtcaccatgctggttactacaaactccctaactcaaaagcagcaaggatgttctactttttcttcgagtcaaggacgaacaaagccgatccagtggtgatttggctaaccggtggaccaggttgcagtagtgaactggctctgttctacgagaacggaccgttcaccgtctctaacaactcatctctttcttggaacgaatttggttgggacaaggcatcaaatctaatctacgtggaccaaccggtaggaactggtttcagttacacatcggaccaaagcgatcttcgtcatgacgaggatggtgtcagtaatgacctttatgacttcttacaggcgtttttcaaagagcatccacaatttgtgaagaatgatttttacattaccggtgaatcctacgctggacattacattccggcattggcttcacgtgttcaccgtggaaacaagaacaaagaaggaactcacattaaccttaagggttttgcgatcggtaacggtttaaccaacccggagattcaatatggtgcgtatgcggattacgcgctagacatgaatttaatcacacagtctgatcatgataacctcaaccgttattacgcaacttgtcaacaatctatcaaagaatgcagcgcggatggtggtgaaggggatgcgtgtgcttcttcttacactgtctgcaacaacattttccaaaagataatggatattgctggaaacgtaaactattatgacgtgaggaaacaatgtgaaggaagcttatgctatgatttctcgaacatggagaatttcttgaaccagaaatcggtgcggaaggcattaggtgtgggagatatcgagtttgtgtcttgcagtacagcggtctacgaagcaatgcagatggactggatgcggaatcttgaggtcgggattccagctcttcttcaagatggaattaagctccttgtttatgccggagaatacgatctcatctgcaattggctcggaaactcaaagtgggttcacgaaatggaatggtcaggccagaaagagtttgtagcagcagcgacagttccattccacgtagacaacaaagaagcgggtttaatgaagaactacggttcactcactttcctaaaggtccatgatgctggacacatggttccgatggatcagccaaaggcagcattgcaaatgcttcagaactggatgcaaggaaagctcagtacacccactggtcggaccgctcatcagtaaatccaaattccgaaccggctgaattattatgtatttaggagatcaatattttacttttaagaaaagctaaataacatatacttgtgaattatttctatcaatacacaggaaacttcattgttaatttctaaccatcatat

SEQ ID NO: 30708 - protein, 510 aa, Arabidopsis thaliana
  peptide (1)..(510): Ceres Seq. ID no. 13509855
  misc_feature (33)..(500): Homolog of NCBI NO: 115874 NR Description: Serine carboxypeptidase III precursor (CP-WIII)
  misc_feature (33)..(500): Homolog of NCBI NO: 82620 NR Description: carboxypeptidase C (EC 3.4.16.5) precursor - wheat
  misc_feature (25)..(505): Homolog of NCBI NO: 6960455 NR Description: serine carboxypeptidase precursor [Matricaria
  misc_feature (14)..(501): Homolog of NCBI NO: 21901929 NR Description: carboxypeptidase type III [Theobroma cacao]
  misc_feature (4)..(500): Homolog of NCBI NO: 15228281 NR Description: serine carboxypeptidase III, putative
  misc_feature (4)..(500): Homolog of NCBI NO: 166674 NR Description: carboxypeptidase Y-like protein
  misc_feature (11)..(501): Homolog of NCBI NO: 18447763 NR Description: putative serine carboxypeptidase precursor
  misc_feature (1)..(502): Homolog of NCBI NO: 15237178 NR Description: serine carboxypeptidase III, putative
  misc_feature (1)..(510): Homolog of NCBI NO: 16323071 NR Description: AT3g45010/F14D17_80 [Arabidopsis thaliana]
  misc_feature (1)..(510): Homolog of NCBI NO: 15230577 NR Description: serine carboxypeptidase III, putative
  misc_feature (33)..(500): Homolog of NCBI NO: 115874 NR Description: Serine carboxypeptidase III precursor (CP-WIII)
  misc_feature (33)..(500): Homolog of NCBI NO: 82620 NR Description: carboxypeptidase C (EC 3.4.16.5) precursor - wheat
  misc_feature (25)..(505): Homolog of NCBI NO: 6960455 NR Description: serine carboxypeptidase precursor [Matricaria
  misc_feature (14)..(501): Homolog of NCBI NO: 21901929 NR Description: carboxypeptidase type III [Theobroma cacao]
  misc_feature (4)..(500): Homolog of NCBI NO: 15228281 NR Description: serine carboxypeptidase III, putative
  misc_feature (4)..(500): Homolog of NCBI NO: 166674 NR Description: carboxypeptidase Y-like protein
  misc_feature (11)..(501): Homolog of NCBI NO: 18447763 NR Description: putative serine carboxypeptidase precursor
  misc_feature (1)..(502): Homolog of NCBI NO: 15237178 NR Description: serine carboxypeptidase III, putative
  misc_feature (1)..(510): Homolog of NCBI NO: 16323071 NR Description: AT3g45010/F14D17_80 [Arabidopsis thaliana]
  misc_feature (1)..(510): Homolog of NCBI NO: 15230577 NR Description: serine carboxypeptidase III, putative
  misc_feature (33)..(500): Homolog of NCBI NO: 115874 NR Description: Serine carboxypeptidase III precursor (CP-WIII)
  misc_feature (33)..(500): Homolog of NCBI NO: 82620 NR Description: carboxypeptidase C (EC 3.4.16.5) precursor - wheat
  misc_feature (25)..(505): Homolog of NCBI NO: 6960455 NR Description: serine carboxypeptidase precursor [Matricaria
  misc_feature (14)..(501): Homolog of NCBI NO: 21901929 NR Description: carboxypeptidase type III [Theobroma cacao]
  misc_feature (4)..(500): Homolog of NCBI NO: 15228281 NR Description: serine carboxypeptidase III, putative
  misc_feature (4)..(500): Homolog of NCBI NO: 166674 NR Description: carboxypeptidase Y-like protein
  misc_feature (11)..(501): Homolog of NCBI NO: 18447763 NR Description: putative serine carboxypeptidase precursor
  misc_feature (1)..(502): Homolog of NCBI NO: 15237178 NR Description: serine carboxypeptidase III, putative
  misc_feature (1)..(510): Homolog of NCBI NO: 16323071 NR Description: AT3g45010/F14D17_80 [Arabidopsis thaliana]
  misc_feature (1)..(510): Homolog of NCBI NO: 15230577 NR Description: serine carboxypeptidase III, putative
MDSKTTFLTFLLCIFIFSHFSPSTSKSLTEKPLSFSPSASLPTLTAERLIKGFNLMPTRDVNVIDEEGSEAPRLVERAFDLPAAVDRRGSGGSPSVQDFGHHAGYYKLPNSKAARMFYFFFESRTNKADPVVIWLTGGPGCSSELALFYENGPFTVSNNSSLSWNEFGWDKASNLIYVDQPVGTGFSYTSDQSDLRHDEDGVSNDLYDFLQAFFKEHPQFVKNDFYITGESYAGHYIPALASRVHRGNKNKEGTHINLKGFAIGNGLTNPEIQYGAYADYALDMNLITQSDHDNLNRYYATCQQSIKECSADGGEGDACASSYTVCNNIFQKIMDIAGNVNYYDVRKQCEGSLCYDFSNMENFLNQKSVRKALGVGDIEFVSCSTAVYEAMQMDWMRNLEVGIPALLQDGIKLLVYAGEYDLICNWLGNSKWVHEMEWSGQKEFVAAATVPFHVDNKEAGLMKNYGSLTFLKVHDAGHMVPMDQPKAALQMLQNWMQGKLSTPTGRTAHQ

SEQ ID NO: 30709 - protein, 455 aa, Arabidopsis thaliana
  peptide (1)..(455): Ceres Seq. ID no. 13509856
  misc_feature (1)..(445): Homolog of NCBI NO: 115874 NR Description: Serine carboxypeptidase III precursor (CP-WIII)
  misc_feature (1)..(445): Homolog of NCBI NO: 82620 NR Description: carboxypeptidase C (EC 3.4.16.5) precursor - wheat
  misc_feature (1)..(450): Homolog of NCBI NO: 6960455 NR Description: serine carboxypeptidase precursor [Matricaria
  misc_feature (1)..(446): Homolog of NCBI NO: 21901929 NR Description: carboxypeptidase type III [Theobroma cacao]
  misc_feature (1)..(445): Homolog of NCBI NO: 15228281 NR Description: serine carboxypeptidase III, putative
  misc_feature (1)..(445): Homolog of NCBI NO: 166674 NR Description: carboxypeptidase Y-like protein
  misc_feature (1)..(446): Homolog of NCBI NO: 18447763 NR Description: putative serine carboxypeptidase precursor
  misc_feature (1)..(447): Homolog of NCBI NO: 15237178 NR Description: serine carboxypeptidase III, putative
  misc_feature (1)..(455): Homolog of NCBI NO: 16323071 NR Description: AT3g45010/F14D17_80 [Arabidopsis thaliana]
  misc_feature (1)..(455): Homolog of NCBI NO: 15230577 NR Description: serine carboxypeptidase III, putative
  misc_feature (1)..(445): Homolog of NCBI NO: 115874 NR Description: Serine carboxypeptidase III precursor (CP-WIII)
  misc_feature (1)..(445): Homolog of NCBI NO: 82620 NR Description: carboxypeptidase C (EC 3.4.16.5) precursor - wheat
  misc_feature (1)..(450): Homolog of NCBI NO: 6960455 NR Description: serine carboxypeptidase precursor [Matricaria
  misc_feature (1)..(446): Homolog of NCBI NO: 21901929 NR Description: carboxypeptidase type III [Theobroma cacao]
  misc_feature (1)..(445): Homolog of NCBI NO: 15228281 NR Description: serine carboxypeptidase III, putative
  misc_feature (1)..(445): Homolog of NCBI NO: 166674 NR Description: carboxypeptidase Y-like protein
  misc_feature (1)..(446): Homolog of NCBI NO: 18447763 NR Description: putative serine carboxypeptidase precursor
  misc_feature (1)..(447): Homolog of NCBI NO: 15237178 NR Description: serine carboxypeptidase III, putative
  misc_feature (1)..(455): Homolog of NCBI NO: 16323071 NR Description: AT3g45010/F14D17_80 [Arabidopsis thaliana]
  misc_feature (1)..(455): Homolog of NCBI NO: 15230577 NR Description: serine carboxypeptidase III, putative
  misc_feature (1)..(445): Homolog of NCBI NO: 115874 NR Description: Serine carboxypeptidase III precursor (CP-WIII)
  misc_feature (1)..(445): Homolog of NCBI NO: 82620 NR Description: carboxypeptidase C (EC 3.4.16.5) precursor - wheat
  misc_feature (1)..(450): Homolog of NCBI NO: 6960455 NR Description: serine carboxypeptidase precursor [Matricaria
  misc_feature (1)..(446): Homolog of NCBI NO: 21901929 NR Description: carboxypeptidase type III [Theobroma cacao]
  misc_feature (1)..(445): Homolog of NCBI NO: 15228281 NR Description: serine carboxypeptidase III, putative
  misc_feature (1)..(445): Homolog of NCBI NO: 166674 NR Description: carboxypeptidase Y-like protein
  misc_feature (1)..(446): Homolog of NCBI NO: 18447763 NR Description: putative serine carboxypeptidase precursor
  misc_feature (1)..(447): Homolog of NCBI NO: 15237178 NR Description: serine carboxypeptidase III, putative
  misc_feature (1)..(455): Homolog of NCBI NO: 16323071 NR Description: AT3g45010/F14D17_80 [Arabidopsis thaliana]
  misc_feature (1)..(455): Homolog of NCBI NO: 15230577 NR Description: serine carboxypeptidase III, putative
MPTRDVNVIDEEGSEAPRLVERAFDLPAAVDRRGSGGSPSVQDFGHHAGYYKLPNSKAARMFYFFFESRTNKADPVVIWLTGGPGCSSELALFYENGPFTVSNNSSLSWNEFGWDKASNLIYVDQPVGTGFSYTSDQSDLRHDEDGVSNDLYDFLQAFFKEHPQFVKNDFYITGESYAGHYIPALASRVHRGNKNKEGTHINLKGFAIGNGLTNPEIQYGAYADYALDMNLITQSDHDNLNRYYATCQQSIKECSADGGEGDACASSYTVCNNIFQKIMDIAGNVNYYDVRKQCEGSLCYDFSNMENFLNQKSVRKALGVGDIEFVSCSTAVYEAMQMDWMRNLEVGIPALLQDGIKLLVYAGEYDLICNWLGNSKWVHEMEWSGQKEFVAAATVPFHVDNKEAGLMKNYGSLTFLKVHDAGHMVPMDQPKAALQMLQNWMQGKLSTPTGRTAHQ

SEQ ID NO: 30710 - protein, 395 aa, Arabidopsis thaliana
  peptide (1)..(395): Ceres Seq. ID no. 13509857
  misc_feature (1)..(385): Homolog of NCBI NO: 115874 NR Description: Serine carboxypeptidase III precursor (CP-WIII)
  misc_feature (1)..(385): Homolog of NCBI NO: 82620 NR Description: carboxypeptidase C (EC 3.4.16.5) precursor - wheat
  misc_feature (1)..(390): Homolog of NCBI NO: 6960455 NR Description: serine carboxypeptidase precursor [Matricaria
  misc_feature (1)..(386): Homolog of NCBI NO: 21901929 NR Description: carboxypeptidase type III [Theobroma cacao]
  misc_feature (1)..(385): Homolog of NCBI NO: 15228281 NR Description: serine carboxypeptidase III, putative
  misc_feature (1)..(385): Homolog of NCBI NO: 166674 NR Description: carboxypeptidase Y-like protein
  misc_feature (1)..(386): Homolog of NCBI NO: 18447763 NR Description: putative serine carboxypeptidase precursor
  misc_feature (1)..(387): Homolog of NCBI NO: 15237178 NR Description: serine carboxypeptidase III, putative
  misc_feature (1)..(395): Homolog of NCBI NO: 16323071 NR Description: AT3g45010/F14D17_80 [Arabidopsis thaliana]
  misc_feature (1)..(395): Homolog of NCBI NO: 15230577 NR Description: serine carboxypeptidase III, putative
  misc_feature (1)..(385): Homolog of NCBI NO: 115874 NR Description: Serine carboxypeptidase III precursor (CP-WIII)
  misc_feature (1)..(385): Homolog of NCBI NO: 82620 NR Description: carboxypeptidase C (EC 3.4.16.5) precursor - wheat
  misc_feature (1)..(390): Homolog of NCBI NO: 6960455 NR Description: serine carboxypeptidase precursor [Matricaria
  misc_feature (1)..(386): Homolog of NCBI NO: 21901929 NR Description: carboxypeptidase type III [Theobroma cacao]
  misc_feature (1)..(385): Homolog of NCBI NO: 15228281 NR Description: serine carboxypeptidase III, putative
  misc_feature (1)..(385): Homolog of NCBI NO: 166674 NR Description: carboxypeptidase Y-like protein
  misc_feature (1)..(386): Homolog of NCBI NO: 18447763 NR Description: putative serine carboxypeptidase precursor
  misc_feature (1)..(387): Homolog of NCBI NO: 15237178 NR Description: serine carboxypeptidase III, putative
  misc_feature (1)..(395): Homolog of NCBI NO: 16323071 NR Description: AT3g45010/F14D17_80 [Arabidopsis thaliana]
  misc_feature (1)..(395): Homolog of NCBI NO: 15230577 NR Description: serine carboxypeptidase III, putative
  misc_feature (1)..(385): Homolog of NCBI NO: 115874 NR Description: Serine carboxypeptidase III precursor (CP-WIII)
  misc_feature (1)..(385): Homolog of NCBI NO: 82620 NR Description: carboxypeptidase C (EC 3.4.16.5) precursor - wheat
  misc_feature (1)..(390): Homolog of NCBI NO: 6960455 NR Description: serine carboxypeptidase precursor [Matricaria
  misc_feature (1)..(386): Homolog of NCBI NO: 21901929 NR Description: carboxypeptidase type III [Theobroma cacao]
  misc_feature (1)..(385): Homolog of NCBI NO: 15228281 NR Description: serine carboxypeptidase III, putative
  misc_feature (1)..(385): Homolog of NCBI NO: 166674 NR Description: carboxypeptidase Y-like protein
  misc_feature (1)..(386): Homolog of NCBI NO: 18447763 NR Description: putative serine carboxypeptidase precursor
  misc_feature (1)..(387): Homolog of NCBI NO: 15237178 NR Description: serine carboxypeptidase III, putative
  misc_feature (1)..(395): Homolog of NCBI NO: 16323071 NR Description: AT3g45010/F14D17_80 [Arabidopsis thaliana]
  misc_feature (1)..(395): Homolog of NCBI NO: 15230577 NR Description: serine carboxypeptidase III, putative
MFYFFFESRTNKADPVVIWLTGGPGCSSELALFYENGPFTVSNNSSLSWNEFGWDKASNLIYVDQPVGTGFSYTSDQSDLRHDEDGVSNDLYDFLQAFFKEHPQFVKNDFYITGESYAGHYIPALASRVHRGNKNKEGTHINLKGFAIGNGLTNPEIQYGAYADYALDMNLITQSDHDNLNRYYATCQQSIKECSADGGEGDACASSYTVCNNIFQKIMDIAGNVNYYDVRKQCEGSLCYDFSNMENFLNQKSVRKALGVGDIEFVSCSTAVYEAMQMDWMRNLEVGIPALLQDGIKLLVYAGEYDLICNWLGNSKWVHEMEWSGQKEFVAAATVPFHVDNKEAGLMKNYGSLTFLKVHDAGHMVPMDQPKAALQMLQNWMQGKLSTPTGRTAHQ

SEQ ID NO: 30711 - DNA, 1221 bp, Arabidopsis thaliana
  misc_feature (1)..(1221): Ceres Seq. ID no. 13490421
  misc_feature: MA Experiment ID: 108488 Result: Down-regulated in Transcription
  misc_feature: MA Experiment ID: 108573 Result: Up-regulated in Transcription
  misc_feature: MA Experiment 108573 PARAMETER Experiment Name: At_Drought_cDNA_P Parameter: Timepoint (hr) Value: 6
  misc_feature: MA Experiment 108573 PARAMETER Experiment Name: At_Drought_cDNA_P Parameter: Tissue Value: Aerial
  misc_feature: MA Experiment 108573 PARAMETER Experiment Name: At_Drought_cDNA_P Parameter: Treatment Value: Drought vs. No Drought
  misc_feature: MA Experiment ID: 108585 Result: Up-regulated in Transcription
  misc_feature: MA Experiment 108585 PARAMETER Experiment Name: At_5mM_NaNP_cDNA_P Parameter: Timepoint (hr) Value: 6
  misc_feature: MA Experiment 108585 PARAMETER Experiment Name: At_5mM_NaNP_cDNA_P Parameter: Tissue Value: Aerial
  misc_feature: MA Experiment 108585 PARAMETER Experiment Name: At_5mM_NaNP_cDNA_P Parameter: Treatment Value: null
  misc_feature: MA Experiment ID: 108668 Result: Up-regulated in Transcription
  misc_feature: MA Experiment 108668 PARAMETER Experiment Name: At_2mM_SA_cDNA_P Parameter: Plant Line Value: WS
  misc_feature: MA Experiment 108668 PARAMETER Experiment Name: At_2mM_SA_cDNA_P Parameter: Timepoint (hr) Value: 6
  misc_feature: MA Experiment 108668 PARAMETER Experiment Name: At_2mM_SA_cDNA_P Parameter: Treatment Value: 2mM SA vs. No Treatment
  misc_feature: MA Experiment ID: 20000113 Result: Down-regulated in Transcription
  misc_feature: MA Experiment 20000113 PARAMETER Experiment Name: At_42deg_Heat_cDNA_P Parameter: Temperature (deg C) Value: 42 vs. 22
  misc_feature: MA Experiment 20000113 PARAMETER Experiment Name: At_42deg_Heat_cDNA_P Parameter: Timepoint (hr) Value: 8
  misc_feature: MA Experiment 20000113 PARAMETER Experiment Name: At_42deg_Heat_cDNA_P Parameter: Tissue Value: Aerial
  misc_feature: MA Experiment ID: 20000182 Result: Up-regulated in Transcription
  misc_feature: MA Experiment 20000182 PARAMETER Experiment Name: At_2mM_SA_P Parameter: Age (day) Value: 14
  misc_feature: MA Experiment 20000182 PARAMETER Experiment Name: At_2mM_SA_P Parameter: Organism Value: A. thaliana
  misc_feature: MA Experiment 20000182 PARAMETER Experiment Name: At_2mM_SA_P Parameter: Plant Line Value: WS
  misc_feature: MA Experiment 20000182 PARAMETER Experiment Name: At_2mM_SA_P Parameter: Timepoint (hr) Value: 6
  misc_feature: MA Experiment 20000182 PARAMETER Experiment Name: At_2mM_SA_P Parameter: Tissue Value: Aerial
  misc_feature: MA Experiment 20000182 PARAMETER Experiment Name: At_2mM_SA_P Parameter: Treatment Value: 2mM SA vs. No Treatment
  misc_feature: MA Experiment ID: 20000227 Result: Down-regulated in Transcription
  misc_feature: MA Experiment 20000227 PARAMETER Experiment Name: At_Root-Tips-vs-Tops_P Parameter: Tissue Value: Root Tips vs. Root Tops
  misc_feature: MA Experiment ID: 20000437 Result: Up-regulated in Transcription
  misc_feature: MA Experiment 20000437 PARAMETER Experiment Name: At_Drought_P Parameter: Age (day) Value: 8
  misc_feature: MA Experiment 20000437 PARAMETER Experiment Name: At_Drought_P Parameter: Organism Value: A. thaliana
  misc_feature: MA Experiment 20000437 PARAMETER Experiment Name: At_Drought_P Parameter: Plant Line Value: WS
  misc_feature: MA Experiment 20000437 PARAMETER Experiment Name: At_Drought_P Parameter: Timepoint (hr) Value: 24
  misc_feature: MA Experiment 20000437 PARAMETER Experiment Name: At_Drought_P Parameter: Tissue Value: Whole Plant
  misc_feature: MA Experiment 20000437 PARAMETER Experiment Name: At_Drought_P Parameter: Treatment Value: Drought vs. No Drought
gaaaaccagactaaagggcagaaacgtcatttgacaaaaagaaggatgattctctccttcctctttccccaatgcaaagaaaaagcattatagacttttcaagttttccgatataggcacgaaatcgctatttctctcttcgacgaagctttgataatttgatctcaatcgatcgattctattgagaatttgtgtacctgttttcttataaggttaactaaggattgtggaatcagaagtgttgtgtttttgtgatcggagattatggattggggaaacgtaacggttgatgatctcttcgatgctctccgagaagttgactggtcgtctccgccgcgtcctccgtctgagttcttctcaaggttcaccgttcctaaatctgtccctaaatgggatagtcgcctcaagtgcaatctctactactaccgaacaaactatttcatcatgatcgtcgttatacttggattgggagtccttacaaggcctttagcgatcttcgctgcgcttttgacagcattaagtttggcatttctaaatgacagctttgcaggttcttttagtgagaaggcgacacgaaccgtcagaagattctctccacagttagctgctaaaatgagacctcctttgacacctgtcactcgtgggcgtccatcatcaaagagagcaatccatgtatgtggtcaaccccgttgggtttttgtcttgacatgctcacttgtgagttttgctctttggtatatttcctctggtttgctcagagtctcggttgcgctactcattgcacatcttgcaacaattcttcatgcaagcttgagaacaccgaacttgaaggcacgttttaacacatttagggaggaattccgagcagtatggcgtaactacagcgagatttagagtaattctttggcagcttgtaccaccatgatcgtgttctgctgaggacataacgctgtaaagaccaaacttactgcctttctccaagataaacccggtttcgttaacactgtactatggatgttcaatctggatttgttgctcaatgactgggatcatctgttttttctttgatttgagatttgagctctgagctctttttgctagcaaaatcctctctttttttttttgctaaagacttgtaaagctagctttgttgttcttcgttctaacacaaaaccctttgtgtaaagtcctagaatcgtttaatagcttgcatttttttcc

SEQ ID NO: 30712 - protein, 209 aa, Arabidopsis thaliana
  peptide (1)..(209): Ceres Seq. ID no. 13490422
  misc_feature (1)..(175): Homolog of NCBI NO: 34908286 NR Description: P0005H10.15 [Oryza sativa (japonica
  misc_feature (1)..(209): Homolog of NCBI NO: 22330987 NR Description: CHP-rich zinc finger protein -related
  misc_feature (1)..(209): Homolog of NCBI NO: 18087519 NR Description: At3g11395 [Arabidopsis thaliana]
  misc_feature (1)..(209): Homolog of NCBI NO: 30681215 NR Description: prenylated rab acceptor (PRA1) family
  misc_feature (1)..(161): Homolog of NCBI NO: 15810043 NR Description: AT5g02040/T7H20_90 [Arabidopsis thaliana]
  misc_feature (1)..(209): Homolog of NCBI NO: 21553976 NR Description: unknown [Arabidopsis thaliana]
  misc_feature (1)..(209): Homolog of NCBI NO: 15241668 NR Description: expressed protein [Arabidopsis thaliana]
MDWGNVTVDDLFDALREVDWSSPPRPPSEFFSRFTVPKSVPKWDSRLKCNLYYYRTNYFIMIVVILGLGVLTRPLAIFAALLTALSLAFLNDSFAGSFSEKATRTVRRFSPQLAAKMRPPLTPVTRGRPSSKRAIHVCGQPRWVFVLTCSLVSFALWYISSGLLRVSVALLIAHLATILHASLRTPNLKARFNTFREEFRAVWRNYSEI

SEQ ID NO: 30713 - protein, 149 aa, Arabidopsis thaliana
  peptide (1)..(149): Ceres Seq. ID no. 13490423
  misc_feature (1)..(115): Homolog of NCBI NO: 34908286 NR Description: P0005H10.15 [Oryza sativa (japonica
  misc_feature (1)..(149): Homolog of NCBI NO: 22330987 NR Description: CHP-rich zinc finger protein -related
  misc_feature (1)..(149): Homolog of NCBI NO: 18087519 NR Description: At3g11395 [Arabidopsis thaliana]
  misc_feature (1)..(149): Homolog of NCBI NO: 30681215 NR Description: prenylated rab acceptor (PRA1) family
  misc_feature (1)..(101): Homolog of NCBI NO: 15810043 NR Description: AT5g02040/T7H20_90 [Arabidopsis thaliana]
  misc_feature (1)..(149): Homolog of NCBI NO: 21553976 NR Description: unknown [Arabidopsis thaliana]
  misc_feature (1)..(149): Homolog of NCBI NO: 15241668 NR Description: expressed protein [Arabidopsis thaliana]
MIVVILGLGVLTRPLAIFAALLTALSLAFLNDSFAGSFSEKATRTVRRFSPQLAAKMRPPLTPVTRGRPSSKRAIHVCGQPRWVFVLTCSLVSFALWYISSGLLRVSVALLIAHLATILHASLRTPNLKARFNTFREEFRAVWRNYSEI

SEQ ID NO: 30714 - DNA, 679 bp, Arabidopsis thaliana
  misc_feature (1)..(679): Ceres Seq. ID no. 12321380
  misc_feature: MA Experiment ID: 108434 Result: Up-regulated in Transcription
  misc_feature: MA Experiment 108434 PARAMETER Experiment Name: At_Root_Tips_cDNA_P Parameter: Tissue Value: Root Tips
  misc_feature: MA Experiment ID: 108462 Result: Down-regulated in Transcription
  misc_feature: MA Experiment 108462 PARAMETER Experiment Name: At_Germinating_Seeds_cDNA_P Parameter: Age (day) Value: 2 vs. 0
  misc_feature: MA Experiment 108462 PARAMETER Experiment Name: At_Germinating_Seeds_cDNA_P Parameter: Tissue Value: Germinating Seeds
  misc_feature: MA Experiment ID: 108463 Result: Down-regulated in Transcription
  misc_feature: MA Experiment 108463 PARAMETER Experiment Name: At_Germinating_Seeds_cDNA_P Parameter: Age (day) Value: 3 vs. 0
  misc_feature: MA Experiment 108463 PARAMETER Experiment Name: At_Germinating_Seeds_cDNA_P Parameter: Tissue Value: Germinating Seeds
  misc_feature: MA Experiment ID: 108464 Result: Down-regulated in Transcription
  misc_feature: MA Experiment 108464 PARAMETER Experiment Name: At_Germinating_Seeds_cDNA_P Parameter: Age (day) Value: 4 vs. 0
  misc_feature: MA Experiment 108464 PARAMETER Experiment Name: At_Germinating_Seeds_cDNA_P Parameter: Tissue Value: Germinating Seeds
  misc_feature: MA Experiment ID: 20000496 Result: Up-regulated in Transcription
  misc_feature: MA Experiment 20000496 PARAMETER Experiment Name: At_Guard_Cells_P Parameter: Harvest Date Value: 7/19/2002
  misc_feature: MA Experiment 20000496 PARAMETER Experiment Name: At_Guard_Cells_P Parameter: Organism Value: Canola
  misc_feature: MA Experiment 20000496 PARAMETER Experiment Name: At_Guard_Cells_P Parameter: Tissue Value: Guard Cells vs. Leaves
  misc_feature: MA Experiment ID: 20000794 Result: Down-regulated in Transcription
  misc_feature: MA Experiment 20000794 PARAMETER Experiment Name: At_Petals_P Parameter: Age (day) Value: 23-25 days
  misc_feature: MA Experiment 20000794 PARAMETER Experiment Name: At_Petals_P Parameter: Plant Line Value: WS
  misc_feature: MA Experiment 20000794 PARAMETER Experiment Name: At_Petals_P Parameter: Tissue Value: Petals vs. Whole plant
  misc_feature: MA Experiment ID: 20001557 Result: Up-regulated in Transcription
  misc_feature: MA Experiment 20001557 PARAMETER Experiment Name: At_Drought_Soil_Dry_P Parameter: Age (day) Value: 27
  misc_feature: MA Experiment 20001557 PARAMETER Experiment Name: At_Drought_Soil_Dry_P Parameter: Organism Value: A. thaliana
  misc_feature: MA Experiment 20001557 PARAMETER Experiment Name: At_Drought_Soil_Dry_P Parameter: Plant Line Value: WS
  misc_feature: MA Experiment 20001557 PARAMETER Experiment Name: At_Drought_Soil_Dry_P Parameter: Post Timepoint (hr) Value: 3
  misc_feature: MA Experiment 20001557 PARAMETER Experiment Name: At_Drought_Soil_Dry_P Parameter: Post-Treatment Value: Re-Water vs. No Drought
  misc_feature: MA Experiment 20001557 PARAMETER Experiment Name: At_Drought_Soil_Dry_P Parameter: Timepoint (day) Value: 13
  misc_feature: MA Experiment 20001557 PARAMETER Experiment Name: At_Drought_Soil_Dry_P Parameter: Treatment Value: Drought vs. No Drought
  misc_feature: MA Experiment ID: 20001558 Result: Up-regulated in Transcription
  misc_feature: MA Experiment 20001558 PARAMETER Experiment Name: At_Drought_Soil_Dry_P Parameter: Age (day) Value: 27
  misc_feature: MA Experiment 20001558 PARAMETER Experiment Name: At_Drought_Soil_Dry_P Parameter: Organism Value: A. thaliana
  misc_feature: MA Experiment 20001558 PARAMETER Experiment Name: At_Drought_Soil_Dry_P Parameter: Plant Line Value: WS
  misc_feature: MA Experiment 20001558 PARAMETER Experiment Name: At_Drought_Soil_Dry_P Parameter: Post Timepoint (hr) Value: 6
  misc_feature: MA Experiment 20001558 PARAMETER Experiment Name: At_Drought_Soil_Dry_P Parameter: Post-Treatment Value: Re-Water vs. No Drought
  misc_feature: MA Experiment 20001558 PARAMETER Experiment Name: At_Drought_Soil_Dry_P Parameter: Timepoint (day) Value: 13
  misc_feature: MA Experiment 20001558 PARAMETER Experiment Name: At_Drought_Soil_Dry_P Parameter: Treatment Value: Drought vs. No Drought
aattttatgggccttcaaattcagccgatcagaccaataaaagcttaacggattagagttttttgctcttctcatgtaatcaaatccctgcagaaaaaacacaaaaatcataaaaccctagcaatggcgacccaaccggcgaaagagtctgttcaatgtttcggaaggaagaagacggcaacagcagtcacctactgcaaacggggctcgggcatgattaagctcaacggttcgccgatcgagctttatcagccagagatcctccgattcaagatcttcgagccagtccttctcctcgggaaacaccgtttcgccggagttgacatgaggatccgtgccacgggcggtggtaacacatctcgggtctacgcaatccgtcagagtatcgctaaggccctcgttgcttactaccagaagtacgttgatgaacagtcgaagaaggagatcaaggacatcttgatgaggtacgataggactcttcttgttgcggatccgagaaggtgcgagtcgaagaagtttggtggtcctggtgctcgtgctcgtttccagaagagttaccgttagattctggtttgattttttgtttctgtatcaacgttttgggattatgatgttgaaattgtgagactttggtttctcttttgcgttttattttcaatggttattggataatgtttct

SEQ ID NO: 30715 - protein, 146 aa, Arabidopsis thaliana
  peptide (1)..(146): Ceres Seq. ID no. 12321381
  misc_feature (14)..(146): Pfam Name: Ribosomal protein S9/S16 Pfam Description: Ribosomal protein S9/S16
  misc_feature (5)..(146): Homolog of NCBI NO: 15294045 NR Description: 40S ribosomal protein S16 [Ictalurus punctatus]
  misc_feature (1)..(146): Homolog of NCBI NO: 4506691 NR Description: ribosomal protein S16; 40S ribosomal protein S16
  misc_feature (1)..(146): Homolog of NCBI NO: 39850096 NR Description: Unknown (protein for IMAGE:6887619) [Rattus
  misc_feature (6)..(146): Homolog of NCBI NO: 17369864 NR Description: 40S ribosomal protein S16
  misc_feature (4)..(146): Homolog of NCBI NO: 1173209 NR Description: 40S RIBOSOMAL PROTEIN S16
  misc_feature (2)..(146): Homolog of NCBI NO: 6984222 NR Description: 40S ribosomal protein S16 [Euphorbia esula]
  misc_feature (1)..(146): Homolog of NCBI NO: 3122800 NR Description: 40S RIBOSOMAL PROTEIN S16
  misc_feature (1)..(146): Homolog of NCBI NO: 15226676 NR Description: 40S ribosomal protein S16
  misc_feature (1)..(146): Homolog of NCBI NO: 15238809 NR Description: 40S RIBOSOMAL PROTEIN S16
  misc_feature (1)..(146): Homolog of NCBI NO: 15229252 NR Description: putative 40S ribosomal protein S16; protein id:
MATQPAKESVQCFGRKKTATAVTYCKRGSGMIKLNGSPIELYQPEILRFKIFEPVLLLGKHRFAGVDMRIRATGGGNTSRVYAIRQSIAKALVAYYQKYVDEQSKKEIKDILMRYDRTLLVADPRRCESKKFGGPGARARFQKSYR

SEQ ID NO: 30716 - protein, 116 aa, Arabidopsis thaliana
  peptide (1)..(116): Ceres Seq. ID no. 12321382
  misc_feature (1)..(116): Pfam Name: Ribosomal protein S9/S16 Pfam Description: Ribosomal protein S9/S16
  misc_feature (1)..(116): Homolog of NCBI NO: 15294045 NR Description: 40S ribosomal protein S16 [Ictalurus punctatus]
  misc_feature (1)..(116): Homolog of NCBI NO: 4506691 NR Description: ribosomal protein S16; 40S ribosomal protein S16
  misc_feature (1)..(116): Homolog of NCBI NO: 39850096 NR Description: Unknown (protein for IMAGE:6887619) [Rattus
  misc_feature (1)..(116): Homolog of NCBI NO: 17369864 NR Description: 40S ribosomal protein S16
  misc_feature (1)..(116): Homolog of NCBI NO: 1173209 NR Description: 40S RIBOSOMAL PROTEIN S16
  misc_feature (1)..(116): Homolog of NCBI NO: 6984222 NR Description: 40S ribosomal protein S16 [Euphorbia esula]
  misc_feature (1)..(116): Homolog of NCBI NO: 3122800 NR Description: 40S RIBOSOMAL PROTEIN S16
  misc_feature (1)..(116): Homolog of NCBI NO: 15226676 NR Description: 40S ribosomal protein S16
  misc_feature (1)..(116): Homolog of NCBI NO: 15238809 NR Description: 40S RIBOSOMAL PROTEIN S16
  misc_feature (1)..(116): Homolog of NCBI NO: 15229252 NR Description: putative 40S ribosomal protein S16; protein id:
MIKLNGSPIELYQPEILRFKIFEPVLLLGKHRFAGVDMRIRATGGGNTSRVYAIRQSIAKALVAYYQKYVDEQSKKEIKDILMRYDRTLLVADPRRCESKKFGGPGARARFQKSYR

SEQ ID NO: 30717 - protein, 79 aa, Arabidopsis thaliana
  peptide (1)..(79): Ceres Seq. ID no. 12321383
  misc_feature (1)..(79): Pfam Name: Ribosomal protein S9/S16 Pfam Description: Ribosomal protein S9/S16
  misc_feature (1)..(79): Homolog of NCBI NO: 15294045 NR Description: 40S ribosomal protein S16 [Ictalurus punctatus]
  misc_feature (1)..(79): Homolog of NCBI NO: 4506691 NR Description: ribosomal protein S16; 40S ribosomal protein S16
  misc_feature (1)..(79): Homolog of NCBI NO: 39850096 NR Description: Unknown (protein for IMAGE:6887619) [Rattus
  misc_feature (1)..(79): Homolog of NCBI NO: 17369864 NR Description: 40S ribosomal protein S16
  misc_feature (1)..(79): Homolog of NCBI NO: 1173209 NR Description: 40S RIBOSOMAL PROTEIN S16
  misc_feature (1)..(79): Homolog of NCBI NO: 6984222 NR Description: 40S ribosomal protein S16 [Euphorbia esula]
  misc_feature (1)..(79): Homolog of NCBI NO: 3122800 NR Description: 40S RIBOSOMAL PROTEIN S16
  misc_feature (1)..(79): Homolog of NCBI NO: 15226676 NR Description: 40S ribosomal protein S16
  misc_feature (1)..(79): Homolog of NCBI NO: 15238809 NR Description: 40S RIBOSOMAL PROTEIN S16
  misc_feature (1)..(79): Homolog of NCBI NO: 15229252 NR Description: putative 40S ribosomal protein S16; protein id:
MRIRATGGGNTSRVYAIRQSIAKALVAYYQKYVDEQSKKEIKDILMRYDRTLLVADPRRCESKKFGGPGARARFQKSYR

SEQ ID NO: 30718 - DNA, 738 bp, Arabidopsis thaliana
  misc_feature (1)..(738): Ceres Seq. ID no. 12326890
  misc_feature: MA Experiment ID: 108434 Result: Down-regulated in Transcription
  misc_feature: MA Experiment 108434 PARAMETER Experiment Name: At_Root_Tips_cDNA_P Parameter: Tissue Value: Root Tips
  misc_feature: MA Experiment ID: 108461 Result: Up-regulated in Transcription
  misc_feature: MA Experiment 108461 PARAMETER Experiment Name: At_Germinating_Seeds_cDNA_P Parameter: Age (day) Value: 1 vs. 0
  misc_feature: MA Experiment 108461 PARAMETER Experiment Name: At_Germinating_Seeds_cDNA_P Parameter: Tissue Value: Germinating Seeds
  misc_feature: MA Experiment ID: 108462 Result: Up-regulated in Transcription
  misc_feature: MA Experiment 108462 PARAMETER Experiment Name: At_Germinating_Seeds_cDNA_P Parameter: Age (day) Value: 2 vs. 0
  misc_feature: MA Experiment 108462 PARAMETER Experiment Name: At_Germinating_Seeds_cDNA_P Parameter: Tissue Value: Germinating Seeds
  misc_feature: MA Experiment ID: 20000117 Result: Down-regulated in Transcription
  misc_feature: MA Experiment 20000117 PARAMETER Experiment Name: At_100uM_ABA_Mutants_cDNA_P Parameter: Plant Line Value: Columbia
  misc_feature: MA Experiment 20000117 PARAMETER Experiment Name: At_100uM_ABA_Mutants_cDNA_P Parameter: Timepoint (hr) Value: 6
  misc_feature: MA Experiment 20000117 PARAMETER Experiment Name: At_100uM_ABA_Mutants_cDNA_P Parameter: Tissue Value: Aerial
  misc_feature: MA Experiment 20000117 PARAMETER Experiment Name: At_100uM_ABA_Mutants_cDNA_P Parameter: Treatment Value: 100uM ABA vs. No Treatment
  misc_feature: MA Experiment ID: 20000179 Result: Up-regulated in Transcription
  misc_feature: MA Experiment 20000179 PARAMETER Experiment Name: At_Germinating_Seeds_P Parameter: Age (hr) Value: 6 vs. 0
  misc_feature: MA Experiment 20000179 PARAMETER Experiment Name: At_Germinating_Seeds_P Parameter: Tissue Value: Germinating Seeds
  misc_feature: MA Experiment ID: 20000180 Result: Up-regulated in Transcription
  misc_feature: MA Experiment 20000180 PARAMETER Experiment Name: At_Germinating_Seeds_P Parameter: Age (hr) Value: 24 vs. 0
  misc_feature: MA Experiment 20000180 PARAMETER Experiment Name: At_Germinating_Seeds_P Parameter: Tissue Value: Germinating Seeds
  misc_feature: MA Experiment ID: 20000185 Result: Up-regulated in Transcription
  misc_feature: MA Experiment 20000185 PARAMETER Experiment Name: At_Roots__P Parameter: Age (day) Value: 7 vs. 21
  misc_feature: MA Experiment 20000185 PARAMETER Experiment Name: At_Roots__P Parameter: Organism Value: A. thaliana
  misc_feature: MA Experiment 20000185 PARAMETER Experiment Name: At_Roots__P Parameter: Tissue Value: Roots vs. Whole Plant
  misc_feature: MA Experiment ID: 20000224 Result: Down-regulated in Transcription
  misc_feature: MA Experiment ID: 20000234 Result: Up-regulated in Transcription
  misc_feature: MA Experiment 20000234 PARAMETER Experiment Name: At_Siliques_P Parameter: Age (day) Value: 21
  misc_feature: MA Experiment 20000234 PARAMETER Experiment Name: At_Siliques_P Parameter: Organism Value: A. thaliana
  misc_feature: MA Experiment 20000234 PARAMETER Experiment Name: At_Siliques_P Parameter: Plant Line Value: WS
  misc_feature: MA Experiment 20000234 PARAMETER Experiment Name: At_Siliques_P Parameter: Tissue Value: Less Than 5mm Siliques vs. Whole Plant
  misc_feature: MA Experiment ID: 20000235 Result: Up-regulated in Transcription
  misc_feature: MA Experiment 20000235 PARAMETER Experiment Name: At_Siliques_P Parameter: Age (day) Value: 21
  misc_feature: MA Experiment 20000235 PARAMETER Experiment Name: At_Siliques_P Parameter: Organism Value: A. thaliana
  misc_feature: MA Experiment 20000235 PARAMETER Experiment Name: At_Siliques_P Parameter: Plant Line Value: WS
  misc_feature: MA Experiment 20000235 PARAMETER Experiment Name: At_Siliques_P Parameter: Tissue Value: 5-10mm Siliques vs. Whole Plant
  misc_feature: MA Experiment ID: 20000439 Result: Up-regulated in Transcription
  misc_feature: MA Experiment 20000439 PARAMETER Experiment Name: At_Roots__P Parameter: Age (day) Value: 14 vs. 21
  misc_feature: MA Experiment 20000439 PARAMETER Experiment Name: At_Roots__P Parameter: Organism Value: A. thaliana
  misc_feature: MA Experiment 20000439 PARAMETER Experiment Name: At_Roots__P Parameter: Tissue Value: Roots vs. Whole Plant
  misc_feature: MA Experiment ID: 20001555 Result: Down-regulated in Transcription
  misc_feature: MA Experiment 20001555 PARAMETER Experiment Name: At_Drought_Soil_Dry_P Parameter: Age (day) Value: 24
  misc_feature: MA Experiment 20001555 PARAMETER Experiment Name: At_Drought_Soil_Dry_P Parameter: Organism Value: A. thaliana
  misc_feature: MA Experiment 20001555 PARAMETER Experiment Name: At_Drought_Soil_Dry_P Parameter: Plant Line Value: WS
  misc_feature: MA Experiment 20001555 PARAMETER Experiment Name: At_Drought_Soil_Dry_P Parameter: Post Timepoint (hr) Value: None
  misc_feature: MA Experiment 20001555 PARAMETER Experiment Name: At_Drought_Soil_Dry_P Parameter: Post-Treatment Value: None
  misc_feature: MA Experiment 20001555 PARAMETER Experiment Name: At_Drought_Soil_Dry_P Parameter: Timepoint (day) Value: 10
  misc_feature: MA Experiment 20001555 PARAMETER Experiment Name: At_Drought_Soil_Dry_P Parameter: Treatment Value: Drought vs. No Drought
  misc_feature: MA Experiment ID: 20001556 Result: Down-regulated in Transcription
  misc_feature: MA Experiment 20001556 PARAMETER Experiment Name: At_Drought_Soil_Dry_P Parameter: Age (day) Value: 26
  misc_feature: MA Experiment 20001556 PARAMETER Experiment Name: At_Drought_Soil_Dry_P Parameter: Organism Value: A. thaliana
  misc_feature: MA Experiment 20001556 PARAMETER Experiment Name: At_Drought_Soil_Dry_P Parameter: Plant Line Value: WS
  misc_feature: MA Experiment 20001556 PARAMETER Experiment Name: At_Drought_Soil_Dry_P Parameter: Post Timepoint (hr) Value: None
  misc_feature: MA Experiment 20001556 PARAMETER Experiment Name: At_Drought_Soil_Dry_P Parameter: Post-Treatment Value: None
  misc_feature: MA Experiment 20001556 PARAMETER Experiment Name: At_Drought_Soil_Dry_P Parameter: Timepoint (day) Value: 12
  misc_feature: MA Experiment 20001556 PARAMETER Experiment Name: At_Drought_Soil_Dry_P Parameter: Treatment Value: Drought vs. No Drought
  misc_feature: MA Experiment ID: 20001560 Result: Up-regulated in Transcription
  misc_feature: MA Experiment 20001560 PARAMETER Experiment Name: At_Drought_Soil_Dry_P Parameter: Age (day) Value: 28
  misc_feature: MA Experiment 20001560 PARAMETER Experiment Name: At_Drought_Soil_Dry_P Parameter: Organism Value: A. thaliana
  misc_feature: MA Experiment 20001560 PARAMETER Experiment Name: At_Drought_Soil_Dry_P Parameter: Plant Line Value: WS
  misc_feature: MA Experiment 20001560 PARAMETER Experiment Name: At_Drought_Soil_Dry_P Parameter: Post Timepoint (hr) Value: None
  misc_feature: MA Experiment 20001560 PARAMETER Experiment Name: At_Drought_Soil_Dry_P Parameter: Post-Treatment Value: None
  misc_feature: MA Experiment 20001560 PARAMETER Experiment Name: At_Drought_Soil_Dry_P Parameter: Timepoint (day) Value: 14
  misc_feature: MA Experiment 20001560 PARAMETER Experiment Name: At_Drought_Soil_Dry_P Parameter: Treatment Value: Drought vs. No Drought
atcgaacaaatcagacaaaagcctcgcatctctctctcttgggatctgaatcttcaaattgaaaacaaaaagatcacaagagaaaaaaacaaaaaaaaatgcctcatggaactcttgaagttgttcttgtcagcgccaaaggtctcgaggacgcagattttctgaataacatggatccttatgtgcaactcacttgtcggactcaagatcagaagagcaacgttgcagaaggaatggggacaactccggaatggaatgagacatttatcttcactgtctctgaaggaactacagagttaaaagcgaaaatcttcgacaaagatgtcggtacagaggatgatgcggttggtgaagcaactattccgttggagccggttttcgtggaaggaagtattccaccaactgcatacaatgtggtgaaagatgaagagtacaaaggagagatttgggtggctctctccttcaagccctcggaaaaccgaagcaggggtatggacgaggagtcctatgggggctggaaaaactctgaagcatcatactaagagaagaaaccattgtgtgtcactgtttgatttgagtcttgggaacaaaatgttgagttttcatttgaaagcgtattttttgttcagattgtttttaatgatttcataaactcgtgagatttttgattcttcttttctagaacttgttttggtaatgtttctctgtggttgttttctgagttgggcgagaagaagt

SEQ ID NO: 30719 - protein, 147 aa, Arabidopsis thaliana
  peptide (1)..(147): Ceres Seq. ID no. 12326891
  misc_feature (6)..(87): Pfam Name: C2 domain Pfam Description: C2 domain
  misc_feature (4)..(143): Homolog of NCBI NO: 21998841 NR Description: RPP17-1 [Oryza sativa (japonica cultivar-group)]
  misc_feature (4)..(143): Homolog of NCBI NO: 7489474 NR Description: FIERG2 protein - rice
  misc_feature (1)..(144): Homolog of NCBI NO: 15233278 NR Description: elicitor responsive/phloem -like protein; protein
  misc_feature (1)..(147): Homolog of NCBI NO: 3860331 NR Description: hypothetical protein [Cicer arietinum]
  misc_feature (1)..(128): Homolog of NCBI NO: 5565983 NR Description: unknown [Zea mays]
  misc_feature (1)..(140): Homolog of NCBI NO: 7489756 NR Description: hypothetical protein - maize
  misc_feature (1)..(140): Homolog of NCBI NO: 38345558 NR Description: OSJNBa0032F06.15 [Oryza sativa (japonica
  misc_feature (1)..(143): Homolog of NCBI NO: 11358958 NR Description: elicitor-responsive gene 3 [imported] - rice
  misc_feature (1)..(147): Homolog of NCBI NO: 21553977 NR Description: putative elicitor-responsive gene [Arabidopsis
  misc_feature (1)..(147): Homolog of NCBI NO: 15221718 NR Description: putative elicitor-responsive gene
MPHGTLEVVLVSAKGLEDADFLNNMDPYVQLTCRTQDQKSNVAEGMGTTPEWNETFIFTVSEGTTELKAKIFDKDVGTEDDAVGEATIPLEPVFVEGSIPPTAYNVVKDEEYKGEIWVALSFKPSENRSRGMDEESYGGWKNSEASY

SEQ ID NO: 30720 - protein, 123 aa, Arabidopsis thaliana
  peptide (1)..(123): Ceres Seq. ID no. 12326892
  misc_feature (1)..(63): Pfam Name: C2 domain Pfam Description: C2 domain
  misc_feature (1)..(119): Homolog of NCBI NO: 21998841 NR Description: RPP17-1 [Oryza sativa (japonica cultivar-group)]
  misc_feature (1)..(119): Homolog of NCBI NO: 7489474 NR Description: FIERG2 protein - rice
  misc_feature (1)..(120): Homolog of NCBI NO: 15233278 NR Description: elicitor responsive/phloem -like protein; protein
  misc_feature (1)..(123): Homolog of NCBI NO: 3860331 NR Description: hypothetical protein [Cicer arietinum]
  misc_feature (1)..(104): Homolog of NCBI NO: 5565983 NR Description: unknown [Zea mays]
  misc_feature (1)..(116): Homolog of NCBI NO: 7489756 NR Description: hypothetical protein - maize
  misc_feature (1)..(116): Homolog of NCBI NO: 38345558 NR Description: OSJNBa0032F06.15 [Oryza sativa (japonica
  misc_feature (1)..(119): Homolog of NCBI NO: 11358958 NR Description: elicitor-responsive gene 3 [imported] - rice
  misc_feature (1)..(123): Homolog of NCBI NO: 21553977 NR Description: putative elicitor-responsive gene [Arabidopsis
  misc_feature (1)..(123): Homolog of NCBI NO: 15221718 NR Description: putative elicitor-responsive gene
MDPYVQLTCRTQDQKSNVAEGMGTTPEWNETFIFTVSEGTTELKAKIFDKDVGTEDDAVGEATIPLEPVFVEGSIPPTAYNVVKDEEYKGEIWVALSFKPSENRSRGMDEESYGGWKNSEASY

SEQ ID NO: 30721 - protein, 102 aa, Arabidopsis thaliana; identical to SEQ ID NO: 29920
  peptide (1)..(102): Ceres Seq. ID no. 12326893
  misc_feature (1)..(98): Homolog of NCBI NO: 21998841 NR Description: RPP17-1 [Oryza sativa (japonica cultivar-group)]
  misc_feature (1)..(98): Homolog of NCBI NO: 7489474 NR Description: FIERG2 protein - rice
  misc_feature (1)..(99): Homolog of NCBI NO: 15233278 NR Description: elicitor responsive/phloem -like protein; protein
  misc_feature (1)..(102): Homolog of NCBI NO: 3860331 NR Description: hypothetical protein [Cicer arietinum]
  misc_feature (1)..(83): Homolog of NCBI NO: 5565983 NR Description: unknown [Zea mays]
  misc_feature (1)..(95): Homolog of NCBI NO: 7489756 NR Description: hypothetical protein - maize
  misc_feature (1)..(95): Homolog of NCBI NO: 38345558 NR Description: OSJNBa0032F06.15 [Oryza sativa (japonica
  misc_feature (1)..(98): Homolog of NCBI NO: 11358958 NR Description: elicitor-responsive gene 3 [imported] - rice
  misc_feature (1)..(102): Homolog of NCBI NO: 21553977 NR Description: putative elicitor-responsive gene [Arabidopsis
  misc_feature (1)..(102): Homolog of NCBI NO: 15221718 NR Description: putative elicitor-responsive gene

SEQ ID NO: 30722 - DNA, 1680 bp, Arabidopsis thaliana
  misc_feature (1)..(1680): Ceres Seq. ID no. 12343531
  misc_feature: MA Experiment ID: 108434 Result: Down-regulated in Transcription
  misc_feature: MA Experiment 108434 PARAMETER Experiment Name: At_Root_Tips_cDNA_P Parameter: Tissue Value: Root Tips
  misc_feature: MA Experiment ID: 108464 Result: Up-regulated in Transcription
  misc_feature: MA Experiment 108464 PARAMETER Experiment Name: At_Germinating_Seeds_cDNA_P Parameter: Age (day) Value: 4 vs. 0
  misc_feature: MA Experiment 108464 PARAMETER Experiment Name: At_Germinating_Seeds_cDNA_P Parameter: Tissue Value: Germinating Seeds
  misc_feature: MA Experiment ID: 108501 Result: Down-regulated in Transcription
  misc_feature: MA Experiment 108501 PARAMETER Experiment Name: At_ap2_floral_buds_cDNA_P Parameter: Plant Line Value: ap2 (Ler.)
  misc_feature: MA Experiment 108501 PARAMETER Experiment Name: At_ap2_floral_buds_cDNA_P Parameter: Tissue Value: Closed Flower
  misc_feature: MA Experiment ID: 20000070 Result: Down-regulated in Transcription
  misc_feature: MA Experiment 20000070 PARAMETER Experiment Name: At_100uM_ABA_Mutants_cDNA_P Parameter: Plant Line Value: CS24
  misc_feature: MA Experiment 20000070 PARAMETER Experiment Name: At_100uM_ABA_Mutants_cDNA_P Parameter: Timepoint (hr) Value: 6
  misc_feature: MA Experiment 20000070 PARAMETER Experiment Name: At_100uM_ABA_Mutants_cDNA_P Parameter: Tissue Value: Aerial
  misc_feature: MA Experiment 20000070 PARAMETER Experiment Name: At_100uM_ABA_Mutants_cDNA_P Parameter: Treatment Value: 100uM ABA vs. No Treatment
  misc_feature: MA Experiment ID: 20000071 Result: Down-regulated in Transcription
  misc_feature: MA Experiment 20000071 PARAMETER Experiment Name: At_100uM_ABA_Mutants_cDNA_P Parameter: Plant Line Value: CS8104
  misc_feature: MA Experiment 20000071 PARAMETER Experiment Name: At_100uM_ABA_Mutants_cDNA_P Parameter: Timepoint (hr) Value: 6
  misc_feature: MA Experiment 20000071 PARAMETER Experiment Name: At_100uM_ABA_Mutants_cDNA_P Parameter: Tissue Value: Aerial
  misc_feature: MA Experiment 20000071 PARAMETER Experiment Name: At_100uM_ABA_Mutants_cDNA_P Parameter: Treatment Value: 100uM ABA vs. No Treatment
  misc_feature: MA Experiment ID: 20000087 Result: Down-regulated in Transcription
  misc_feature: MA Experiment 20000087 PARAMETER Experiment Name: At_100uM_ABA_Mutants_cDNA_P Parameter: Plant Line Value: WS
  misc_feature: MA Experiment 20000087 PARAMETER Experiment Name: At_100uM_ABA_Mutants_cDNA_P Parameter: Timepoint (hr) Value: 6
  misc_feature: MA Experiment 20000087 PARAMETER Experiment Name: At_100uM_ABA_Mutants_cDNA_P Parameter: Tissue Value: Aerial
  misc_feature: MA Experiment 20000087 PARAMETER Experiment Name: At_100uM_ABA_Mutants_cDNA_P Parameter: Treatment Value: 100uM ABA vs. No Treatment
  misc_feature: MA Experiment ID: 20000089 Result: Down-regulated in Transcription
  misc_feature: MA Experiment ID: 20000090 Result: Down-regulated in Transcription
  misc_feature: MA Experiment ID: 20000117 Result: Down-regulated in Transcription
  misc_feature: MA Experiment 20000117 PARAMETER Experiment Name: At_100uM_ABA_Mutants_cDNA_P Parameter: Plant Line Value: Columbia
  misc_feature: MA Experiment 20000117 PARAMETER Experiment Name: At_100uM_ABA_Mutants_cDNA_P Parameter: Timepoint (hr) Value: 6
  misc_feature: MA Experiment 20000117 PARAMETER Experiment Name: At_100uM_ABA_Mutants_cDNA_P Parameter: Tissue Value: Aerial
  misc_feature: MA Experiment 20000117 PARAMETER Experiment Name: At_100uM_ABA_Mutants_cDNA_P Parameter: Treatment Value: 100uM ABA vs. No Treatment
  misc_feature: MA Experiment ID: 20000180 Result: Up-regulated in Transcription
  misc_feature: MA Experiment 20000180 PARAMETER Experiment Name: At_Germinating_Seeds_P Parameter: Age (hr) Value: 24 vs. 0
  misc_feature: MA Experiment 20000180 PARAMETER Experiment Name: At_Germinating_Seeds_P Parameter: Tissue Value: Germinating Seeds
  misc_feature: MA Experiment ID: 20000184 Result: Down-regulated in Transcription
  misc_feature: MA Experiment 20000184 PARAMETER Experiment Name: At_Shoots__P Parameter: Age (day) Value: 7
  misc_feature: MA Experiment 20000184 PARAMETER Experiment Name: At_Shoots__P Parameter: Tissue Value: Shoots vs. Whole Plant
  misc_feature: MA Experiment ID: 20000227 Result: Down-regulated in Transcription
  misc_feature: MA Experiment 20000227 PARAMETER Experiment Name: At_Root-Tips-vs-Tops_P Parameter: Tissue Value: Root Tips vs. Root Tops
  misc_feature: MA Experiment ID: 20000234 Result: Down-regulated in Transcription
  misc_feature: MA Experiment 20000234 PARAMETER Experiment Name: At_Siliques_P Parameter: Age (day) Value: 21
  misc_feature: MA Experiment 20000234 PARAMETER Experiment Name: At_Siliques_P Parameter: Organism Value: A. thaliana
  misc_feature: MA Experiment 20000234 PARAMETER Experiment Name: At_Siliques_P Parameter: Plant Line Value: WS
  misc_feature: MA Experiment 20000234 PARAMETER Experiment Name: At_Siliques_P Parameter: Tissue Value: Less Than 5mm Siliques vs. Whole Plant
  misc_feature: MA Experiment ID: 20000437 Result: Down-regulated in Transcription
  misc_feature: MA Experiment 20000437 PARAMETER Experiment Name: At_Drought_P Parameter: Age (day) Value: 8
  misc_feature: MA Experiment 20000437 PARAMETER Experiment Name: At_Drought_P Parameter: Organism Value: A. thaliana
  misc_feature: MA Experiment 20000437 PARAMETER Experiment Name: At_Drought_P Parameter: Plant Line Value: WS
  misc_feature: MA Experiment 20000437 PARAMETER Experiment Name: At_Drought_P Parameter: Timepoint (hr) Value: 24
  misc_feature: MA Experiment 20000437 PARAMETER Experiment Name: At_Drought_P Parameter: Tissue Value: Whole Plant
  misc_feature: MA Experiment 20000437 PARAMETER Experiment Name: At_Drought_P Parameter: Treatment Value: Drought vs. No Drought
  misc_feature: MA Experiment ID: 20000452 Result: Up-regulated in Transcription
  misc_feature: MA Experiment 20000452 PARAMETER Experiment Name: At_CS6879_Shoots-Roots_P Parameter: Age (day) Value: 14
  misc_feature: MA Experiment 20000452 PARAMETER Experiment Name: At_CS6879_Shoots-Roots_P Parameter: Organism Value: A. thaliana
  misc_feature: MA Experiment 20000452 PARAMETER Experiment Name: At_CS6879_Shoots-Roots_P Parameter: Plant Line Value: CS6879 vs. WS
  misc_feature: MA Experiment 20000452 PARAMETER Experiment Name: At_CS6879_Shoots-Roots_P Parameter: Tissue Value: Shoots
  misc_feature: MA Experiment ID: 20000496 Result: Down-regulated in Transcription
  misc_feature: MA Experiment 20000496 PARAMETER Experiment Name: At_Guard_Cells_P Parameter: Harvest Date Value: 7/19/2002
  misc_feature: MA Experiment 20000496 PARAMETER Experiment Name: At_Guard_Cells_P Parameter: Organism Value: Canola
  misc_feature: MA Experiment 20000496 PARAMETER Experiment Name: At_Guard_Cells_P Parameter: Tissue Value: Guard Cells vs. Leaves
  misc_feature: MA Experiment ID: 20001247 Result: Up-regulated in Transcription
  misc_feature: MA Experiment 20001247 PARAMETER Experiment Name: At_Far-red-induction_P Parameter: Age (day) Value: 7
  misc_feature: MA Experiment 20001247 PARAMETER Experiment Name: At_Far-red-induction_P Parameter: Light Value: Far-red vs. White
  misc_feature: MA Experiment 20001247 PARAMETER Experiment Name: At_Far-red-induction_P Parameter: Organism Value: A. thaliana
  misc_feature: MA Experiment 20001247 PARAMETER Experiment Name: At_Far-red-induction_P Parameter: Plant Line Value: Columbia
  misc_feature: MA Experiment 20001247 PARAMETER Experiment Name: At_Far-red-induction_P Parameter: Timepoint (hr) Value: 1
  misc_feature: MA Experiment 20001247 PARAMETER Experiment Name: At_Far-red-induction_P Parameter: Tissue Value: Whole Plant
  misc_feature: MA Experiment ID: 20001459 Result: Up-regulated in Transcription
  misc_feature: MA Experiment 20001459 PARAMETER Experiment Name: At_50mM_NH4NO3_L-to-H_P Parameter: Age (day) Value: Undefined
  misc_feature: MA Experiment 20001459 PARAMETER Experiment Name: At_50mM_NH4NO3_L-to-H_P Parameter: Organism Value: Undefined
  misc_feature: MA Experiment 20001459 PARAMETER Experiment Name: At_50mM_NH4NO3_L-to-H_P Parameter: Plant Line Value: Undefined
  misc_feature: MA Experiment 20001459 PARAMETER Experiment Name: At_50mM_NH4NO3_L-to-H_P Parameter: Timepoint (hr) Value: 4
  misc_feature: MA Experiment 20001459 PARAMETER Experiment Name: At_50mM_NH4NO3_L-to-H_P Parameter: Tissue Value: Siliques
  misc_feature: MA Experiment 20001459 PARAMETER Experiment Name: At_50mM_NH4NO3_L-to-H_P Parameter: Treatment Value: 50mM NH4NO3 vs. 100mM Manitol
  misc_feature: MA Experiment ID: 20001556 Result: Down-regulated in Transcription
  misc_feature: MA Experiment 20001556 PARAMETER Experiment Name: At_Drought_Soil_Dry_P Parameter: Age (day) Value: 26
  misc_feature: MA Experiment 20001556 PARAMETER Experiment Name: At_Drought_Soil_Dry_P Parameter: Organism Value: A. thaliana
  misc_feature: MA Experiment 20001556 PARAMETER Experiment Name: At_Drought_Soil_Dry_P Parameter: Plant Line Value: WS
  misc_feature: MA Experiment 20001556 PARAMETER Experiment Name: At_Drought_Soil_Dry_P Parameter: Post Timepoint (hr) Value: None
  misc_feature: MA Experiment 20001556 PARAMETER Experiment Name: At_Drought_Soil_Dry_P Parameter: Post-Treatment Value: None
  misc_feature: MA Experiment 20001556 PARAMETER Experiment Name: At_Drought_Soil_Dry_P Parameter: Timepoint (day) Value: 12
  misc_feature: MA Experiment 20001556 PARAMETER Experiment Name: At_Drought_Soil_Dry_P Parameter: Treatment Value: Drought vs. No Drought
  misc_feature: MA Experiment ID: 20001557 Result: Down-regulated in Transcription
  misc_feature: MA Experiment 20001557 PARAMETER Experiment Name: At_Drought_Soil_Dry_P Parameter: Age (day) Value: 27
  misc_feature: MA Experiment 20001557 PARAMETER Experiment Name: At_Drought_Soil_Dry_P Parameter: Organism Value: A. thaliana
  misc_feature: MA Experiment 20001557 PARAMETER Experiment Name: At_Drought_Soil_Dry_P Parameter: Plant Line Value: WS
  misc_feature: MA Experiment 20001557 PARAMETER Experiment Name: At_Drought_Soil_Dry_P Parameter: Post Timepoint (hr) Value: 3
  misc_feature: MA Experiment 20001557 PARAMETER Experiment Name: At_Drought_Soil_Dry_P Parameter: Post-Treatment Value: Re-Water vs. No Drought
  misc_feature: MA Experiment 20001557 PARAMETER Experiment Name: At_Drought_Soil_Dry_P Parameter: Timepoint (day) Value: 13
  misc_feature: MA Experiment 20001557 PARAMETER Experiment Name: At_Drought_Soil_Dry_P Parameter: Treatment Value: Drought vs. No Drought
  misc_feature: MA Experiment ID: 20001558 Result: Down-regulated in Transcription
  misc_feature: MA Experiment 20001558 PARAMETER Experiment Name: At_Drought_Soil_Dry_P Parameter: Age (day) Value: 27
  misc_feature: MA Experiment 20001558 PARAMETER Experiment Name: At_Drought_Soil_Dry_P Parameter: Organism Value: A. thaliana
  misc_feature: MA Experiment 20001558 PARAMETER Experiment Name: At_Drought_Soil_Dry_P Parameter: Plant Line Value: WS
  misc_feature: MA Experiment 20001558 PARAMETER Experiment Name: At_Drought_Soil_Dry_P Parameter: Post Timepoint (hr) Value: 6
  misc_feature: MA Experiment 20001558 PARAMETER Experiment Name: At_Drought_Soil_Dry_P Parameter: Post-Treatment Value: Re-Water vs. No Drought
  misc_feature: MA Experiment 20001558 PARAMETER Experiment Name: At_Drought_Soil_Dry_P Parameter: Timepoint (day) Value: 13
  misc_feature: MA Experiment 20001558 PARAMETER Experiment Name: At_Drought_Soil_Dry_P Parameter: Treatment Value: Drought vs. No Drought
  misc_feature: MA Experiment ID: 20001560 Result: Down-regulated in Transcription
  misc_feature: MA Experiment 20001560 PARAMETER Experiment Name: At_Drought_Soil_Dry_P Parameter: Age (day) Value: 28
  misc_feature: MA Experiment 20001560 PARAMETER Experiment Name: At_Drought_Soil_Dry_P Parameter: Organism Value: A. thaliana
  misc_feature: MA Experiment 20001560 PARAMETER Experiment Name: At_Drought_Soil_Dry_P Parameter: Plant Line Value: WS
  misc_feature: MA Experiment 20001560 PARAMETER Experiment Name: At_Drought_Soil_Dry_P Parameter: Post Timepoint (hr) Value: None
  misc_feature: MA Experiment 20001560 PARAMETER Experiment Name: At_Drought_Soil_Dry_P Parameter: Post-Treatment Value: None
  misc_feature: MA Experiment 20001560 PARAMETER Experiment Name: At_Drought_Soil_Dry_P Parameter: Timepoint (day) Value: 14
  misc_feature: MA Experiment 20001560 PARAMETER Experiment Name: At_Drought_Soil_Dry_P Parameter: Treatment Value: Drought vs. No Drought
atttttcactcctttcctttcccccacaaactaaacaaaaaaccattcacaaaaaaaatagagagaatcatctgagagagtagtagtgatgatatgatcgcttcttctcctacaatctcagaaacctccgatcacggttttatatatcttctacaacggatacaatggagagcaccgattcttccggtggtccaccaccgccacaacctaaccttcctccaggcttccggtttcaccctaccgacgaagagcttgttgttcactacctcaaacgcaaagcagcctctgctcctttacctgtcgccatcatcgccgaagtcgatctctataaatttgatccatgggaacttcccgctaaagcatcgtttggagaacaagaatggtacttctttagtccacgagatcggaagtatccaaacggagcaagaccaaacagagcggcgacttcaggttattggaaagcgaccggtacagataaaccggtacttgcttccgacggtaaccaaaaggtgggcgtgaagaaggcactagtcttctacagtggtaaaccaccaaaaggcgttaaaagtgattggatcatgcatgagtatcgtctcatcgaaaacaaaccaaacaatcgacctcctggctgtgatttcggcaacaaaaaaaactcactcagacttgatgattgggtgttatgtagaatctacaagaagaacaacgcaagtcgacatgttgataacgataaggatcatgatatgatcgattacattttcaggaagattcctccgtctttatcaatggcggctgcttctacaggacttcaccaacatcatcataatgtctcaagatcaatgaatttcttccctggcaaattctccggtggtggttacgggattttctctgacggtggtaacacgagtatatacgacggcggtggcatgatcaacaatattggtactgactcagtagatcacgacaataacgctgacgtcgttggtttaaatcatgcttcgtcgtcaggtcctatgatgatggcgaatttgaaacgaactctcccggtgccgtattggcctgtagcagatgaggagcaagatgcatctccgagcaaacggtttcacggtgtaggaggaggaggaggagattgttcgaacatgtcttcctccatgatggaagagactccaccattgatgcaacaacaaggtggtgtgttaggagatggattattcagaacgacatcgtaccaattacccggtttaaattggtactcttcttaatcaaatgtgtttcgccgccggtgtgaagaattttccggtgacagtgaagatttttttccgattggtggggtcatttgcatgcattatataatttgagatttgtgtatatgttttgggttaattaattggtcacaggggttagaggaagaagattatttagagagcggagaagaagtgaggcaacatatagaaaacataggtttaaaaaatattactgtttgttaagtttaatgattaaatgtataaatcttatacttagatgtttatatatagtttgtatagatgcatatagtttctctcaatgctattttgagattgtattttcttgtaaaggaaatgttttaaaaaaaaaaaaaaaaaaagttgtgtaactatgtatttttcttcacatatgttgaaaatcactgatgtttttggactc

SEQ ID NO: 30723 - protein, 364 aa, Arabidopsis thaliana
  peptide (1)..(364): Ceres Seq. ID no. 12343532
  misc_feature (17)..(145): Pfam Name: No apical meristem (NAM) protein Pfam Description: No apical meristem (NAM) protein
  misc_feature (13)..(182): Homolog of NCBI NO: 6223651 NR Description: NAM-like protein (no apical meristem)
  misc_feature (13)..(182): Homolog of NCBI NO: 30679026 NR Description: No apical meristem (NAM) protein family
  misc_feature (1)..(214): Homolog of NCBI NO: 34899790 NR Description: OJ1773_H01.21 [Oryza sativa (japonica
  misc_feature (5)..(230): Homolog of NCBI NO: 25352286 NR Description: hypothetical protein F11P17.16 [imported] -
  misc_feature (1)..(230): Homolog of NCBI NO: 18407026 NR Description: NAM protein, putative
  misc_feature (1)..(230): Homolog of NCBI NO: 21593425 NR Description: NAM protein, putative [Arabidopsis thaliana]
  misc_feature (1)..(262): Homolog of NCBI NO: 21554226 NR Description: NAM-like protein [Arabidopsis thaliana]
  misc_feature (1)..(262): Homolog of NCBI NO: 20466640 NR Description: NAM-like protein [Arabidopsis thaliana]
  misc_feature (1)..(262): Homolog of NCBI NO: 15219110 NR Description: NAM-like protein
  misc_feature (1)..(364): Homolog of NCBI NO: 15232606 NR Description: putative jasmonic acid regulatory protein
MESTDSSGGPPPPQPNLPPGFRFHPTDEELVVHYLKRKAASAPLPVAIIAEVDLYKFDPWELPAKASFGEQEWYFFSPRDRKYPNGARPNRAATSGYWKATGTDKPVLASDGNQKVGVKKALVFYSGKPPKGVKSDWIMHEYRLIENKPNNRPPGCDFGNKKNSLRLDDWVLCRIYKKNNASRHVDNDKDHDMIDYIFRKIPPSLSMAAASTGLHQHHHNVSRSMNFFPGKFSGGGYGIFSDGGNTSIYDGGGMINNIGTDSVDHDNNADVVGLNHASSSGPMMMANLKRTLPVPYWPVADEEQDASPSKRFHGVGGGGGDCSNMSSSMMEETPPLMQQQGGVLGDGLFRTTSYQLPGLNWYSS

SEQ ID NO: 30724 - protein, 226 aa, Arabidopsis thaliana
  peptide (1)..(226): Ceres Seq. ID no. 12343533
  misc_feature (1)..(44): Homolog of NCBI NO: 6223651 NR Description: NAM-like protein (no apical meristem)
  misc_feature (1)..(44): Homolog of NCBI NO: 30679026 NR Description: No apical meristem (NAM) protein family
  misc_feature (1)..(76): Homolog of NCBI NO: 34899790 NR Description: OJ1773_H01.21 [Oryza sativa (japonica
  misc_feature (1)..(92): Homolog of NCBI NO: 25352286 NR Description: hypothetical protein F11P17.16 [imported] -
  misc_feature (1)..(92): Homolog of NCBI NO: 18407026 NR Description: NAM protein, putative
  misc_feature (1)..(92): Homolog of NCBI NO: 21593425 NR Description: NAM protein, putative [Arabidopsis thaliana]
  misc_feature (1)..(124): Homolog of NCBI NO: 21554226 NR Description: NAM-like protein [Arabidopsis thaliana]
  misc_feature (1)..(124): Homolog of NCBI NO: 20466640 NR Description: NAM-like protein [Arabidopsis thaliana]
  misc_feature (1)..(124): Homolog of NCBI NO: 15219110 NR Description: NAM-like protein
  misc_feature (1)..(226): Homolog of NCBI NO: 15232606 NR Description: putative jasmonic acid regulatory protein
MHEYRLIENKPNNRPPGCDFGNKKNSLRLDDWVLCRIYKKNNASRHVDNDKDHDMIDYIFRKIPPSLSMAAASTGLHQHHHNVSRSMNFFPGKFSGGGYGIFSDGGNTSIYDGGGMINNIGTDSVDHDNNADVVGLNHASSSGPMMMANLKRTLPVPYWPVADEEQDASPSKRFHGVGGGGGDCSNMSSSMMEETPPLMQQQGGVLGDGLFRTTSYQLPGLNWYSS

SEQ ID NO: 30725 - DNA, 931 bp, Arabidopsis thaliana
  misc_feature (1)..(931): Ceres Seq. ID no. 13490184
  misc_feature: MA Experiment ID: 108434 Result: Up-regulated in Transcription
  misc_feature: MA Experiment 108434 PARAMETER Experiment Name: At_Root_Tips_cDNA_P Parameter: Tissue Value: Root Tips
  misc_feature: MA Experiment ID: 108573 Result: Down-regulated in Transcription
  misc_feature: MA Experiment 108573 PARAMETER Experiment Name: At_Drought_cDNA_P Parameter: Timepoint (hr) Value: 6
  misc_feature: MA Experiment 108573 PARAMETER Experiment Name: At_Drought_cDNA_P Parameter: Tissue Value: Aerial
  misc_feature: MA Experiment 108573 PARAMETER Experiment Name: At_Drought_cDNA_P Parameter: Treatment Value: Drought vs. No Drought
  misc_feature: MA Experiment ID: 20000090 Result: Up-regulated in Transcription
  misc_feature: MA Experiment ID: 20000113 Result: Down-regulated in Transcription
  misc_feature: MA Experiment 20000113 PARAMETER Experiment Name: At_42deg_Heat_cDNA_P Parameter: Temperature (deg C) Value: 42 vs. 22
  misc_feature: MA Experiment 20000113 PARAMETER Experiment Name: At_42deg_Heat_cDNA_P Parameter: Timepoint (hr) Value: 8
  misc_feature: MA Experiment 20000113 PARAMETER Experiment Name: At_42deg_Heat_cDNA_P Parameter: Tissue Value: Aerial
  misc_feature: MA Experiment ID: 20000180 Result: Up-regulated in Transcription
  misc_feature: MA Experiment 20000180 PARAMETER Experiment Name: At_Germinating_Seeds_P Parameter: Age (hr) Value: 24 vs. 0
  misc_feature: MA Experiment 20000180 PARAMETER Experiment Name: At_Germinating_Seeds_P Parameter: Tissue Value: Germinating Seeds
  misc_feature: MA Experiment ID: 20000184 Result: Down-regulated in Transcription
  misc_feature: MA Experiment 20000184 PARAMETER Experiment Name: At_Shoots__P Parameter: Age (day) Value: 7
  misc_feature: MA Experiment 20000184 PARAMETER Experiment Name: At_Shoots__P Parameter: Tissue Value: Shoots vs. Whole Plant
  misc_feature: MA Experiment ID: 20000495 Result: Up-regulated in Transcription
  misc_feature: MA Experiment 20000495 PARAMETER Experiment Name: At_Guard_Cells_P Parameter: Harvest Date Value: 8/2/2002
  misc_feature: MA Experiment 20000495 PARAMETER Experiment Name: At_Guard_Cells_P Parameter: Organism Value: A. thaliana
  misc_feature: MA Experiment 20000495 PARAMETER Experiment Name: At_Guard_Cells_P Parameter: Tissue Value: Guard Cells vs. Leaves
aaaatttctctgccggtgttgacttcaaactctctttgattagatcggcgccaacttctaaacgcaaatgggaatcacgagaaacttgatcctgggtttggcttgtttagcctttgtctccattgctaaagctctgcctcatgaaccagaacttggctcggctcgtgtcgtcttccagactagttatggagatatcgaatttgggttctatcccactgtggcacccaagacagtggatcacatcttcaagcttgttcgtttaggaggatacaacactaatcatttcttcagggttgataaaggttttgttgctcaagttgcggatgtggcgagtggacgatcagctccaatgaatgaggagcaaaggaaagaagctgagaagaaaattgtgggagagttcagtgatgttaagcatgtcagaggtactctttccatgggaagatatgacgatccaaacagtgcacaatcttcattttcgatgcttcttggcaatgctcctcatcttgatcgccagtatgctgtgtttggtaaagttactaaaggagatgaaacattgagtaagctagaagaagttcccactcgccgcgaggggatttttgttatgccgacggagcggatcacgattttgtcgacatactattacgacactaaaatggagagctgtgaagaagagagatctgtcctgaaaagaaggcttcaagcatcttttgtggaggtcgaaagacagagaatgaagtgcttcccgtgaatgaagttaacacataagaaactgttcaacaaaagccttaaaacgccagggaacacaaaggtaaatgtatgtctagtaaaaaaactcagaatgctagacagtttatgagtggtttatcagtgtgagagattgtagttaacagtgtaaacagtttgagacattgaatcatggattgtttccttc

SEQ ID NO: 30726 - protein, 226 aa, Arabidopsis thaliana
  peptide (1)..(226): Ceres Seq. ID no. 13490185
  misc_feature (34)..(167): Homolog of NCBI NO: 15888985 NR Description: AGR_C_3088p [Agrobacterium tumefaciens]
  misc_feature (34)..(195): Homolog of NCBI NO: 17987170 NR Description: PEPTIDYL-PROLYL CIS-TRANS ISOMERASE [Brucella
  misc_feature (7)..(188): Homolog of NCBI NO: 22982921 NR Description: hypothetical protein [Burkholderia fungorum]
  misc_feature (34)..(172): Homolog of NCBI NO: 15965337 NR Description: PUTATIVE PEPTIDYL-PROLYL CIS-TRANS ISOMERASE B
  misc_feature (34)..(167): Homolog of NCBI NO: 23501971 NR Description: peptidyl-prolyl cis-trans isomerase,
  misc_feature (34)..(167): Homolog of NCBI NO: 17987171 NR Description: PEPTIDYL-PROLYL CIS-TRANS ISOMERASE A [Brucella
  misc_feature (11)..(195): Homolog of NCBI NO: 23501972 NR Description: peptidyl-prolyl cis-trans isomerase,
  misc_feature (1)..(203): Homolog of NCBI NO: 18310549 NR Description: probable peptidyl-prolyl cis-trans isomerase B
  misc_feature (34)..(220): Homolog of NCBI NO: 25518514 NR Description: hypothetical protein T2P11.13 - Arabidopsis
  misc_feature (1)..(226): Homolog of NCBI NO: 18396122 NR Description: expressed protein [Arabidopsis thaliana]
MGITRNLILGLACLAFVSIAKALPHEPELGSARVVFQTSYGDIEFGFYPTVAPKTVDHIFKLVRLGGYNTNHFFRVDKGFVAQVADVASGRSAPMNEEQRKEAEKKIVGEFSDVKHVRGTLSMGRYDDPNSAQSSFSMLLGNAPHLDRQYAVFGKVTKGDETLSKLEEVPTRREGIFVMPTERITILSTYYYDTKMESCEEERSVLKRRLQASFVEVERQRMKCFP

SEQ ID NO: 30727 - protein, 132 aa, Arabidopsis thaliana
  peptide (1)..(132): Ceres Seq. ID no. 13490186
  misc_feature (1)..(73): Homolog of NCBI NO: 15888985 NR Description: AGR_C_3088p [Agrobacterium tumefaciens]
  misc_feature (1)..(101): Homolog of NCBI NO: 17987170 NR Description: PEPTIDYL-PROLYL CIS-TRANS ISOMERASE [Brucella
  misc_feature (1)..(94): Homolog of NCBI NO: 22982921 NR Description: hypothetical protein [Burkholderia fungorum]
  misc_feature (1)..(78): Homolog of NCBI NO: 15965337 NR Description: PUTATIVE PEPTIDYL-PROLYL CIS-TRANS ISOMERASE B
  misc_feature (1)..(73): Homolog of NCBI NO: 23501971 NR Description: peptidyl-prolyl cis-trans isomerase,
  misc_feature (1)..(73): Homolog of NCBI NO: 17987171 NR Description: PEPTIDYL-PROLYL CIS-TRANS ISOMERASE A [Brucella
  misc_feature (1)..(101): Homolog of NCBI NO: 23501972 NR Description: peptidyl-prolyl cis-trans isomerase,
  misc_feature (1)..(109): Homolog of NCBI NO: 18310549 NR Description: probable peptidyl-prolyl cis-trans isomerase B
  misc_feature (1)..(126): Homolog of NCBI NO: 25518514 NR Description: hypothetical protein T2P11.13 - Arabidopsis
  misc_feature (1)..(132): Homolog of NCBI NO: 18396122 NR Description: expressed protein [Arabidopsis thaliana]
MNEEQRKEAEKKIVGEFSDVKHVRGTLSMGRYDDPNSAQSSFSMLLGNAPHLDRQYAVFGKVTKGDETLSKLEEVPTRREGIFVMPTERITILSTYYYDTKMESCEEERSVLKRRLQASFVEVERQRMKCFP

SEQ ID NO: 30728 - DNA, 1235 bp, Arabidopsis thaliana; identical to SEQ ID NO: 22288
  misc_feature (1)..(1235): Ceres Seq. ID no. 12324896
  misc_feature: MA Experiment ID: 108434 Result: Down-regulated in Transcription
  misc_feature: MA Experiment 108434 PARAMETER Experiment Name: At_Root_Tips_cDNA_P Parameter: Tissue Value: Root Tips
  misc_feature: MA Experiment ID: 108464 Result: Up-regulated in Transcription
  misc_feature: MA Experiment 108464 PARAMETER Experiment Name: At_Germinating_Seeds_cDNA_P Parameter: Age (day) Value: 4 vs. 0
  misc_feature: MA Experiment 108464 PARAMETER Experiment Name: At_Germinating_Seeds_cDNA_P Parameter: Tissue Value: Germinating Seeds
  misc_feature: MA Experiment ID: 108594 Result: Down-regulated in Transcription
  misc_feature: MA Experiment 108594 PARAMETER Experiment Name: At_Ler-rhl_Root_cDNA_P Parameter: Plant Line Value: null
  misc_feature: MA Experiment ID: 20000184 Result: Up-regulated in Transcription
  misc_feature: MA Experiment 20000184 PARAMETER Experiment Name: At_Shoots__P Parameter: Age (day) Value: 7
  misc_feature: MA Experiment 20000184 PARAMETER Experiment Name: At_Shoots__P Parameter: Tissue Value: Shoots vs. Whole Plant
  misc_feature: MA Experiment ID: 20000185 Result: Up-regulated in Transcription
  misc_feature: MA Experiment 20000185 PARAMETER Experiment Name: At_Roots__P Parameter: Age (day) Value: 7 vs. 21
  misc_feature: MA Experiment 20000185 PARAMETER Experiment Name: At_Roots__P Parameter: Organism Value: A. thaliana
  misc_feature: MA Experiment 20000185 PARAMETER Experiment Name: At_Roots__P Parameter: Tissue Value: Roots vs. Whole Plant
  misc_feature: MA Experiment ID: 20000227 Result: Down-regulated in Transcription
  misc_feature: MA Experiment 20000227 PARAMETER Experiment Name: At_Root-Tips-vs-Tops_P Parameter: Tissue Value: Root Tips vs. Root Tops
  misc_feature: MA Experiment ID: 20000267 Result: Down-regulated in Transcription
  misc_feature: MA Experiment 20000267 PARAMETER Experiment Name: At_Drought_P Parameter: Age (day) Value: 7
  misc_feature: MA Experiment 20000267 PARAMETER Experiment Name: At_Drought_P Parameter: Organism Value: A. thaliana
  misc_feature: MA Experiment 20000267 PARAMETER Experiment Name: At_Drought_P Parameter: Plant Line Value: WS
  misc_feature: MA Experiment 20000267 PARAMETER Experiment Name: At_Drought_P Parameter: Timepoint (hr) Value: 6
  misc_feature: MA Experiment 20000267 PARAMETER Experiment Name: At_Drought_P Parameter: Tissue Value: Whole Plant
  misc_feature: MA Experiment 20000267 PARAMETER Experiment Name: At_Drought_P Parameter: Treatment Value: Drought vs. No Drought
  misc_feature: MA Experiment ID: 20000436 Result: Down-regulated in Transcription
  misc_feature: MA Experiment 20000436 PARAMETER Experiment Name: At_Drought_P Parameter: Age (day) Value: 7
  misc_feature: MA Experiment 20000436 PARAMETER Experiment Name: At_Drought_P Parameter: Organism Value: A. thaliana
  misc_feature: MA Experiment 20000436 PARAMETER Experiment Name: At_Drought_P Parameter: Plant Line Value: WS
  misc_feature: MA Experiment 20000436 PARAMETER Experiment Name: At_Drought_P Parameter: Timepoint (hr) Value: 12
  misc_feature: MA Experiment 20000436 PARAMETER Experiment Name: At_Drought_P Parameter: Tissue Value: Whole Plant
  misc_feature: MA Experiment 20000436 PARAMETER Experiment Name: At_Drought_P Parameter: Treatment Value: Drought vs. No Drought
  misc_feature: MA Experiment ID: 20000437 Result: Down-regulated in Transcription
  misc_feature: MA Experiment 20000437 PARAMETER Experiment Name: At_Drought_P Parameter: Age (day) Value: 8
  misc_feature: MA Experiment 20000437 PARAMETER Experiment Name: At_Drought_P Parameter: Organism Value: A. thaliana
  misc_feature: MA Experiment 20000437 PARAMETER Experiment Name: At_Drought_P Parameter: Plant Line Value: WS
  misc_feature: MA Experiment 20000437 PARAMETER Experiment Name: At_Drought_P Parameter: Timepoint (hr) Value: 24
  misc_feature: MA Experiment 20000437 PARAMETER Experiment Name: At_Drought_P Parameter: Tissue Value: Whole Plant
  misc_feature: MA Experiment 20000437 PARAMETER Experiment Name: At_Drought_P Parameter: Treatment Value: Drought vs. No Drought
  misc_feature: MA Experiment ID: 20000438 Result: Up-regulated in Transcription
  misc_feature: MA Experiment 20000438 PARAMETER Experiment Name: At_Shoots__P Parameter: Age (day) Value: 14
  misc_feature: MA Experiment 20000438 PARAMETER Experiment Name: At_Shoots__P Parameter: Tissue Value: Shoots vs. Whole Plant
  misc_feature: MA Experiment ID: 20000439 Result: Up-regulated in Transcription
  misc_feature: MA Experiment 20000439 PARAMETER Experiment Name: At_Roots__P Parameter: Age (day) Value: 14 vs. 21
  misc_feature: MA Experiment 20000439 PARAMETER Experiment Name: At_Roots__P Parameter: Organism Value: A. thaliana
  misc_feature: MA Experiment 20000439 PARAMETER Experiment Name: At_Roots__P Parameter: Tissue Value: Roots vs. Whole Plant
  misc_feature: MA Experiment ID: 20000451 Result: Up-regulated in Transcription
  misc_feature: MA Experiment 20000451 PARAMETER Experiment Name: At_CS6879_Shoots-Roots_P Parameter: Age (day) Value: 14
  misc_feature: MA Experiment 20000451 PARAMETER Experiment Name: At_CS6879_Shoots-Roots_P Parameter: Organism Value: A. thaliana
  misc_feature: MA Experiment 20000451 PARAMETER Experiment Name: At_CS6879_Shoots-Roots_P Parameter: Plant Line Value: CS6879 vs. WS
  misc_feature: MA Experiment 20000451 PARAMETER Experiment Name: At_CS6879_Shoots-Roots_P Parameter: Tissue Value: Roots

SEQ ID NO: 30729 - protein, 329 aa, Arabidopsis thaliana; identical to SEQ ID NO: 22289
  peptide (1)..(329): Ceres Seq. ID no. 12324897
  misc_feature (185)..(284): Pfam Name: 2OG-Fe(II) oxygenase superfamily Pfam Description: 2OG-Fe(II) oxygenase superfamily
  misc_feature (185)..(284): Pfam Name: 2OG-Fe(II) oxygenase superfamily Pfam Description: 2OG-Fe(II) oxygenase superfamily
  misc_feature (3)..(318): Homolog of NCBI NO: 14916565 NR Description: Flavonol synthase (FLS)
  misc_feature (20)..(318): Homolog of NCBI NO: 1706822 NR Description: Flavonol synthase (FLS)
  misc_feature (20)..(313): Homolog of NCBI NO: 14916564 NR Description: Flavonol synthase (FLS)
  misc_feature (23)..(313): Homolog of NCBI NO: 14916566 NR Description: Flavonol synthase (FLS) (CitFLS)
  misc_feature (37)..(318): Homolog of NCBI NO: 6015164 NR Description: Flavonol synthase (FLS)
  misc_feature (3)..(318): Homolog of NCBI NO: 14916565 NR Description: Flavonol synthase (FLS)
  misc_feature (20)..(313): Homolog of NCBI NO: 14916564 NR Description: Flavonol synthase (FLS)
  misc_feature (37)..(318): Homolog of NCBI NO: 6015164 NR Description: Flavonol synthase (FLS)
  misc_feature (5)..(329): Homolog of NCBI NO: 15242828 NR Description: 1-aminocyclopropane-1-carboxylic acid
  misc_feature (33)..(324): Homolog of NCBI NO: 21554244 NR Description: flavonol synthase [Arabidopsis thaliana]
  misc_feature (33)..(324): Homolog of NCBI NO: 15242827 NR Description: flavonol synthase
  misc_feature (5)..(324): Homolog of NCBI NO: 15242339 NR Description: flavonol synthase (FLS) (sp Q96330)
  misc_feature (34)..(313): Homolog of NCBI NO: 10177039 NR Description: flavonol synthase [Arabidopsis thaliana]
  misc_feature (23)..(313): Homolog of NCBI NO: 14916566 NR Description: Flavonol synthase (FLS) (CitFLS)
  misc_feature (20)..(318): Homolog of NCBI NO: 1706822 NR Description: Flavonol synthase (FLS)
  misc_feature (34)..(313): Homolog of NCBI NO: 10177039 NR Description: flavonol synthase [Arabidopsis thaliana]
  misc_feature (5)..(324): Homolog of NCBI NO: 15242339 NR Description: flavonol synthase (FLS) (sp Q96330)
  misc_feature (33)..(324): Homolog of NCBI NO: 15242827 NR Description: flavonol synthase
  misc_feature (33)..(324): Homolog of NCBI NO: 21554244 NR Description: flavonol synthase [Arabidopsis thaliana]
  misc_feature (5)..(329): Homolog of NCBI NO: 15242828 NR Description: 1-aminocyclopropane-1-carboxylic acid

SEQ ID NO: 30730 - protein, 325 aa, Arabidopsis thaliana; identical to SEQ ID NO: 22290
  peptide (1)..(325): Ceres Seq. ID no. 12324898
  misc_feature (181)..(280): Pfam Name: 2OG-Fe(II) oxygenase superfamily Pfam Description: 2OG-Fe(II) oxygenase superfamily
  misc_feature (181)..(280): Pfam Name: 2OG-Fe(II) oxygenase superfamily Pfam Description: 2OG-Fe(II) oxygenase superfamily
  misc_feature (1)..(314): Homolog of NCBI NO: 14916565 NR Description: Flavonol synthase (FLS)
  misc_feature (16)..(314): Homolog of NCBI NO: 1706822 NR Description: Flavonol synthase (FLS)
  misc_feature (16)..(309): Homolog of NCBI NO: 14916564 NR Description: Flavonol synthase (FLS)
  misc_feature (19)..(309): Homolog of NCBI NO: 14916566 NR Description: Flavonol synthase (FLS) (CitFLS)
  misc_feature (33)..(314): Homolog of NCBI NO: 6015164 NR Description: Flavonol synthase (FLS)
  misc_feature (1)..(314): Homolog of NCBI NO: 14916565 NR Description: Flavonol synthase (FLS)
  misc_feature (16)..(309): Homolog of NCBI NO: 14916564 NR Description: Flavonol synthase (FLS)
  misc_feature (33)..(314): Homolog of NCBI NO: 6015164 NR Description: Flavonol synthase (FLS)
  misc_feature (1)..(325): Homolog of NCBI NO: 15242828 NR Description: 1-aminocyclopropane-1-carboxylic acid
  misc_feature (29)..(320): Homolog of NCBI NO: 21554244 NR Description: flavonol synthase [Arabidopsis thaliana]
  misc_feature (29)..(320): Homolog of NCBI NO: 15242827 NR Description: flavonol synthase
  misc_feature (1)..(320): Homolog of NCBI NO: 15242339 NR Description: flavonol synthase (FLS) (sp Q96330)
  misc_feature (30)..(309): Homolog of NCBI NO: 10177039 NR Description: flavonol synthase [Arabidopsis thaliana]
  misc_feature (19)..(309): Homolog of NCBI NO: 14916566 NR Description: Flavonol synthase (FLS) (CitFLS)
  misc_feature (16)..(314): Homolog of NCBI NO: 1706822 NR Description: Flavonol synthase (FLS)
  misc_feature (30)..(309): Homolog of NCBI NO: 10177039 NR Description: flavonol synthase [Arabidopsis thaliana]
  misc_feature (1)..(320): Homolog of NCBI NO: 15242339 NR Description: flavonol synthase (FLS) (sp Q96330)
  misc_feature (29)..(320): Homolog of NCBI NO: 15242827 NR Description: flavonol synthase
  misc_feature (29)..(320): Homolog of NCBI NO: 21554244 NR Description: flavonol synthase [Arabidopsis thaliana]
  misc_feature (1)..(325): Homolog of NCBI NO: 15242828 NR Description: 1-aminocyclopropane-1-carboxylic acid

SEQ ID NO: 30731 - protein, 254 aa, Arabidopsis thaliana; identical to SEQ ID NO: 22291
  peptide (1)..(254): Ceres Seq. ID no. 12324899
  misc_feature (110)..(209): Pfam Name: 2OG-Fe(II) oxygenase superfamily Pfam Description: 2OG-Fe(II) oxygenase superfamily
  misc_feature (110)..(209): Pfam Name: 2OG-Fe(II) oxygenase superfamily Pfam Description: 2OG-Fe(II) oxygenase superfamily
  misc_feature (1)..(243): Homolog of NCBI NO: 14916565 NR Description: Flavonol synthase (FLS)
  misc_feature (1)..(243): Homolog of NCBI NO: 1706822 NR Description: Flavonol synthase (FLS)
  misc_feature (1)..(238): Homolog of NCBI NO: 14916564 NR Description: Flavonol synthase (FLS)
  misc_feature (1)..(238): Homolog of NCBI NO: 14916566 NR Description: Flavonol synthase (FLS) (CitFLS)
  misc_feature (1)..(243): Homolog of NCBI NO: 6015164 NR Description: Flavonol synthase (FLS)
  misc_feature (1)..(243): Homolog of NCBI NO: 14916565 NR Description: Flavonol synthase (FLS)
  misc_feature (1)..(238): Homolog of NCBI NO: 14916564 NR Description: Flavonol synthase (FLS)
  misc_feature (1)..(243): Homolog of NCBI NO: 6015164 NR Description: Flavonol synthase (FLS)
  misc_feature (1)..(254): Homolog of NCBI NO: 15242828 NR Description: 1-aminocyclopropane-1-carboxylic acid
  misc_feature (1)..(249): Homolog of NCBI NO: 21554244 NR Description: flavonol synthase [Arabidopsis thaliana]
  misc_feature (1)..(249): Homolog of NCBI NO: 15242827 NR Description: flavonol synthase
  misc_feature (1)..(249): Homolog of NCBI NO: 15242339 NR Description: flavonol synthase (FLS) (sp Q96330)
  misc_feature (1)..(238): Homolog of NCBI NO: 10177039 NR Description: flavonol synthase [Arabidopsis thaliana]
  misc_feature (1)..(238): Homolog of NCBI NO: 14916566 NR Description: Flavonol synthase (FLS) (CitFLS)
  misc_feature (1)..(243): Homolog of NCBI NO: 1706822 NR Description: Flavonol synthase (FLS)
  misc_feature (1)..(238): Homolog of NCBI NO: 10177039 NR Description: flavonol synthase [Arabidopsis thaliana]
  misc_feature (1)..(249): Homolog of NCBI NO: 15242339 NR Description: flavonol synthase (FLS) (sp Q96330)
  misc_feature (1)..(249): Homolog of NCBI NO: 15242827 NR Description: flavonol synthase
  misc_feature (1)..(249): Homolog of NCBI NO: 21554244 NR Description: flavonol synthase [Arabidopsis thaliana]
  misc_feature (1)..(254): Homolog of NCBI NO: 15242828 NR Description: 1-aminocyclopropane-1-carboxylic acid

SEQ ID NO: 30732 - DNA, 1389 bp, Arabidopsis thaliana; identical to SEQ ID NO: 22445
  misc_feature (1)..(1389): Ceres Seq. ID no. 12394789
  misc_feature: MA Experiment ID: 108434 Result: Down-regulated in Transcription
  misc_feature: MA Experiment 108434 PARAMETER Experiment Name: At_Root_Tips_cDNA_P Parameter: Tissue Value: Root Tips
  misc_feature: MA Experiment ID: 108461 Result: Up-regulated in Transcription
  misc_feature: MA Experiment 108461 PARAMETER Experiment Name: At_Germinating_Seeds_cDNA_P Parameter: Age (day) Value: 1 vs. 0
  misc_feature: MA Experiment 108461 PARAMETER Experiment Name: At_Germinating_Seeds_cDNA_P Parameter: Tissue Value: Germinating Seeds
  misc_feature: MA Experiment ID: 108462 Result: Up-regulated in Transcription
  misc_feature: MA Experiment 108462 PARAMETER Experiment Name: At_Germinating_Seeds_cDNA_P Parameter: Age (day) Value: 2 vs. 0
  misc_feature: MA Experiment 108462 PARAMETER Experiment Name: At_Germinating_Seeds_cDNA_P Parameter: Tissue Value: Germinating Seeds
  misc_feature: MA Experiment ID: 108463 Result: Up-regulated in Transcription
  misc_feature: MA Experiment 108463 PARAMETER Experiment Name: At_Germinating_Seeds_cDNA_P Parameter: Age (day) Value: 3 vs. 0
  misc_feature: MA Experiment 108463 PARAMETER Experiment Name: At_Germinating_Seeds_cDNA_P Parameter: Tissue Value: Germinating Seeds
  misc_feature: MA Experiment ID: 108464 Result: Up-regulated in Transcription
  misc_feature: MA Experiment 108464 PARAMETER Experiment Name: At_Germinating_Seeds_cDNA_P Parameter: Age (day) Value: 4 vs. 0
  misc_feature: MA Experiment 108464 PARAMETER Experiment Name: At_Germinating_Seeds_cDNA_P Parameter: Tissue Value: Germinating Seeds
  misc_feature: MA Experiment ID: 108577 Result: Down-regulated in Transcription
  misc_feature: MA Experiment 108577 PARAMETER Experiment Name: At_42deg_Heat_cDNA_P Parameter: Temperature (deg C) Value: 42 vs. 22
  misc_feature: MA Experiment 108577 PARAMETER Experiment Name: At_42deg_Heat_cDNA_P Parameter: Timepoint (hr) Value: 6
  misc_feature: MA Experiment 108577 PARAMETER Experiment Name: At_42deg_Heat_cDNA_P Parameter: Tissue Value: Aerial
  misc_feature: MA Experiment ID: 108579 Result: Down-regulated in Transcription
  misc_feature: MA Experiment 108579 PARAMETER Experiment Name: At_4deg_Cold_cDNA_P Parameter: Temperature (deg C) Value: 4 vs. 22
  misc_feature: MA Experiment 108579 PARAMETER Experiment Name: At_4deg_Cold_cDNA_P Parameter: Timepoint (hr) Value: 6
  misc_feature: MA Experiment 108579 PARAMETER Experiment Name: At_4deg_Cold_cDNA_P Parameter: Tissue Value: Aerial
  misc_feature: MA Experiment ID: 108594 Result: Down-regulated in Transcription
  misc_feature: MA Experiment 108594 PARAMETER Experiment Name: At_Ler-rhl_Root_cDNA_P Parameter: Plant Line Value: null
  misc_feature: MA Experiment ID: 20000069 Result: Up-regulated in Transcription
  misc_feature: MA Experiment 20000069 PARAMETER Experiment Name: At_100uM_ABA_Mutants_cDNA_P Parameter: Plant Line Value: CS23
  misc_feature: MA Experiment 20000069 PARAMETER Experiment Name: At_100uM_ABA_Mutants_cDNA_P Parameter: Timepoint (hr) Value: 6
  misc_feature: MA Experiment 20000069 PARAMETER Experiment Name: At_100uM_ABA_Mutants_cDNA_P Parameter: Tissue Value: Aerial
  misc_feature: MA Experiment 20000069 PARAMETER Experiment Name: At_100uM_ABA_Mutants_cDNA_P Parameter: Treatment Value: 100uM ABA vs. No Treatment
  misc_feature: MA Experiment ID: 20000071 Result: Up-regulated in Transcription
  misc_feature: MA Experiment 20000071 PARAMETER Experiment Name: At_100uM_ABA_Mutants_cDNA_P Parameter: Plant Line Value: CS8104
  misc_feature: MA Experiment 20000071 PARAMETER Experiment Name: At_100uM_ABA_Mutants_cDNA_P Parameter: Timepoint (hr) Value: 6
  misc_feature: MA Experiment 20000071 PARAMETER Experiment Name: At_100uM_ABA_Mutants_cDNA_P Parameter: Tissue Value: Aerial
  misc_feature: MA Experiment 20000071 PARAMETER Experiment Name: At_100uM_ABA_Mutants_cDNA_P Parameter: Treatment Value: 100uM ABA vs. No Treatment
  misc_feature: MA Experiment ID: 20000072 Result: Up-regulated in Transcription
  misc_feature: MA Experiment 20000072 PARAMETER Experiment Name: At_100uM_ABA_Mutants_cDNA_P Parameter: Plant Line Value: CS8105
  misc_feature: MA Experiment 20000072 PARAMETER Experiment Name: At_100uM_ABA_Mutants_cDNA_P Parameter: Timepoint (hr) Value: 6
  misc_feature: MA Experiment 20000072 PARAMETER Experiment Name: At_100uM_ABA_Mutants_cDNA_P Parameter: Tissue Value: Aerial
  misc_feature: MA Experiment 20000072 PARAMETER Experiment Name: At_100uM_ABA_Mutants_cDNA_P Parameter: Treatment Value: 100uM ABA vs. No Treatment
  misc_feature: MA Experiment ID: 20000088 Result: Up-regulated in Transcription
  misc_feature: MA Experiment 20000088 PARAMETER Experiment Name: At_100uM_ABA_Mutants_cDNA_P Parameter: Plant Line Value: Landsberg
  misc_feature: MA Experiment 20000088 PARAMETER Experiment Name: At_100uM_ABA_Mutants_cDNA_P Parameter: Timepoint (hr) Value: 6
  misc_feature: MA Experiment 20000088 PARAMETER Experiment Name: At_100uM_ABA_Mutants_cDNA_P Parameter: Tissue Value: Aerial
  misc_feature: MA Experiment 20000088 PARAMETER Experiment Name: At_100uM_ABA_Mutants_cDNA_P Parameter: Treatment Value: 100uM ABA vs. No Treatment
  misc_feature: MA Experiment ID: 20000089 Result: Up-regulated in Transcription
  misc_feature: MA Experiment ID: 20000180 Result: Up-regulated in Transcription
  misc_feature: MA Experiment 20000180 PARAMETER Experiment Name: At_Germinating_Seeds_P Parameter: Age (hr) Value: 24 vs. 0
  misc_feature: MA Experiment 20000180 PARAMETER Experiment Name: At_Germinating_Seeds_P Parameter: Tissue Value: Germinating Seeds
  misc_feature: MA Experiment ID: 20000227 Result: Down-regulated in Transcription
  misc_feature: MA Experiment 20000227 PARAMETER Experiment Name: At_Root-Tips-vs-Tops_P Parameter: Tissue Value: Root Tips vs. Root Tops
  misc_feature: MA Experiment ID: 20000234 Result: Down-regulated in Transcription
  misc_feature: MA Experiment 20000234 PARAMETER Experiment Name: At_Siliques_P Parameter: Age (day) Value: 21
  misc_feature: MA Experiment 20000234 PARAMETER Experiment Name: At_Siliques_P Parameter: Organism Value: A. thaliana
  misc_feature: MA Experiment 20000234 PARAMETER Experiment Name: At_Siliques_P Parameter: Plant Line Value: WS
  misc_feature: MA Experiment 20000234 PARAMETER Experiment Name: At_Siliques_P Parameter: Tissue Value: Less Than 5mm Siliques vs. Whole Plant
  misc_feature: MA Experiment ID: 20000437 Result: Up-regulated in Transcription
  misc_feature: MA Experiment 20000437 PARAMETER Experiment Name: At_Drought_P Parameter: Age (day) Value: 8
  misc_feature: MA Experiment 20000437 PARAMETER Experiment Name: At_Drought_P Parameter: Organism Value: A. thaliana
  misc_feature: MA Experiment 20000437 PARAMETER Experiment Name: At_Drought_P Parameter: Plant Line Value: WS
  misc_feature: MA Experiment 20000437 PARAMETER Experiment Name: At_Drought_P Parameter: Timepoint (hr) Value: 24
  misc_feature: MA Experiment 20000437 PARAMETER Experiment Name: At_Drought_P Parameter: Tissue Value: Whole Plant
  misc_feature: MA Experiment 20000437 PARAMETER Experiment Name: At_Drought_P Parameter: Treatment Value: Drought vs. No Drought
  misc_feature: MA Experiment ID: 20000438 Result: Down-regulated in Transcription
  misc_feature: MA Experiment 20000438 PARAMETER Experiment Name: At_Shoots__P Parameter: Age (day) Value: 14
  misc_feature: MA Experiment 20000438 PARAMETER Experiment Name: At_Shoots__P Parameter: Tissue Value: Shoots vs. Whole Plant
  misc_feature: MA Experiment ID: 20000451 Result: Down-regulated in Transcription
  misc_feature: MA Experiment 20000451 PARAMETER Experiment Name: At_CS6879_Shoots-Roots_P Parameter: Age (day) Value: 14
  misc_feature: MA Experiment 20000451 PARAMETER Experiment Name: At_CS6879_Shoots-Roots_P Parameter: Organism Value: A. thaliana
  misc_feature: MA Experiment 20000451 PARAMETER Experiment Name: At_CS6879_Shoots-Roots_P Parameter: Plant Line Value: CS6879 vs. WS
  misc_feature: MA Experiment 20000451 PARAMETER Experiment Name: At_CS6879_Shoots-Roots_P Parameter: Tissue Value: Roots
  misc_feature: MA Experiment ID: 20000574 Result: Down-regulated in Transcription
  misc_feature: MA Experiment 20000574 PARAMETER Experiment Name: At_100uM_ABA_Mutants__P Parameter: Organism Value: A. thaliana
  misc_feature: MA Experiment 20000574 PARAMETER Experiment Name: At_100uM_ABA_Mutants__P Parameter: Plant Line Value: CS23 vs. Ler wt
  misc_feature: MA Experiment 20000574 PARAMETER Experiment Name: At_100uM_ABA_Mutants__P Parameter: Timepoint (hr) Value: N/A
  misc_feature: MA Experiment 20000574 PARAMETER Experiment Name: At_100uM_ABA_Mutants__P Parameter: Tissue Value: Whole Plant
  misc_feature: MA Experiment 20000574 PARAMETER Experiment Name: At_100uM_ABA_Mutants__P Parameter: Treatment Value: None
  misc_feature: MA Experiment ID: 20001558 Result: Down-regulated in Transcription
  misc_feature: MA Experiment 20001558 PARAMETER Experiment Name: At_Drought_Soil_Dry_P Parameter: Age (day) Value: 27
  misc_feature: MA Experiment 20001558 PARAMETER Experiment Name: At_Drought_Soil_Dry_P Parameter: Organism Value: A. thaliana
  misc_feature: MA Experiment 20001558 PARAMETER Experiment Name: At_Drought_Soil_Dry_P Parameter: Plant Line Value: WS
  misc_feature: MA Experiment 20001558 PARAMETER Experiment Name: At_Drought_Soil_Dry_P Parameter: Post Timepoint (hr) Value: 6
  misc_feature: MA Experiment 20001558 PARAMETER Experiment Name: At_Drought_Soil_Dry_P Parameter: Post-Treatment Value: Re-Water vs. No Drought
  misc_feature: MA Experiment 20001558 PARAMETER Experiment Name: At_Drought_Soil_Dry_P Parameter: Timepoint (day) Value: 13
  misc_feature: MA Experiment 20001558 PARAMETER Experiment Name: At_Drought_Soil_Dry_P Parameter: Treatment Value: Drought vs. No Drought
  misc_feature: MA Experiment ID: 20001560 Result: Down-regulated in Transcription
  misc_feature: MA Experiment 20001560 PARAMETER Experiment Name: At_Drought_Soil_Dry_P Parameter: Age (day) Value: 28
  misc_feature: MA Experiment 20001560 PARAMETER Experiment Name: At_Drought_Soil_Dry_P Parameter: Organism Value: A. thaliana
  misc_feature: MA Experiment 20001560 PARAMETER Experiment Name: At_Drought_Soil_Dry_P Parameter: Plant Line Value: WS
  misc_feature: MA Experiment 20001560 PARAMETER Experiment Name: At_Drought_Soil_Dry_P Parameter: Post Timepoint (hr) Value: None
  misc_feature: MA Experiment 20001560 PARAMETER Experiment Name: At_Drought_Soil_Dry_P Parameter: Post-Treatment Value: None
  misc_feature: MA Experiment 20001560 PARAMETER Experiment Name: At_Drought_Soil_Dry_P Parameter: Timepoint (day) Value: 14
  misc_feature: MA Experiment 20001560 PARAMETER Experiment Name: At_Drought_Soil_Dry_P Parameter: Treatment Value: Drought vs. No Drought

SEQ ID NO: 30733 - protein, 387 aa, Arabidopsis thaliana; identical to SEQ ID NO: 22446
  peptide (1)..(387): Ceres Seq. ID no. 12394790
  misc_feature (154)..(380): Pfam Name: Papain family cysteine protease Pfam Description: Papain family cysteine protease
  misc_feature (154)..(380): Pfam Name: Papain family cysteine protease Pfam Description: Papain family cysteine protease
  misc_feature (15)..(385): Homolog of NCBI NO: 7435793 NR Description: probable cysteine proteinase (EC 3.4.22.-)
  misc_feature (20)..(385): Homolog of NCBI NO: 13491752 NR Description: cysteine protease [Ipomoea batatas]
  misc_feature (23)..(385): Homolog of NCBI NO: 5051468 NR Description: putative preprocysteine proteinase [Nicotiana
  misc_feature (15)..(385): Homolog of NCBI NO: 4757570 NR Description: cysteine proteinase precursor [Solanum melongena]
  misc_feature (20)..(385): Homolog of NCBI NO: 7381221 NR Description: papain-like cysteine proteinase isoform II
  misc_feature (15)..(385): Homolog of NCBI NO: 7435793 NR Description: probable cysteine proteinase (EC 3.4.22.-)
  misc_feature (23)..(385): Homolog of NCBI NO: 5051468 NR Description: putative preprocysteine proteinase [Nicotiana
  misc_feature (20)..(385): Homolog of NCBI NO: 7381221 NR Description: papain-like cysteine proteinase isoform II
  misc_feature (15)..(387): Homolog of NCBI NO: 18414611 NR Description: cysteine proteinase
  misc_feature (20)..(385): Homolog of NCBI NO: 7211741 NR Description: papain-like cysteine proteinase isoform I
  misc_feature (20)..(385): Homolog of NCBI NO: 7381219 NR Description: papain-like cysteine proteinase isoform I
  misc_feature (20)..(385): Homolog of NCBI NO: 7211743 NR Description: papain-like cysteine proteinase isoform II
  misc_feature (23)..(385): Homolog of NCBI NO: 7211745 NR Description: papain-like cysteine proteinase isoform III
  misc_feature (15)..(385): Homolog of NCBI NO: 4757570 NR Description: cysteine proteinase precursor [Solanum melongena]
  misc_feature (20)..(385): Homolog of NCBI NO: 13491752 NR Description: cysteine protease [Ipomoea batatas]
  misc_feature (23)..(385): Homolog of NCBI NO: 7211745 NR Description: papain-like cysteine proteinase isoform III
  misc_feature (20)..(385): Homolog of NCBI NO: 7211743 NR Description: papain-like cysteine proteinase isoform II
  misc_feature (20)..(385): Homolog of NCBI NO: 7381219 NR Description: papain-like cysteine proteinase isoform I
  misc_feature (20)..(385): Homolog of NCBI NO: 7211741 NR Description: papain-like cysteine proteinase isoform I
  misc_feature (15)..(387): Homolog of NCBI NO: 18414611 NR Description: cysteine proteinase

SEQ ID NO: 30734 - protein, 373 aa, Arabidopsis thaliana; identical to SEQ ID NO: 22447
  peptide (1)..(373): Ceres Seq. ID no. 12394791
  misc_feature (140)..(366): Pfam Name: Papain family cysteine protease Pfam Description: Papain family cysteine protease
  misc_feature (140)..(366): Pfam Name: Papain family cysteine protease Pfam Description: Papain family cysteine protease
  misc_feature (1)..(371): Homolog of NCBI NO: 7435793 NR Description: probable cysteine proteinase (EC 3.4.22.-)
  misc_feature (6)..(371): Homolog of NCBI NO: 13491752 NR Description: cysteine protease [Ipomoea batatas]
  misc_feature (9)..(371): Homolog of NCBI NO: 5051468 NR Description: putative preprocysteine proteinase [Nicotiana
  misc_feature (1)..(371): Homolog of NCBI NO: 4757570 NR Description: cysteine proteinase precursor [Solanum melongena]
  misc_feature (6)..(371): Homolog of NCBI NO: 7381221 NR Description: papain-like cysteine proteinase isoform II
  misc_feature (1)..(371): Homolog of NCBI NO: 7435793 NR Description: probable cysteine proteinase (EC 3.4.22.-)
  misc_feature (9)..(371): Homolog of NCBI NO: 5051468 NR Description: putative preprocysteine proteinase [Nicotiana
  misc_feature (6)..(371): Homolog of NCBI NO: 7381221 NR Description: papain-like cysteine proteinase isoform II
  misc_feature (1)..(373): Homolog of NCBI NO: 18414611 NR Description: cysteine proteinase
  misc_feature (6)..(371): Homolog of NCBI NO: 7211741 NR Description: papain-like cysteine proteinase isoform I
  misc_feature (6)..(371): Homolog of NCBI NO: 7381219 NR Description: papain-like cysteine proteinase isoform I
  misc_feature (6)..(371): Homolog of NCBI NO: 7211743 NR Description: papain-like cysteine proteinase isoform II
  misc_feature (9)..(371): Homolog of NCBI NO: 7211745 NR Description: papain-like cysteine proteinase isoform III
  misc_feature (1)..(371): Homolog of NCBI NO: 4757570 NR Description: cysteine proteinase precursor [Solanum melongena]
  misc_feature (6)..(371): Homolog of NCBI NO: 13491752 NR Description: cysteine protease [Ipomoea batatas]
  misc_feature (9)..(371): Homolog of NCBI NO: 7211745 NR Description: papain-like cysteine proteinase isoform III
  misc_feature (6)..(371): Homolog of NCBI NO: 7211743 NR Description: papain-like cysteine proteinase isoform II
  misc_feature (6)..(371): Homolog of NCBI NO: 7381219 NR Description: papain-like cysteine proteinase isoform I
  misc_feature (6)..(371): Homolog of NCBI NO: 7211741 NR Description: papain-like cysteine proteinase isoform I
  misc_feature (1)..(373): Homolog of NCBI NO: 18414611 NR Description: cysteine proteinase

SEQ ID NO: 30735 - protein, 214 aa, Arabidopsis thaliana; identical to SEQ ID NO: 22448
  peptide (1)..(214): Ceres Seq. ID no. 12394792
  misc_feature (1)..(207): Pfam Name: Papain family cysteine protease Pfam Description: Papain family cysteine protease
  misc_feature (1)..(207): Pfam Name: Papain family cysteine protease Pfam Description: Papain family cysteine protease
  misc_feature (1)..(212): Homolog of NCBI NO: 7435793 NR Description: probable cysteine proteinase (EC 3.4.22.-)
  misc_feature (1)..(212): Homolog of NCBI NO: 13491752 NR Description: cysteine protease [Ipomoea batatas]
  misc_feature (1)..(212): Homolog of NCBI NO: 5051468 NR Description: putative preprocysteine proteinase [Nicotiana
  misc_feature (1)..(212): Homolog of NCBI NO: 4757570 NR Description: cysteine proteinase precursor [Solanum melongena]
  misc_feature (1)..(212): Homolog of NCBI NO: 7381221 NR Description: papain-like cysteine proteinase isoform II
  misc_feature (1)..(212): Homolog of NCBI NO: 7211743 NR Description: papain-like cysteine proteinase isoform II
  misc_feature (1)..(212): Homolog of NCBI NO: 7211741 NR Description: papain-like cysteine proteinase isoform I
  misc_feature (1)..(212): Homolog of NCBI NO: 7211745 NR Description: papain-like cysteine proteinase isoform III
  misc_feature (1)..(212): Homolog of NCBI NO: 7381221 NR Description: papain-like cysteine proteinase isoform II
  misc_feature (1)..(212): Homolog of NCBI NO: 4757570 NR Description: cysteine proteinase precursor [Solanum melongena]
  misc_feature (1)..(212): Homolog of NCBI NO: 5051468 NR Description: putative preprocysteine proteinase [Nicotiana
  misc_feature (1)..(212): Homolog of NCBI NO: 13491752 NR Description: cysteine protease [Ipomoea batatas]
  misc_feature (1)..(212): Homolog of NCBI NO: 7435793 NR Description: probable cysteine proteinase (EC 3.4.22.-)
  misc_feature (1)..(214): Homolog of NCBI NO: 18414611 NR Description: cysteine proteinase
  misc_feature (1)..(212): Homolog of NCBI NO: 7381219 NR Description: papain-like cysteine proteinase isoform I
  misc_feature (1)..(212): Homolog of NCBI NO: 7211745 NR Description: papain-like cysteine proteinase isoform III
  misc_feature (1)..(212): Homolog of NCBI NO: 7211743 NR Description: papain-like cysteine proteinase isoform II
  misc_feature (1)..(212): Homolog of NCBI NO: 7381219 NR Description: papain-like cysteine proteinase isoform I
  misc_feature (1)..(212): Homolog of NCBI NO: 7211741 NR Description: papain-like cysteine proteinase isoform I
  misc_feature (1)..(214): Homolog of NCBI NO: 18414611 NR Description: cysteine proteinase

SEQ ID NO: 30736 - DNA, 722 bp, Arabidopsis thaliana
  misc_feature (1)..(722): Ceres Seq. ID no. 12332196
  misc_feature: MA Experiment ID: 108434 Result: Up-regulated in Transcription
  misc_feature: MA Experiment 108434 PARAMETER Experiment Name: At_Root_Tips_cDNA_P Parameter: Tissue Value: Root Tips
  misc_feature: MA Experiment ID: 108461 Result: Up-regulated in Transcription
  misc_feature: MA Experiment 108461 PARAMETER Experiment Name: At_Germinating_Seeds_cDNA_P Parameter: Age (day) Value: 1 vs. 0
  misc_feature: MA Experiment 108461 PARAMETER Experiment Name: At_Germinating_Seeds_cDNA_P Parameter: Tissue Value: Germinating Seeds
  misc_feature: MA Experiment ID: 108573 Result: Down-regulated in Transcription
  misc_feature: MA Experiment 108573 PARAMETER Experiment Name: At_Drought_cDNA_P Parameter: Timepoint (hr) Value: 6
  misc_feature: MA Experiment 108573 PARAMETER Experiment Name: At_Drought_cDNA_P Parameter: Tissue Value: Aerial
  misc_feature: MA Experiment 108573 PARAMETER Experiment Name: At_Drought_cDNA_P Parameter: Treatment Value: Drought vs. No Drought
  misc_feature: MA Experiment ID: 108585 Result: Down-regulated in Transcription
  misc_feature: MA Experiment 108585 PARAMETER Experiment Name: At_5mM_NaNP_cDNA_P Parameter: Timepoint (hr) Value: 6
  misc_feature: MA Experiment 108585 PARAMETER Experiment Name: At_5mM_NaNP_cDNA_P Parameter: Tissue Value: Aerial
  misc_feature: MA Experiment 108585 PARAMETER Experiment Name: At_5mM_NaNP_cDNA_P Parameter: Treatment Value: null
  misc_feature: MA Experiment ID: 108595 Result: Down-regulated in Transcription
  misc_feature: MA Experiment 108595 PARAMETER Experiment Name: At_Ler-pi_Ovule_cDNA_P Parameter: Plant Line Value: null
  misc_feature: MA Experiment ID: 20000069 Result: Down-regulated in Transcription
  misc_feature: MA Experiment 20000069 PARAMETER Experiment Name: At_100uM_ABA_Mutants_cDNA_P Parameter: Plant Line Value: CS23
  misc_feature: MA Experiment 20000069 PARAMETER Experiment Name: At_100uM_ABA_Mutants_cDNA_P Parameter: Timepoint (hr) Value: 6
  misc_feature: MA Experiment 20000069 PARAMETER Experiment Name: At_100uM_ABA_Mutants_cDNA_P Parameter: Tissue Value: Aerial
  misc_feature: MA Experiment 20000069 PARAMETER Experiment Name: At_100uM_ABA_Mutants_cDNA_P Parameter: Treatment Value: 100uM ABA vs. No Treatment
  misc_feature: MA Experiment ID: 20000070 Result: Down-regulated in Transcription
  misc_feature: MA Experiment 20000070 PARAMETER Experiment Name: At_100uM_ABA_Mutants_cDNA_P Parameter: Plant Line Value: CS24
  misc_feature: MA Experiment 20000070 PARAMETER Experiment Name: At_100uM_ABA_Mutants_cDNA_P Parameter: Timepoint (hr) Value: 6
  misc_feature: MA Experiment 20000070 PARAMETER Experiment Name: At_100uM_ABA_Mutants_cDNA_P Parameter: Tissue Value: Aerial
  misc_feature: MA Experiment 20000070 PARAMETER Experiment Name: At_100uM_ABA_Mutants_cDNA_P Parameter: Treatment Value: 100uM ABA vs. No Treatment
  misc_feature: MA Experiment ID: 20000071 Result: Down-regulated in Transcription
  misc_feature: MA Experiment 20000071 PARAMETER Experiment Name: At_100uM_ABA_Mutants_cDNA_P Parameter: Plant Line Value: CS8104
  misc_feature: MA Experiment 20000071 PARAMETER Experiment Name: At_100uM_ABA_Mutants_cDNA_P Parameter: Timepoint (hr) Value: 6
  misc_feature: MA Experiment 20000071 PARAMETER Experiment Name: At_100uM_ABA_Mutants_cDNA_P Parameter: Tissue Value: Aerial
  misc_feature: MA Experiment 20000071 PARAMETER Experiment Name: At_100uM_ABA_Mutants_cDNA_P Parameter: Treatment Value: 100uM ABA vs. No Treatment
  misc_feature: MA Experiment ID: 20000072 Result: Down-regulated in Transcription
  misc_feature: MA Experiment 20000072 PARAMETER Experiment Name: At_100uM_ABA_Mutants_cDNA_P Parameter: Plant Line Value: CS8105
  misc_feature: MA Experiment 20000072 PARAMETER Experiment Name: At_100uM_ABA_Mutants_cDNA_P Parameter: Timepoint (hr) Value: 6
  misc_feature: MA Experiment 20000072 PARAMETER Experiment Name: At_100uM_ABA_Mutants_cDNA_P Parameter: Tissue Value: Aerial
  misc_feature: MA Experiment 20000072 PARAMETER Experiment Name: At_100uM_ABA_Mutants_cDNA_P Parameter: Treatment Value: 100uM ABA vs. No Treatment
  misc_feature: MA Experiment ID: 20000180 Result: Up-regulated in Transcription
  misc_feature: MA Experiment 20000180 PARAMETER Experiment Name: At_Germinating_Seeds_P Parameter: Age (hr) Value: 24 vs. 0
  misc_feature: MA Experiment 20000180 PARAMETER Experiment Name: At_Germinating_Seeds_P Parameter: Tissue Value: Germinating Seeds
  misc_feature: MA Experiment ID: 20000184 Result: Up-regulated in Transcription
  misc_feature: MA Experiment 20000184 PARAMETER Experiment Name: At_Shoots__P Parameter: Age (day) Value: 7
  misc_feature: MA Experiment 20000184 PARAMETER Experiment Name: At_Shoots__P Parameter: Tissue Value: Shoots vs. Whole Plant
  misc_feature: MA Experiment ID: 20000185 Result: Down-regulated in Transcription
  misc_feature: MA Experiment 20000185 PARAMETER Experiment Name: At_Roots__P Parameter: Age (day) Value: 7 vs. 21
  misc_feature: MA Experiment 20000185 PARAMETER Experiment Name: At_Roots__P Parameter: Organism Value: A. thaliana
  misc_feature: MA Experiment 20000185 PARAMETER Experiment Name: At_Roots__P Parameter: Tissue Value: Roots vs. Whole Plant
  misc_feature: MA Experiment ID: 20000234 Result: Up-regulated in Transcription
  misc_feature: MA Experiment 20000234 PARAMETER Experiment Name: At_Siliques_P Parameter: Age (day) Value: 21
  misc_feature: MA Experiment 20000234 PARAMETER Experiment Name: At_Siliques_P Parameter: Organism Value: A. thaliana
  misc_feature: MA Experiment 20000234 PARAMETER Experiment Name: At_Siliques_P Parameter: Plant Line Value: WS
  misc_feature: MA Experiment 20000234 PARAMETER Experiment Name: At_Siliques_P Parameter: Tissue Value: Less Than 5mm Siliques vs. Whole Plant
  misc_feature: MA Experiment ID: 20000235 Result: Up-regulated in Transcription
  misc_feature: MA Experiment 20000235 PARAMETER Experiment Name: At_Siliques_P Parameter: Age (day) Value: 21
  misc_feature: MA Experiment 20000235 PARAMETER Experiment Name: At_Siliques_P Parameter: Organism Value: A. thaliana
  misc_feature: MA Experiment 20000235 PARAMETER Experiment Name: At_Siliques_P Parameter: Plant Line Value: WS
  misc_feature: MA Experiment 20000235 PARAMETER Experiment Name: At_Siliques_P Parameter: Tissue Value: 5-10mm Siliques vs. Whole Plant
  misc_feature: MA Experiment ID: 20000437 Result: Down-regulated in Transcription
  misc_feature: MA Experiment 20000437 PARAMETER Experiment Name: At_Drought_P Parameter: Age (day) Value: 8
  misc_feature: MA Experiment 20000437 PARAMETER Experiment Name: At_Drought_P Parameter: Organism Value: A. thaliana
  misc_feature: MA Experiment 20000437 PARAMETER Experiment Name: At_Drought_P Parameter: Plant Line Value: WS
  misc_feature: MA Experiment 20000437 PARAMETER Experiment Name: At_Drought_P Parameter: Timepoint (hr) Value: 24
  misc_feature: MA Experiment 20000437 PARAMETER Experiment Name: At_Drought_P Parameter: Tissue Value: Whole Plant
  misc_feature: MA Experiment 20000437 PARAMETER Experiment Name: At_Drought_P Parameter: Treatment Value: Drought vs. No Drought
  misc_feature: MA Experiment ID: 20000438 Result: Up-regulated in Transcription
  misc_feature: MA Experiment 20000438 PARAMETER Experiment Name: At_Shoots__P Parameter: Age (day) Value: 14
  misc_feature: MA Experiment 20000438 PARAMETER Experiment Name: At_Shoots__P Parameter: Tissue Value: Shoots vs. Whole Plant
  misc_feature: MA Experiment ID: 20000439 Result: Down-regulated in Transcription
  misc_feature: MA Experiment 20000439 PARAMETER Experiment Name: At_Roots__P Parameter: Age (day) Value: 14 vs. 21
  misc_feature: MA Experiment 20000439 PARAMETER Experiment Name: At_Roots__P Parameter: Organism Value: A. thaliana
  misc_feature: MA Experiment 20000439 PARAMETER Experiment Name: At_Roots__P Parameter: Tissue Value: Roots vs. Whole Plant
  misc_feature: MA Experiment ID: 20000794 Result: Down-regulated in Transcription
  misc_feature: MA Experiment 20000794 PARAMETER Experiment Name: At_Petals_P Parameter: Age (day) Value: 23-25 days
  misc_feature: MA Experiment 20000794 PARAMETER Experiment Name: At_Petals_P Parameter: Plant Line Value: WS
  misc_feature: MA Experiment 20000794 PARAMETER Experiment Name: At_Petals_P Parameter: Tissue Value: Petals vs. Whole plant
  misc_feature: MA Experiment ID: 20001248 Result: Down-regulated in Transcription
  misc_feature: MA Experiment 20001248 PARAMETER Experiment Name: At_Far-red-induction_P Parameter: Age (day) Value: 7
  misc_feature: MA Experiment 20001248 PARAMETER Experiment Name: At_Far-red-induction_P Parameter: Light Value: Far-red vs. White
  misc_feature: MA Experiment 20001248 PARAMETER Experiment Name: At_Far-red-induction_P Parameter: Organism Value: A. thaliana
  misc_feature: MA Experiment 20001248 PARAMETER Experiment Name: At_Far-red-induction_P Parameter: Plant Line Value: Columbia
  misc_feature: MA Experiment 20001248 PARAMETER Experiment Name: At_Far-red-induction_P Parameter: Timepoint (hr) Value: 4
  misc_feature: MA Experiment 20001248 PARAMETER Experiment Name: At_Far-red-induction_P Parameter: Tissue Value: Whole Plant
  misc_feature: MA Experiment ID: 20001757 Result: Up-regulated in Transcription
  misc_feature: MA Experiment 20001757 PARAMETER Experiment Name: At_50mM_NH4NO3_L-to-H_P Parameter: Timepoint (hr) Value: 6
  misc_feature: MA Experiment 20001757 PARAMETER Experiment Name: At_50mM_NH4NO3_L-to-H_P Parameter: Tissue Value: Leaf
  misc_feature: MA Experiment 20001757 PARAMETER Experiment Name: At_50mM_NH4NO3_L-to-H_P Parameter: Treatment Value: 50mM NH4NO3 vs 100mM Mannitol
  misc_feature: MA Experiment ID: 20001904 Result: Down-regulated in Transcription
  misc_feature: MA Experiment 20001904 PARAMETER Experiment Name: At_Drought_Reproduction_P Parameter: Age (day) Value: 37
  misc_feature: MA Experiment 20001904 PARAMETER Experiment Name: At_Drought_Reproduction_P Parameter: Organism Value: A. thaliana
  misc_feature: MA Experiment 20001904 PARAMETER Experiment Name: At_Drought_Reproduction_P Parameter: Plant Line Value: WS
  misc_feature: MA Experiment 20001904 PARAMETER Experiment Name: At_Drought_Reproduction_P Parameter: Timepoint (day) Value: 7
  misc_feature: MA Experiment 20001904 PARAMETER Experiment Name: At_Drought_Reproduction_P Parameter: Tissue Value: Rosettes
  misc_feature: MA Experiment 20001904 PARAMETER Experiment Name: At_Drought_Reproduction_P Parameter: Treatment Value: Drought vs. No Drought
  misc_feature: MA Experiment ID: 20001906 Result: Down-regulated in Transcription
  misc_feature: MA Experiment 20001906 PARAMETER Experiment Name: At_Drought_Reproduction_P Parameter: Age (day) Value: 35
  misc_feature: MA Experiment 20001906 PARAMETER Experiment Name: At_Drought_Reproduction_P Parameter: Organism Value: A. thaliana
  misc_feature: MA Experiment 20001906 PARAMETER Experiment Name: At_Drought_Reproduction_P Parameter: Plant Line Value: WS
  misc_feature: MA Experiment 20001906 PARAMETER Experiment Name: At_Drought_Reproduction_P Parameter: Timepoint (day) Value: 5
  misc_feature: MA Experiment 20001906 PARAMETER Experiment Name: At_Drought_Reproduction_P Parameter: Tissue Value: Siliques
  misc_feature: MA Experiment 20001906 PARAMETER Experiment Name: At_Drought_Reproduction_P Parameter: Treatment Value: Drought vs. No Drought
aaaatgagtggataatacaaccactgaatctgttttgctttagttggaagcattaagagaacagccatggcttcttcttcaatctcattctcctgtgcaccttctttggccacctcactcttctccaccacttcttcttccccaaggctgctctcctctagatttctcggaacccgaaacttaaagcttcggatccgacctgccagactaggaccctccaatggttcaagaaccacttgctggttcaagttcggcaagaatggtgtcgatgctgaaaatgccggaatctatggcagccagtctcgagatgatttcgacagagacgacgtcgaacagtatttcaactacatgggtatgcttgcagtagaaggaacctattcaaagatggaagctcttcttaacctaaacattcacccagttgatatcttgttgatgttagccgctacagaaggtgacagacctaagatcgaggagcttctcaaagccggtgctgattattcggtcaaggacgctgatggaagaaccgctatcgacagagccaacagtgaagagatccgtgatttgatccttggctactcgactcaaaaggcttgactccgcttggttttaatacacaggaacaacacaagttatgttcttgagttttgaaatgtttgtgtttgctagaacaaactgtctttctgtgttccgcggatgagtagattataaaatccatcttctcc

SEQ ID NO: 30737 - protein, 175 aa, Arabidopsis thaliana
  peptide (1)..(175): Ceres Seq. ID no. 12332197
  misc_feature (95)..(175): Homolog of NCBI NO: 33146521 NR Description: unknown protein [Oryza sativa (japonica
  misc_feature (1)..(175): Homolog of NCBI NO: 34901972 NR Description: hypothetical protein~similar to Arabidopsis
  misc_feature (1)..(175): Homolog of NCBI NO: 18403267 NR Description: expressed protein
  misc_feature (1)..(175): Homolog of NCBI NO: 25373264 NR Description: unknown protein [imported] - Arabidopsis thaliana
MASSSISFSCAPSLATSLFSTTSSSPRLLSSRFLGTRNLKLRIRPARLGPSNGSRTTCWFKFGKNGVDAENAGIYGSQSRDDFDRDDVEQYFNYMGMLAVEGTYSKMEALLNLNIHPVDILLMLAATEGDRPKIEELLKAGADYSVKDADGRTAIDRANSEEIRDLILGYSTQKA

SEQ ID NO: 30738 - DNA, 780 bp, Arabidopsis thaliana
  misc_feature (1)..(780): Ceres Seq. ID no. 12334285
  misc_feature: MA Experiment ID: 108595 Result: Down-regulated in Transcription
  misc_feature: MA Experiment 108595 PARAMETER Experiment Name: At_Ler-pi_Ovule_cDNA_P Parameter: Plant Line Value: null
  misc_feature: MA Experiment ID: 20000111 Result: Down-regulated in Transcription
  misc_feature: MA Experiment 20000111 PARAMETER Experiment Name: At_42deg_Heat_cDNA_P Parameter: Temperature (deg C) Value: 42 vs. 22
  misc_feature: MA Experiment 20000111 PARAMETER Experiment Name: At_42deg_Heat_cDNA_P Parameter: Timepoint (hr) Value: 6
  misc_feature: MA Experiment 20000111 PARAMETER Experiment Name: At_42deg_Heat_cDNA_P Parameter: Tissue Value: Aerial
  misc_feature: MA Experiment ID: 20000113 Result: Down-regulated in Transcription
  misc_feature: MA Experiment 20000113 PARAMETER Experiment Name: At_42deg_Heat_cDNA_P Parameter: Temperature (deg C) Value: 42 vs. 22
  misc_feature: MA Experiment 20000113 PARAMETER Experiment Name: At_42deg_Heat_cDNA_P Parameter: Timepoint (hr) Value: 8
  misc_feature: MA Experiment 20000113 PARAMETER Experiment Name: At_42deg_Heat_cDNA_P Parameter: Tissue Value: Aerial
agatagagaaaggaaatcgaattaaaatcttcgtcagattcgagagacgacgacgacgaacttgttgttctcgattatcatcagcagctcccttcaaaaaccctaactctctgagctcgatcgacaagtgataatggccaacagtaatttgccgcgaagaatcatcaaggaaactcaacgtctgctcagtgaaccggctcccggtataagtgcctctccatctgaggataatatgcggtatttcaacgttatgattcttggtcctacacaatcaccttatgaaggaggagttttcaagttggagctctttttgcctgaagaataccctatggcagctcccaaggttaggtttctcacaaagatataccatcctaacattgacaagcttggaagaatctgtcttgatattctcaaggacaaatggagccctgcactacaaatacgaacagtgctcttaagtattcaagctcttctgagtgcaccaaacccagatgatccgctttctgagaacattgctaagcactggaagagtaatgaggcagaagctgtggatacagctaaggaatggacccgtctttatgcaagcggcgcatgataaattggagggtgaaaactgaaaagatctctttcatccaaataacattacatttgctgaaatctatctcaacatcaaagttataagaaagcttatattttgctggttatttccccccgccactgctctgtaatctctcttaatcacactgtatcattactcctaggatcaatactcgttcttat

SEQ ID NO: 30739 - protein, 153 aa, Arabidopsis thaliana
  peptide (1)..(153): Ceres Seq. ID no. 12334286
  misc_feature (4)..(150): Homolog of NCBI NO: 27882519 NR Description: Similar to ubiquitin-conjugating enzyme E2N
  misc_feature (4)..(150): Homolog of NCBI NO: 30583959 NR Description: Homo sapiens ubiquitin-conjugating enzyme E2N
  misc_feature (4)..(150): Homolog of NCBI NO: 28174992 NR Description: similar to ubiquitin-conjugating enzyme E2N [Mus
  misc_feature (4)..(150): Homolog of NCBI NO: 4507793 NR Description: ubiquitin-conjugating enzyme E2N (UBC13 homolog,
  misc_feature (4)..(150): Homolog of NCBI NO: 16758810 NR Description: ubiquitin-conjugating enzyme E2N (homologous to
  misc_feature (1)..(153): Homolog of NCBI NO: 5381319 NR Description: ubiquitin-conjugating enzyme E2 [Catharanthus
  misc_feature (1)..(153): Homolog of NCBI NO: 34911052 NR Description: ubiquitin-conjugating enzyme E2
  misc_feature (1)..(153): Homolog of NCBI NO: 18394416 NR Description: E2, ubiquitin-conjugating enzyme, putative
  misc_feature (1)..(153): Homolog of NCBI NO: 18412149 NR Description: E2, ubiquitin-conjugating enzyme, putative
  misc_feature (1)..(141): Homolog of NCBI NO: 25293666 NR Description: hypothetical protein F9K20.8 [imported] -
MANSNLPRRIIKETQRLLSEPAPGISASPSEDNMRYFNVMILGPTQSPYEGGVFKLELFLPEEYPMAAPKVRFLTKIYHPNIDKLGRICLDILKDKWSPALQIRTVLLSIQALLSAPNPDDPLSENIAKHWKSNEAEAVDTAKEWTRLYASGA

SEQ ID NO: 30740 - protein, 120 aa, Arabidopsis thaliana
  peptide (1)..(120): Ceres Seq. ID no. 12334287
  misc_feature (1)..(117): Homolog of NCBI NO: 27882519 NR Description: Similar to ubiquitin-conjugating enzyme E2N
  misc_feature (1)..(117): Homolog of NCBI NO: 30583959 NR Description: Homo sapiens ubiquitin-conjugating enzyme E2N
  misc_feature (1)..(117): Homolog of NCBI NO: 28174992 NR Description: similar to ubiquitin-conjugating enzyme E2N [Mus
  misc_feature (1)..(117): Homolog of NCBI NO: 4507793 NR Description: ubiquitin-conjugating enzyme E2N (UBC13 homolog,
  misc_feature (1)..(117): Homolog of NCBI NO: 16758810 NR Description: ubiquitin-conjugating enzyme E2N (homologous to
  misc_feature (1)..(120): Homolog of NCBI NO: 5381319 NR Description: ubiquitin-conjugating enzyme E2 [Catharanthus
  misc_feature (1)..(120): Homolog of NCBI NO: 34911052 NR Description: ubiquitin-conjugating enzyme E2
  misc_feature (1)..(120): Homolog of NCBI NO: 18394416 NR Description: E2, ubiquitin-conjugating enzyme, putative
  misc_feature (1)..(120): Homolog of NCBI NO: 18412149 NR Description: E2, ubiquitin-conjugating enzyme, putative
  misc_feature (1)..(108): Homolog of NCBI NO: 25293666 NR Description: hypothetical protein F9K20.8 [imported] -
MRYFNVMILGPTQSPYEGGVFKLELFLPEEYPMAAPKVRFLTKIYHPNIDKLGRICLDILKDKWSPALQIRTVLLSIQALLSAPNPDDPLSENIAKHWKSNEAEAVDTAKEWTRLYASGA

SEQ ID NO: 30741 - protein, 114 aa, Arabidopsis thaliana
  peptide (1)..(114): Ceres Seq. ID no. 12334288
  misc_feature (1)..(111): Homolog of NCBI NO: 27882519 NR Description: Similar to ubiquitin-conjugating enzyme E2N
  misc_feature (1)..(111): Homolog of NCBI NO: 30583959 NR Description: Homo sapiens ubiquitin-conjugating enzyme E2N
  misc_feature (1)..(111): Homolog of NCBI NO: 28174992 NR Description: similar to ubiquitin-conjugating enzyme E2N [Mus
  misc_feature (1)..(111): Homolog of NCBI NO: 4507793 NR Description: ubiquitin-conjugating enzyme E2N (UBC13 homolog,
  misc_feature (1)..(111): Homolog of NCBI NO: 16758810 NR Description: ubiquitin-conjugating enzyme E2N (homologous to
  misc_feature (1)..(114): Homolog of NCBI NO: 5381319 NR Description: ubiquitin-conjugating enzyme E2 [Catharanthus
  misc_feature (1)..(114): Homolog of NCBI NO: 34911052 NR Description: ubiquitin-conjugating enzyme E2
  misc_feature (1)..(114): Homolog of NCBI NO: 18394416 NR Description: E2, ubiquitin-conjugating enzyme, putative
  misc_feature (1)..(114): Homolog of NCBI NO: 18412149 NR Description: E2, ubiquitin-conjugating enzyme, putative
  misc_feature (1)..(102): Homolog of NCBI NO: 25293666 NR Description: hypothetical protein F9K20.8 [imported] -
MILGPTQSPYEGGVFKLELFLPEEYPMAAPKVRFLTKIYHPNIDKLGRICLDILKDKWSPALQIRTVLLSIQALLSAPNPDDPLSENIAKHWKSNEAEAVDTAKEWTRLYASGA

SEQ ID NO: 30742 - DNA, 1235 bp, Arabidopsis thaliana
  misc_feature (1)..(1235): Ceres Seq. ID no. 13490261
  misc_feature: MA Experiment ID: 108434 Result: Up-regulated in Transcription
  misc_feature: MA Experiment 108434 PARAMETER Experiment Name: At_Root_Tips_cDNA_P Parameter: Tissue Value: Root Tips
  misc_feature: MA Experiment ID: 108488 Result: Up-regulated in Transcription
  misc_feature: MA Experiment ID: 108595 Result: Down-regulated in Transcription
  misc_feature: MA Experiment 108595 PARAMETER Experiment Name: At_Ler-pi_Ovule_cDNA_P Parameter: Plant Line Value: null
  misc_feature: MA Experiment ID: 20000069 Result: Down-regulated in Transcription
  misc_feature: MA Experiment 20000069 PARAMETER Experiment Name: At_100uM_ABA_Mutants_cDNA_P Parameter: Plant Line Value: CS23
  misc_feature: MA Experiment 20000069 PARAMETER Experiment Name: At_100uM_ABA_Mutants_cDNA_P Parameter: Timepoint (hr) Value: 6
  misc_feature: MA Experiment 20000069 PARAMETER Experiment Name: At_100uM_ABA_Mutants_cDNA_P Parameter: Tissue Value: Aerial
  misc_feature: MA Experiment 20000069 PARAMETER Experiment Name: At_100uM_ABA_Mutants_cDNA_P Parameter: Treatment Value: 100uM ABA vs. No Treatment
  misc_feature: MA Experiment ID: 20000070 Result: Down-regulated in Transcription
  misc_feature: MA Experiment 20000070 PARAMETER Experiment Name: At_100uM_ABA_Mutants_cDNA_P Parameter: Plant Line Value: CS24
  misc_feature: MA Experiment 20000070 PARAMETER Experiment Name: At_100uM_ABA_Mutants_cDNA_P Parameter: Timepoint (hr) Value: 6
  misc_feature: MA Experiment 20000070 PARAMETER Experiment Name: At_100uM_ABA_Mutants_cDNA_P Parameter: Tissue Value: Aerial
  misc_feature: MA Experiment 20000070 PARAMETER Experiment Name: At_100uM_ABA_Mutants_cDNA_P Parameter: Treatment Value: 100uM ABA vs. No Treatment
  misc_feature: MA Experiment ID: 20000071 Result: Down-regulated in Transcription
  misc_feature: MA Experiment 20000071 PARAMETER Experiment Name: At_100uM_ABA_Mutants_cDNA_P Parameter: Plant Line Value: CS8104
  misc_feature: MA Experiment 20000071 PARAMETER Experiment Name: At_100uM_ABA_Mutants_cDNA_P Parameter: Timepoint (hr) Value: 6
  misc_feature: MA Experiment 20000071 PARAMETER Experiment Name: At_100uM_ABA_Mutants_cDNA_P Parameter: Tissue Value: Aerial
  misc_feature: MA Experiment 20000071 PARAMETER Experiment Name: At_100uM_ABA_Mutants_cDNA_P Parameter: Treatment Value: 100uM ABA vs. No Treatment
  misc_feature: MA Experiment ID: 20000072 Result: Down-regulated in Transcription
  misc_feature: MA Experiment 20000072 PARAMETER Experiment Name: At_100uM_ABA_Mutants_cDNA_P Parameter: Plant Line Value: CS8105
  misc_feature: MA Experiment 20000072 PARAMETER Experiment Name: At_100uM_ABA_Mutants_cDNA_P Parameter: Timepoint (hr) Value: 6
  misc_feature: MA Experiment 20000072 PARAMETER Experiment Name: At_100uM_ABA_Mutants_cDNA_P Parameter: Tissue Value: Aerial
  misc_feature: MA Experiment 20000072 PARAMETER Experiment Name: At_100uM_ABA_Mutants_cDNA_P Parameter: Treatment Value: 100uM ABA vs. No Treatment
  misc_feature: MA Experiment ID: 20000087 Result: Down-regulated in Transcription
  misc_feature: MA Experiment 20000087 PARAMETER Experiment Name: At_100uM_ABA_Mutants_cDNA_P Parameter: Plant Line Value: WS
  misc_feature: MA Experiment 20000087 PARAMETER Experiment Name: At_100uM_ABA_Mutants_cDNA_P Parameter: Timepoint (hr) Value: 6
  misc_feature: MA Experiment 20000087 PARAMETER Experiment Name: At_100uM_ABA_Mutants_cDNA_P Parameter: Tissue Value: Aerial
  misc_feature: MA Experiment 20000087 PARAMETER Experiment Name: At_100uM_ABA_Mutants_cDNA_P Parameter: Treatment Value: 100uM ABA vs. No Treatment
  misc_feature: MA Experiment ID: 20000117 Result: Down-regulated in Transcription
  misc_feature: MA Experiment 20000117 PARAMETER Experiment Name: At_100uM_ABA_Mutants_cDNA_P Parameter: Plant Line Value: Columbia
  misc_feature: MA Experiment 20000117 PARAMETER Experiment Name: At_100uM_ABA_Mutants_cDNA_P Parameter: Timepoint (hr) Value: 6
  misc_feature: MA Experiment 20000117 PARAMETER Experiment Name: At_100uM_ABA_Mutants_cDNA_P Parameter: Tissue Value: Aerial
  misc_feature: MA Experiment 20000117 PARAMETER Experiment Name: At_100uM_ABA_Mutants_cDNA_P Parameter: Treatment Value: 100uM ABA vs. No Treatment
  misc_feature: MA Experiment ID: 20000185 Result: Down-regulated in Transcription
  misc_feature: MA Experiment 20000185 PARAMETER Experiment Name: At_Roots__P Parameter: Age (day) Value: 7 vs. 21
  misc_feature: MA Experiment 20000185 PARAMETER Experiment Name: At_Roots__P Parameter: Organism Value: A. thaliana
  misc_feature: MA Experiment 20000185 PARAMETER Experiment Name: At_Roots__P Parameter: Tissue Value: Roots vs. Whole Plant
  misc_feature: MA Experiment ID: 20000437 Result: Down-regulated in Transcription
  misc_feature: MA Experiment 20000437 PARAMETER Experiment Name: At_Drought_P Parameter: Age (day) Value: 8
  misc_feature: MA Experiment 20000437 PARAMETER Experiment Name: At_Drought_P Parameter: Organism Value: A. thaliana
  misc_feature: MA Experiment 20000437 PARAMETER Experiment Name: At_Drought_P Parameter: Plant Line Value: WS
  misc_feature: MA Experiment 20000437 PARAMETER Experiment Name: At_Drought_P Parameter: Timepoint (hr) Value: 24
  misc_feature: MA Experiment 20000437 PARAMETER Experiment Name: At_Drought_P Parameter: Tissue Value: Whole Plant
  misc_feature: MA Experiment 20000437 PARAMETER Experiment Name: At_Drought_P Parameter: Treatment Value: Drought vs. No Drought
  misc_feature: MA Experiment ID: 20000439 Result: Down-regulated in Transcription
  misc_feature: MA Experiment 20000439 PARAMETER Experiment Name: At_Roots__P Parameter: Age (day) Value: 14 vs. 21
  misc_feature: MA Experiment 20000439 PARAMETER Experiment Name: At_Roots__P Parameter: Organism Value: A. thaliana
  misc_feature: MA Experiment 20000439 PARAMETER Experiment Name: At_Roots__P Parameter: Tissue Value: Roots vs. Whole Plant
  misc_feature: MA Experiment ID: 20001450 Result: Down-regulated in Transcription
  misc_feature: MA Experiment 20001450 PARAMETER Experiment Name: At_Far-red-induction_P Parameter: Age (day) Value: 7
  misc_feature: MA Experiment 20001450 PARAMETER Experiment Name: At_Far-red-induction_P Parameter: Light Value: Far-red vs. White
  misc_feature: MA Experiment 20001450 PARAMETER Experiment Name: At_Far-red-induction_P Parameter: Organism Value: A. thaliana
  misc_feature: MA Experiment 20001450 PARAMETER Experiment Name: At_Far-red-induction_P Parameter: Plant Line Value: Columbia
  misc_feature: MA Experiment 20001450 PARAMETER Experiment Name: At_Far-red-induction_P Parameter: Timepoint (hr) Value: 8
  misc_feature: MA Experiment 20001450 PARAMETER Experiment Name: At_Far-red-induction_P Parameter: Tissue Value: Whole Plant
  misc_feature: MA Experiment ID: 20001905 Result: Down-regulated in Transcription
  misc_feature: MA Experiment 20001905 PARAMETER Experiment Name: At_Drought_Reproduction_P Parameter: Age (day) Value: 40
  misc_feature: MA Experiment 20001905 PARAMETER Experiment Name: At_Drought_Reproduction_P Parameter: Organism Value: A. thaliana
  misc_feature: MA Experiment 20001905 PARAMETER Experiment Name: At_Drought_Reproduction_P Parameter: Plant Line Value: WS
  misc_feature: MA Experiment 20001905 PARAMETER Experiment Name: At_Drought_Reproduction_P Parameter: Timepoint (day) Value: 10
  misc_feature: MA Experiment 20001905 PARAMETER Experiment Name: At_Drought_Reproduction_P Parameter: Tissue Value: Rosettes
  misc_feature: MA Experiment 20001905 PARAMETER Experiment Name: At_Drought_Reproduction_P Parameter: Treatment Value: Drought vs. No Drought
aaacagagcaagctttccttcttatcccgaacaattcggtctgcttcgtctccctccctttcaattttcgtagacgaaccaacgaaaggtcttttctagtctagtcacttcacttctacggctactgccatggcggcttctttctcttccactgctcccacgacaccggttcttcgattcagagccaactactccaagcctctcctctctctcccagattcgtgtttgaggataatctcttcggcgatatctccctctacacgcttaattgcgtgttcgttcaagacagacaagcttccgctcggtgccggcgtcaatctctccggtggccccgttgtcaagcgctctctacagaagagattggtgataaggtctgctactattgaagaaatagaagcagagaagtctgctattgagactgatgttaaatcaaagatggagaagactattgaaacgcttcggacgagtttcaactccataaggactgggagatccaatgcagcgatgcttgacaagattgaggtggaatactatggaagtccagtaagtttgaaaagcatagcccaaatcagtactccggatggaagttctcttttgctgcaaccatatgacaaatccagcttgaaggctatagagaaagccattgtgaattctgatcttggtgtgacccctaataacgatggagatgttattcgactgtccttgcctcccctcacatctgacagaagaaaggaactatcaaaggttgttgctaaacagtctgaagaagggaaggttgcactgaggaacattaggagagatgccttgaaatcttatgataaactcgagaaggagaagaagctgtcagaagacaacgtgaaggatttgtcaagtgatttgcagaaactaattgatgtatacatgaagaagatagaggagctctacaaacagaaagaaaaggaattgatgaaggtgtgaccataatggttgttaggggaggagacgtaattcaacaatctggtaaaatcccgcaatttccaatgccttcgtttcttttactatttgccctgatgtttccttggggtacaagcatgtcttttgggaattgagagcaactttgtttaaattttcggttgcaaaatttttagaagaagcctctgatattttgtttcttttattaaaggatccctctttgtacagcaaaactcttgttaattttggttcatcaccccaattatcaaatcttatttttggct

SEQ ID NO: 30743 - protein, 275 aa, Arabidopsis thaliana
  peptide (1)..(275): Ceres Seq. ID no. 13490262
  misc_feature (109)..(273): Pfam Name: Ribosome recycling factor Pfam Description: Ribosome recycling factor
  misc_feature (98)..(275): Homolog of NCBI NO: 16331151 NR Description: ribosome releasing factor [Synechocystis sp. PCC
  misc_feature (98)..(275): Homolog of NCBI NO: 22297803 NR Description: ribosome releasing factor [Thermosynechococcus
  misc_feature (95)..(275): Homolog of NCBI NO: 23126085 NR Description: hypothetical protein [Nostoc punctiforme]
  misc_feature (98)..(275): Homolog of NCBI NO: 17228703 NR Description: ribosome recycling factor [Nostoc sp. PCC 7120]
  misc_feature (121)..(275): Homolog of NCBI NO: 629661 NR Description: ribosome releasing factor - carrot
  misc_feature (50)..(275): Homolog of NCBI NO: 34394208 NR Description: putative Ribosome recycling factor, chloroplast
  misc_feature (75)..(275): Homolog of NCBI NO: 7404451 NR Description: RIBOSOME RECYCLING FACTOR, CHLOROPLAST PRECURSOR
  misc_feature (58)..(275): Homolog of NCBI NO: 7388105 NR Description: Ribosome recycling factor, chloroplast precursor
  misc_feature (1)..(275): Homolog of NCBI NO: 11277801 NR Description: hypothetical protein F16M2.40 - Arabidopsis
  misc_feature (1)..(275): Homolog of NCBI NO: 18412657 NR Description: expressed protein [Arabidopsis thaliana]
MAASFSSTAPTTPVLRFRANYSKPLLSLPDSCLRIISSAISPSTRLIACSFKTDKLPLGAGVNLSGGPVVKRSLQKRLVIRSATIEEIEAEKSAIETDVKSKMEKTIETLRTSFNSIRTGRSNAAMLDKIEVEYYGSPVSLKSIAQISTPDGSSLLLQPYDKSSLKAIEKAIVNSDLGVTPNNDGDVIRLSLPPLTSDRRKELSKVVAKQSEEGKVALRNIRRDALKSYDKLEKEKKLSEDNVKDLSSDLQKLIDVYMKKIEELYKQKEKELMKV

SEQ ID NO: 30744 - protein, 173 aa, Arabidopsis thaliana
  peptide (1)..(173): Ceres Seq. ID no. 13490263
  misc_feature (7)..(171): Pfam Name: Ribosome recycling factor Pfam Description: Ribosome recycling factor
  misc_feature (1)..(173): Homolog of NCBI NO: 16331151 NR Description: ribosome releasing factor [Synechocystis sp. PCC
  misc_feature (1)..(173): Homolog of NCBI NO: 22297803 NR Description: ribosome releasing factor [Thermosynechococcus
  misc_feature (1)..(173): Homolog of NCBI NO: 23126085 NR Description: hypothetical protein [Nostoc punctiforme]
  misc_feature (1)..(173): Homolog of NCBI NO: 17228703 NR Description: ribosome recycling factor [Nostoc sp. PCC 7120]
  misc_feature (19)..(173): Homolog of NCBI NO: 629661 NR Description: ribosome releasing factor - carrot
  misc_feature (1)..(173): Homolog of NCBI NO: 34394208 NR Description: putative Ribosome recycling factor, chloroplast
  misc_feature (1)..(173): Homolog of NCBI NO: 7404451 NR Description: RIBOSOME RECYCLING FACTOR, CHLOROPLAST PRECURSOR
  misc_feature (1)..(173): Homolog of NCBI NO: 7388105 NR Description: Ribosome recycling factor, chloroplast precursor
  misc_feature (1)..(173): Homolog of NCBI NO: 11277801 NR Description: hypothetical protein F16M2.40 - Arabidopsis
  misc_feature (1)..(173): Homolog of NCBI NO: 18412657 NR Description: expressed protein [Arabidopsis thaliana]
MEKTIETLRTSFNSIRTGRSNAAMLDKIEVEYYGSPVSLKSIAQISTPDGSSLLLQPYDKSSLKAIEKAIVNSDLGVTPNNDGDVIRLSLPPLTSDRRKELSKVVAKQSEEGKVALRNIRRDALKSYDKLEKEKKLSEDNVKDLSSDLQKLIDVYMKKIEELYKQKEKELMKV

SEQ ID NO: 30745 - protein, 150 aa, Arabidopsis thaliana
  peptide (1)..(150): Ceres Seq. ID no. 13490264
  misc_feature (1)..(148): Pfam Name: Ribosome recycling factor Pfam Description: Ribosome recycling factor
  misc_feature (1)..(150): Homolog of NCBI NO: 16331151 NR Description: ribosome releasing factor [Synechocystis sp. PCC
  misc_feature (1)..(150): Homolog of NCBI NO: 22297803 NR Description: ribosome releasing factor [Thermosynechococcus
  misc_feature (1)..(150): Homolog of NCBI NO: 23126085 NR Description: hypothetical protein [Nostoc punctiforme]
  misc_feature (1)..(150): Homolog of NCBI NO: 17228703 NR Description: ribosome recycling factor [Nostoc sp. PCC 7120]
  misc_feature (1)..(150): Homolog of NCBI NO: 629661 NR Description: ribosome releasing factor - carrot
  misc_feature (1)..(150): Homolog of NCBI NO: 34394208 NR Description: putative Ribosome recycling factor, chloroplast
  misc_feature (1)..(150): Homolog of NCBI NO: 7404451 NR Description: RIBOSOME RECYCLING FACTOR, CHLOROPLAST PRECURSOR
  misc_feature (1)..(150): Homolog of NCBI NO: 7388105 NR Description: Ribosome recycling factor, chloroplast precursor
  misc_feature (1)..(150): Homolog of NCBI NO: 11277801 NR Description: hypothetical protein F16M2.40 - Arabidopsis
  misc_feature (1)..(150): Homolog of NCBI NO: 18412657 NR Description: expressed protein [Arabidopsis thaliana]
MLDKIEVEYYGSPVSLKSIAQISTPDGSSLLLQPYDKSSLKAIEKAIVNSDLGVTPNNDGDVIRLSLPPLTSDRRKELSKVVAKQSEEGKVALRNIRRDALKSYDKLEKEKKLSEDNVKDLSSDLQKLIDVYMKKIEELYKQKEKELMKV

SEQ ID NO: 30746 - DNA, 1298 bp, Arabidopsis thaliana
  misc_feature (1)..(1298): Ceres Seq. ID no. 12370642
  misc_feature: MA Experiment ID: 108434 Result: Down-regulated in Transcription
  misc_feature: MA Experiment 108434 PARAMETER Experiment Name: At_Root_Tips_cDNA_P Parameter: Tissue Value: Root Tips
  misc_feature: MA Experiment ID: 108579 Result: Up-regulated in Transcription
  misc_feature: MA Experiment 108579 PARAMETER Experiment Name: At_4deg_Cold_cDNA_P Parameter: Temperature (deg C) Value: 4 vs. 22
  misc_feature: MA Experiment 108579 PARAMETER Experiment Name: At_4deg_Cold_cDNA_P Parameter: Timepoint (hr) Value: 6
  misc_feature: MA Experiment 108579 PARAMETER Experiment Name: At_4deg_Cold_cDNA_P Parameter: Tissue Value: Aerial
  misc_feature: MA Experiment ID: 108595 Result: Down-regulated in Transcription
  misc_feature: MA Experiment 108595 PARAMETER Experiment Name: At_Ler-pi_Ovule_cDNA_P Parameter: Plant Line Value: null
  misc_feature: MA Experiment ID: 108668 Result: Down-regulated in Transcription
  misc_feature: MA Experiment 108668 PARAMETER Experiment Name: At_2mM_SA_cDNA_P Parameter: Plant Line Value: WS
  misc_feature: MA Experiment 108668 PARAMETER Experiment Name: At_2mM_SA_cDNA_P Parameter: Timepoint (hr) Value: 6
  misc_feature: MA Experiment 108668 PARAMETER Experiment Name: At_2mM_SA_cDNA_P Parameter: Treatment Value: 2mM SA vs. No Treatment
  misc_feature: MA Experiment ID: 20000071 Result: Up-regulated in Transcription
  misc_feature: MA Experiment 20000071 PARAMETER Experiment Name: At_100uM_ABA_Mutants_cDNA_P Parameter: Plant Line Value: CS8104
  misc_feature: MA Experiment 20000071 PARAMETER Experiment Name: At_100uM_ABA_Mutants_cDNA_P Parameter: Timepoint (hr) Value: 6
  misc_feature: MA Experiment 20000071 PARAMETER Experiment Name: At_100uM_ABA_Mutants_cDNA_P Parameter: Tissue Value: Aerial
  misc_feature: MA Experiment 20000071 PARAMETER Experiment Name: At_100uM_ABA_Mutants_cDNA_P Parameter: Treatment Value: 100uM ABA vs. No Treatment
  misc_feature: MA Experiment ID: 20000093 Result: Down-regulated in Transcription
  misc_feature: MA Experiment 20000093 PARAMETER Experiment Name: At_42deg_Heat_cDNA_P Parameter: Temperature (deg C) Value: 42 vs. 22
  misc_feature: MA Experiment 20000093 PARAMETER Experiment Name: At_42deg_Heat_cDNA_P Parameter: Timepoint (hr) Value: 0.5
  misc_feature: MA Experiment 20000093 PARAMETER Experiment Name: At_42deg_Heat_cDNA_P Parameter: Tissue Value: Aerial
  misc_feature: MA Experiment ID: 20000111 Result: Down-regulated in Transcription
  misc_feature: MA Experiment 20000111 PARAMETER Experiment Name: At_42deg_Heat_cDNA_P Parameter: Temperature (deg C) Value: 42 vs. 22
  misc_feature: MA Experiment 20000111 PARAMETER Experiment Name: At_42deg_Heat_cDNA_P Parameter: Timepoint (hr) Value: 6
  misc_feature: MA Experiment 20000111 PARAMETER Experiment Name: At_42deg_Heat_cDNA_P Parameter: Tissue Value: Aerial
  misc_feature: MA Experiment ID: 20000112 Result: Down-regulated in Transcription
  misc_feature: MA Experiment 20000112 PARAMETER Experiment Name: At_42deg_Heat_cDNA_P Parameter: Temperature (deg C) Value: 42 vs. 22
  misc_feature: MA Experiment 20000112 PARAMETER Experiment Name: At_42deg_Heat_cDNA_P Parameter: Timepoint (hr) Value: 2
  misc_feature: MA Experiment 20000112 PARAMETER Experiment Name: At_42deg_Heat_cDNA_P Parameter: Tissue Value: Aerial
  misc_feature: MA Experiment ID: 20000144 Result: Down-regulated in Transcription
  misc_feature: MA Experiment 20000144 PARAMETER Experiment Name: At_42deg_Heat_cDNA_P Parameter: Temperature (deg C) Value: 42 vs. 22
  misc_feature: MA Experiment 20000144 PARAMETER Experiment Name: At_42deg_Heat_cDNA_P Parameter: Timepoint (hr) Value: 1
  misc_feature: MA Experiment 20000144 PARAMETER Experiment Name: At_42deg_Heat_cDNA_P Parameter: Tissue Value: Aerial
  misc_feature: MA Experiment ID: 20000171 Result: Down-regulated in Transcription
  misc_feature: MA Experiment 20000171 PARAMETER Experiment Name: At_42deg_Heat_P Parameter: Age (day) Value: 14
  misc_feature: MA Experiment 20000171 PARAMETER Experiment Name: At_42deg_Heat_P Parameter: Organism Value: A. thaliana
  misc_feature: MA Experiment 20000171 PARAMETER Experiment Name: At_42deg_Heat_P Parameter: Plant Line Value: WS
  misc_feature: MA Experiment 20000171 PARAMETER Experiment Name: At_42deg_Heat_P Parameter: Temperature (deg C) Value: 42 vs. 22
  misc_feature: MA Experiment 20000171 PARAMETER Experiment Name: At_42deg_Heat_P Parameter: Timepoint (hr) Value: 1
  misc_feature: MA Experiment 20000171 PARAMETER Experiment Name: At_42deg_Heat_P Parameter: Tissue Value: Aerial
  misc_feature: MA Experiment ID: 20000182 Result: Down-regulated in Transcription
  misc_feature: MA Experiment 20000182 PARAMETER Experiment Name: At_2mM_SA_P Parameter: Age (day) Value: 14
  misc_feature: MA Experiment 20000182 PARAMETER Experiment Name: At_2mM_SA_P Parameter: Organism Value: A. thaliana
  misc_feature: MA Experiment 20000182 PARAMETER Experiment Name: At_2mM_SA_P Parameter: Plant Line Value: WS
  misc_feature: MA Experiment 20000182 PARAMETER Experiment Name: At_2mM_SA_P Parameter: Timepoint (hr) Value: 6
  misc_feature: MA Experiment 20000182 PARAMETER Experiment Name: At_2mM_SA_P Parameter: Tissue Value: Aerial
  misc_feature: MA Experiment 20000182 PARAMETER Experiment Name: At_2mM_SA_P Parameter: Treatment Value: 2mM SA vs. No Treatment
  misc_feature: MA Experiment ID: 20000437 Result: Up-regulated in Transcription
  misc_feature: MA Experiment 20000437 PARAMETER Experiment Name: At_Drought_P Parameter: Age (day) Value: 8
  misc_feature: MA Experiment 20000437 PARAMETER Experiment Name: At_Drought_P Parameter: Organism Value: A. thaliana
  misc_feature: MA Experiment 20000437 PARAMETER Experiment Name: At_Drought_P Parameter: Plant Line Value: WS
  misc_feature: MA Experiment 20000437 PARAMETER Experiment Name: At_Drought_P Parameter: Timepoint (hr) Value: 24
  misc_feature: MA Experiment 20000437 PARAMETER Experiment Name: At_Drought_P Parameter: Tissue Value: Whole Plant
  misc_feature: MA Experiment 20000437 PARAMETER Experiment Name: At_Drought_P Parameter: Treatment Value: Drought vs. No Drought
  misc_feature: MA Experiment ID: 20000794 Result: Down-regulated in Transcription
  misc_feature: MA Experiment 20000794 PARAMETER Experiment Name: At_Petals_P Parameter: Age (day) Value: 23-25 days
  misc_feature: MA Experiment 20000794 PARAMETER Experiment Name: At_Petals_P Parameter: Plant Line Value: WS
  misc_feature: MA Experiment 20000794 PARAMETER Experiment Name: At_Petals_P Parameter: Tissue Value: Petals vs. Whole plant
  misc_feature: MA Experiment ID: 20001556 Result: Up-regulated in Transcription
  misc_feature: MA Experiment 20001556 PARAMETER Experiment Name: At_Drought_Soil_Dry_P Parameter: Age (day) Value: 26
  misc_feature: MA Experiment 20001556 PARAMETER Experiment Name: At_Drought_Soil_Dry_P Parameter: Organism Value: A. thaliana
  misc_feature: MA Experiment 20001556 PARAMETER Experiment Name: At_Drought_Soil_Dry_P Parameter: Plant Line Value: WS
  misc_feature: MA Experiment 20001556 PARAMETER Experiment Name: At_Drought_Soil_Dry_P Parameter: Post Timepoint (hr) Value: None
  misc_feature: MA Experiment 20001556 PARAMETER Experiment Name: At_Drought_Soil_Dry_P Parameter: Post-Treatment Value: None
  misc_feature: MA Experiment 20001556 PARAMETER Experiment Name: At_Drought_Soil_Dry_P Parameter: Timepoint (day) Value: 12
  misc_feature: MA Experiment 20001556 PARAMETER Experiment Name: At_Drought_Soil_Dry_P Parameter: Treatment Value: Drought vs. No Drought
  misc_feature: MA Experiment ID: 20001905 Result: Up-regulated in Transcription
  misc_feature: MA Experiment 20001905 PARAMETER Experiment Name: At_Drought_Reproduction_P Parameter: Age (day) Value: 40
  misc_feature: MA Experiment 20001905 PARAMETER Experiment Name: At_Drought_Reproduction_P Parameter: Organism Value: A. thaliana
  misc_feature: MA Experiment 20001905 PARAMETER Experiment Name: At_Drought_Reproduction_P Parameter: Plant Line Value: WS
  misc_feature: MA Experiment 20001905 PARAMETER Experiment Name: At_Drought_Reproduction_P Parameter: Timepoint (day) Value: 10
  misc_feature: MA Experiment 20001905 PARAMETER Experiment Name: At_Drought_Reproduction_P Parameter: Tissue Value: Rosettes
  misc_feature: MA Experiment 20001905 PARAMETER Experiment Name: At_Drought_Reproduction_P Parameter: Treatment Value: Drought vs. No Drought
  misc_feature: MA Experiment ID: 20001908 Result: Up-regulated in Transcription
  misc_feature: MA Experiment 20001908 PARAMETER Experiment Name: At_Drought_Reproduction_P Parameter: Age (day) Value: 40
  misc_feature: MA Experiment 20001908 PARAMETER Experiment Name: At_Drought_Reproduction_P Parameter: Organism Value: A. thaliana
  misc_feature: MA Experiment 20001908 PARAMETER Experiment Name: At_Drought_Reproduction_P Parameter: Plant Line Value: WS
  misc_feature: MA Experiment 20001908 PARAMETER Experiment Name: At_Drought_Reproduction_P Parameter: Timepoint (day) Value: 10
  misc_feature: MA Experiment 20001908 PARAMETER Experiment Name: At_Drought_Reproduction_P Parameter: Tissue Value: Siliques
  misc_feature: MA Experiment 20001908 PARAMETER Experiment Name: At_Drought_Reproduction_P Parameter: Treatment Value: Drought vs. No Drought
  misc_feature: MA Experiment ID: 20001911 Result: Up-regulated in Transcription
  misc_feature: MA Experiment 20001911 PARAMETER Experiment Name: At_Drought_Reproduction_P Parameter: Age (day) Value: 40
  misc_feature: MA Experiment 20001911 PARAMETER Experiment Name: At_Drought_Reproduction_P Parameter: Organism Value: A. thaliana
  misc_feature: MA Experiment 20001911 PARAMETER Experiment Name: At_Drought_Reproduction_P Parameter: Plant Line Value: WS
  misc_feature: MA Experiment 20001911 PARAMETER Experiment Name: At_Drought_Reproduction_P Parameter: Timepoint (day) Value: 10
  misc_feature: MA Experiment 20001911 PARAMETER Experiment Name: At_Drought_Reproduction_P Parameter: Tissue Value: Flowers
  misc_feature: MA Experiment 20001911 PARAMETER Experiment Name: At_Drought_Reproduction_P Parameter: Treatment Value: Drought vs. No Drought
ctctctctctctctctctctttcaatacagctccaaaactcgtcctcaagacgctatttatccatttaagtctcttctcttttcgtcctcataatactcttatacacagaaacgtttttcattcataacaaaaaatgggttttataactcgatttttagttttcatgtcactcttcaccagtttggtttctggatttgctctacaaaagcttcctcttatacagttcgacgaaggttacacacagctctttggtgaccagaatcttattgttcacagagatggaaaatctgtccggttaacgcttgatgaaagaaccggttctggatttgtctcaaatgatatttacttgcatggcttcttcagttcctctatcaaattgccagcagattactctgcaggagttgttatcgccttttatttatcaaatggggacttatatgagaagaatcatgacgagattgattttgagtttttggggaatattagaggcagagaatggaggattcagaccaatatatacggtaatggaagcacacacttgggcagagaagaaagatacaatctttggtttgatccaacagaggatttccatcaatacagtatcctttggtctctatctcacatcatattttatgtagacaatgttccgatcagagaagtcaaacgtacggcgtcgatgggcggtgacttcccggcgaagccaatgtctttatattcaaccatatgggatggttccaaatgggcgactgatggaggcaagtacggtgtaaattacaaatatgccccttacgtctctcaattcactgatctgatcctccacggctgcgccgttgaccccaccgagaagtttccgagctgcaaagatgaagcggttcagaatctccggctagcatcggagataacggagtctcagaggaacaagatggagattttccgacagaaacacatgacttattcgtattgttacgatcatatgaggtacaaggtggttttgtcggagtgtgttgtgaatccggctgaggctaagcgtctcagggtctatgatccggtcacgttcggtgggattcctcacggccaccgtcgtgggaagcatcggagcaggagccgattagctcgaactgagtcgatatgaatcggtgtatattgttcggctagagggcatttttggcattttctgtcttgtataggaatactatgaattatggactgaataatggaatgacaccgctatattttgatttcctccattttatgaacattatcgttttaacataataataaaatttcatttttctat

SEQ ID NO: 30747 - protein, 332 aa, Arabidopsis thaliana
  peptide (1)..(332): Ceres Seq. ID no. 12370643
  misc_feature (31)..(216): Pfam Name: Glycosyl hydrolases family 16 Pfam Description: Glycosyl hydrolases family 16
  misc_feature (26)..(329): Homolog of NCBI NO: 32470643 NR Description: putative xyloglucan endotransglycosylase-related
  misc_feature (7)..(325): Homolog of NCBI NO: 21618261 NR Description: endoxyloglucan transferase, putative [Arabidopsis
  misc_feature (7)..(325): Homolog of NCBI NO: 15222593 NR Description: xyloglucan endotransglycosylase (XTR4), putative
  misc_feature (7)..(325): Homolog of NCBI NO: 2129774 NR Description: xyloglucan endo-1,4-beta-D-glucanase (EC 3.2.1.-)
  misc_feature (24)..(324): Homolog of NCBI NO: 13560781 NR Description: endoxyloglucan transferase [Daucus carota]
  misc_feature (17)..(331): Homolog of NCBI NO: 6681351 NR Description: ETAG-A3 [Lycopersicon esculentum]
  misc_feature (1)..(332): Homolog of NCBI NO: 21553969 NR Description: putative xyloglucan-specific glucanase
  misc_feature (1)..(332): Homolog of NCBI NO: 15226364 NR Description: xyloglucan endotransglycosylase (EXGT-A3)
  misc_feature (1)..(332): Homolog of NCBI NO: 5533313 NR Description: endoxyloglucan transferase [Arabidopsis thaliana]
  misc_feature (1)..(332): Homolog of NCBI NO: 15223878 NR Description: xyloglucan endotransglycosylase (XTR2)
MGFITRFLVFMSLFTSLVSGFALQKLPLIQFDEGYTQLFGDQNLIVHRDGKSVRLTLDERTGSGFVSNDIYLHGFFSSSIKLPADYSAGVVIAFYLSNGDLYEKNHDEIDFEFLGNIRGREWRIQTNIYGNGSTHLGREERYNLWFDPTEDFHQYSILWSLSHIIFYVDNVPIREVKRTASMGGDFPAKPMSLYSTIWDGSKWATDGGKYGVNYKYAPYVSQFTDLILHGCAVDPTEKFPSCKDEAVQNLRLASEITESQRNKMEIFRQKHMTYSYCYDHMRYKVVLSECVVNPAEAKRLRVYDPVTFGGIPHGHRRGKHRSRSRLARTESI

SEQ ID NO: 30748 - protein, 322 aa, Arabidopsis thaliana
  peptide (1)..(322): Ceres Seq. ID no. 12370644
  misc_feature (21)..(206): Pfam Name: Glycosyl hydrolases family 16 Pfam Description: Glycosyl hydrolases family 16
  misc_feature (16)..(319): Homolog of NCBI NO: 32470643 NR Description: putative xyloglucan endotransglycosylase-related
  misc_feature (1)..(315): Homolog of NCBI NO: 21618261 NR Description: endoxyloglucan transferase, putative [Arabidopsis
  misc_feature (1)..(315): Homolog of NCBI NO: 15222593 NR Description: xyloglucan endotransglycosylase (XTR4), putative
  misc_feature (1)..(315): Homolog of NCBI NO: 2129774 NR Description: xyloglucan endo-1,4-beta-D-glucanase (EC 3.2.1.-)
  misc_feature (14)..(314): Homolog of NCBI NO: 13560781 NR Description: endoxyloglucan transferase [Daucus carota]
  misc_feature (7)..(321): Homolog of NCBI NO: 6681351 NR Description: ETAG-A3 [Lycopersicon esculentum]
  misc_feature (1)..(322): Homolog of NCBI NO: 21553969 NR Description: putative xyloglucan-specific glucanase
  misc_feature (1)..(322): Homolog of NCBI NO: 15226364 NR Description: xyloglucan endotransglycosylase (EXGT-A3)
  misc_feature (1)..(322): Homolog of NCBI NO: 5533313 NR Description: endoxyloglucan transferase [Arabidopsis thaliana]
  misc_feature (1)..(322): Homolog of NCBI NO: 15223878 NR Description: xyloglucan endotransglycosylase (XTR2)
MSLFTSLVSGFALQKLPLIQFDEGYTQLFGDQNLIVHRDGKSVRLTLDERTGSGFVSNDIYLHGFFSSSIKLPADYSAGVVIAFYLSNGDLYEKNHDEIDFEFLGNIRGREWRIQTNIYGNGSTHLGREERYNLWFDPTEDFHQYSILWSLSHIIFYVDNVPIREVKRTASMGGDFPAKPMSLYSTIWDGSKWATDGGKYGVNYKYAPYVSQFTDLILHGCAVDPTEKFPSCKDEAVQNLRLASEITESQRNKMEIFRQKHMTYSYCYDHMRYKVVLSECVVNPAEAKRLRVYDPVTFGGIPHGHRRGKHRSRSRLARTESI

SEQ ID NO: 30749 - DNA, 1290 bp, Arabidopsis thaliana
  misc_feature (1)..(1290): Ceres Seq. ID no. 13576771
  misc_feature: MA Experiment ID: 20000072 Result: Down-regulated in Transcription
  misc_feature: MA Experiment 20000072 PARAMETER Experiment Name: At_100uM_ABA_Mutants_cDNA_P Parameter: Plant Line Value: CS8105
  misc_feature: MA Experiment 20000072 PARAMETER Experiment Name: At_100uM_ABA_Mutants_cDNA_P Parameter: Timepoint (hr) Value: 6
  misc_feature: MA Experiment 20000072 PARAMETER Experiment Name: At_100uM_ABA_Mutants_cDNA_P Parameter: Tissue Value: Aerial
  misc_feature: MA Experiment 20000072 PARAMETER Experiment Name: At_100uM_ABA_Mutants_cDNA_P Parameter: Treatment Value: 100uM ABA vs. No Treatment
  misc_feature: MA Experiment ID: 20000086 Result: Down-regulated in Transcription
  misc_feature: MA Experiment 20000086 PARAMETER Experiment Name: At_100uM_ABA_Mutants_cDNA_P Parameter: Plant Line Value: CS22
  misc_feature: MA Experiment 20000086 PARAMETER Experiment Name: At_100uM_ABA_Mutants_cDNA_P Parameter: Timepoint (hr) Value: 6
  misc_feature: MA Experiment 20000086 PARAMETER Experiment Name: At_100uM_ABA_Mutants_cDNA_P Parameter: Tissue Value: Aerial
  misc_feature: MA Experiment 20000086 PARAMETER Experiment Name: At_100uM_ABA_Mutants_cDNA_P Parameter: Treatment Value: 100uM ABA vs. No Treatment
  misc_feature: MA Experiment ID: 20000087 Result: Down-regulated in Transcription
  misc_feature: MA Experiment 20000087 PARAMETER Experiment Name: At_100uM_ABA_Mutants_cDNA_P Parameter: Plant Line Value: WS
  misc_feature: MA Experiment 20000087 PARAMETER Experiment Name: At_100uM_ABA_Mutants_cDNA_P Parameter: Timepoint (hr) Value: 6
  misc_feature: MA Experiment 20000087 PARAMETER Experiment Name: At_100uM_ABA_Mutants_cDNA_P Parameter: Tissue Value: Aerial
  misc_feature: MA Experiment 20000087 PARAMETER Experiment Name: At_100uM_ABA_Mutants_cDNA_P Parameter: Treatment Value: 100uM ABA vs. No Treatment
  misc_feature: MA Experiment ID: 20000437 Result: Down-regulated in Transcription
  misc_feature: MA Experiment 20000437 PARAMETER Experiment Name: At_Drought_P Parameter: Age (day) Value: 8
  misc_feature: MA Experiment 20000437 PARAMETER Experiment Name: At_Drought_P Parameter: Organism Value: A. thaliana
  misc_feature: MA Experiment 20000437 PARAMETER Experiment Name: At_Drought_P Parameter: Plant Line Value: WS
  misc_feature: MA Experiment 20000437 PARAMETER Experiment Name: At_Drought_P Parameter: Timepoint (hr) Value: 24
  misc_feature: MA Experiment 20000437 PARAMETER Experiment Name: At_Drought_P Parameter: Tissue Value: Whole Plant
  misc_feature: MA Experiment 20000437 PARAMETER Experiment Name: At_Drought_P Parameter: Treatment Value: Drought vs. No Drought
aagcaaataattacgagattagcctcgcactgaacttcaattctctctttccttttttccgttcgatgagagcttaagctctgccgcgttttcgttctccgatctttttccatttttatcagtttcttctcttccaaattagggtttttcttttcagtctttgggaatgattttgatgcggtgaaaaagttttttttttttgagggggaaggatttctgggtttgctcttagggttttgtcttttcaatcgccggagcctgaaataatccggcagatatggcgtctgaattgccgatgagccctcatttggagcagattcacggagaaatccgtgaccatttccgagccctcgcgaatggcttccagaggttggataagatcaaggattctagtagacaaagcaagcaactcgaagaacttgctgagaagatgagagactgtaaaaggttggttaaggagtttgatcgtgaactcaaagatggggaagctcgaaattctcctcaagtaaataagcaattgaatgatgagaaacaatctatgattaaggaactcaactcttatgttgcactaagaaaaacgtacttgaatacactcggcaacaagaaagttgaactttttgatactggagctggagtcagcggtgaacccacagctgaagaaaacgtccaaatggcttcaacaatgtcaaaccaagagcttgtcgatgctggaatgaaaaggatggacgagactgaccaggctattgaacgttctaaacaggttgtgcatcagacactcgaagttggcactcaaactgcatctaacttaaagggacagacggatcaaatgggccgcgttgtaaacgacctagacacaattcagttctctcttaagaaagcttcgcagctggtgaaagagataggaagacaggtagctacagataaatgcataatggcgttcctgtttctgattgtctgtggtgttatagctataatcattgtgaagatcgtgaacccaaacaacaaagacatcagagacatccctggactagctcctccagcgcaatcgagaaagctcttgtacttcagagaatagccttttggcagggccgagagggaaggtttggtgcatattacacttgctgttgcgtgtgtgttcattctttcatgaaagagggcttgtttatgtcatttaaatttgagctttcattagagttttgtatcatatatcatcattctttaacttatgaccacatgttgtataattttataccaagttcaatatattttataagatccgttttattgtcc

SEQ ID NO: 30750 - protein, 265 aa, Arabidopsis thaliana
  peptide (1)..(265): Ceres Seq. ID no. 13576772
  misc_feature (77)..(215): Pfam Name: Vesicle transport v-SNARE protein Pfam Description: Vesicle transport v-SNARE protein
  misc_feature (77)..(215): Pfam Name: Vesicle transport v-SNARE protein Pfam Description: Vesicle transport v-SNARE protein
  misc_feature (1)..(94): Homolog of NCBI NO: 25370781 NR Description: F11A17.20 [imported] - Arabidopsis thaliana
  misc_feature (7)..(262): Homolog of NCBI NO: 25370780 NR Description: hypothetical protein At2g35190 [imported] -
  misc_feature (7)..(262): Homolog of NCBI NO: 27805643 NR Description: Novel plant SNARE 11 (AtNPSN11)
  misc_feature (7)..(262): Homolog of NCBI NO: 18403771 NR Description: expressed protein [Arabidopsis thaliana]
  misc_feature (17)..(265): Homolog of NCBI NO: 25370781 NR Description: F11A17.20 [imported] - Arabidopsis thaliana
  misc_feature (1)..(94): Homolog of NCBI NO: 25370781 NR Description: F11A17.20 [imported] - Arabidopsis thaliana
  misc_feature (7)..(262): Homolog of NCBI NO: 27805643 NR Description: Novel plant SNARE 11 (AtNPSN11)
  misc_feature (17)..(265): Homolog of NCBI NO: 25370781 NR Description: F11A17.20 [imported] - Arabidopsis thaliana
  misc_feature (1)..(265): Homolog of NCBI NO: 22330102 NR Description: expressed protein [Arabidopsis thaliana]
  misc_feature (1)..(264): Homolog of NCBI NO: 18401508 NR Description: expressed protein [Arabidopsis thaliana]
  misc_feature (1)..(264): Homolog of NCBI NO: 21536876 NR Description: unknown [Arabidopsis thaliana]
  misc_feature (1)..(261): Homolog of NCBI NO: 23237830 NR Description: contains ESTs
  misc_feature (1)..(257): Homolog of NCBI NO: 34896946 NR Description: putative vesicle soluble NSF attachment protein
  misc_feature (7)..(262): Homolog of NCBI NO: 18403771 NR Description: expressed protein [Arabidopsis thaliana]
  misc_feature (7)..(262): Homolog of NCBI NO: 25370780 NR Description: hypothetical protein At2g35190 [imported] -
  misc_feature (1)..(257): Homolog of NCBI NO: 34896946 NR Description: putative vesicle soluble NSF attachment protein
  misc_feature (1)..(261): Homolog of NCBI NO: 23237830 NR Description: contains ESTs
  misc_feature (1)..(264): Homolog of NCBI NO: 21536876 NR Description: unknown [Arabidopsis thaliana]
  misc_feature (1)..(264): Homolog of NCBI NO: 18401508 NR Description: expressed protein [Arabidopsis thaliana]
  misc_feature (1)..(265): Homolog of NCBI NO: 22330102 NR Description: expressed protein [Arabidopsis thaliana]
MASELPMSPHLEQIHGEIRDHFRALANGFQRLDKIKDSSRQSKQLEELAEKMRDCKRLVKEFDRELKDGEARNSPQVNKQLNDEKQSMIKELNSYVALRKTYLNTLGNKKVELFDTGAGVSGEPTAEENVQMASTMSNQELVDAGMKRMDETDQAIERSKQVVHQTLEVGTQTASNLKGQTDQMGRVVNDLDTIQFSLKKASQLVKEIGRQVATDKCIMAFLFLIVCGVIAIIIVKIVNPNNKDIRDIPGLAPPAQSRKLLYFRE

SEQ ID NO: 30751 - protein, 259 aa, Arabidopsis thaliana
  peptide (1)..(259): Ceres Seq. ID no. 13576773
  misc_feature (71)..(209): Pfam Name: Vesicle transport v-SNARE protein Pfam Description: Vesicle transport v-SNARE protein
  misc_feature (71)..(209): Pfam Name: Vesicle transport v-SNARE protein Pfam Description: Vesicle transport v-SNARE protein
  misc_feature (1)..(88): Homolog of NCBI NO: 25370781 NR Description: F11A17.20 [imported] - Arabidopsis thaliana
  misc_feature (1)..(256): Homolog of NCBI NO: 25370780 NR Description: hypothetical protein At2g35190 [imported] -
  misc_feature (1)..(256): Homolog of NCBI NO: 27805643 NR Description: Novel plant SNARE 11 (AtNPSN11)
  misc_feature (1)..(256): Homolog of NCBI NO: 18403771 NR Description: expressed protein [Arabidopsis thaliana]
  misc_feature (11)..(259): Homolog of NCBI NO: 25370781 NR Description: F11A17.20 [imported] - Arabidopsis thaliana
  misc_feature (1)..(88): Homolog of NCBI NO: 25370781 NR Description: F11A17.20 [imported] - Arabidopsis thaliana
  misc_feature (1)..(256): Homolog of NCBI NO: 27805643 NR Description: Novel plant SNARE 11 (AtNPSN11)
  misc_feature (11)..(259): Homolog of NCBI NO: 25370781 NR Description: F11A17.20 [imported] - Arabidopsis thaliana
  misc_feature (1)..(259): Homolog of NCBI NO: 22330102 NR Description: expressed protein [Arabidopsis thaliana]
  misc_feature (1)..(258): Homolog of NCBI NO: 18401508 NR Description: expressed protein [Arabidopsis thaliana]
  misc_feature (1)..(258): Homolog of NCBI NO: 21536876 NR Description: unknown [Arabidopsis thaliana]
  misc_feature (1)..(255): Homolog of NCBI NO: 23237830 NR Description: contains ESTs
  misc_feature (1)..(251): Homolog of NCBI NO: 34896946 NR Description: putative vesicle soluble NSF attachment protein
  misc_feature (1)..(256): Homolog of NCBI NO: 18403771 NR Description: expressed protein [Arabidopsis thaliana]
  misc_feature (1)..(256): Homolog of NCBI NO: 25370780 NR Description: hypothetical protein At2g35190 [imported] -
  misc_feature (1)..(251): Homolog of NCBI NO: 34896946 NR Description: putative vesicle soluble NSF attachment protein
  misc_feature (1)..(255): Homolog of NCBI NO: 23237830 NR Description: contains ESTs
  misc_feature (1)..(258): Homolog of NCBI NO: 21536876 NR Description: unknown [Arabidopsis thaliana]
  misc_feature (1)..(258): Homolog of NCBI NO: 18401508 NR Description: expressed protein [Arabidopsis thaliana]
  misc_feature (1)..(259): Homolog of NCBI NO: 22330102 NR Description: expressed protein [Arabidopsis thaliana]
MSPHLEQIHGEIRDHFRALANGFQRLDKIKDSSRQSKQLEELAEKMRDCKRLVKEFDRELKDGEARNSPQVNKQLNDEKQSMIKELNSYVALRKTYLNTLGNKKVELFDTGAGVSGEPTAEENVQMASTMSNQELVDAGMKRMDETDQAIERSKQVVHQTLEVGTQTASNLKGQTDQMGRVVNDLDTIQFSLKKASQLVKEIGRQVATDKCIMAFLFLIVCGVIAIIIVKIVNPNNKDIRDIPGLAPPAQSRKLLYFRE

SEQ ID NO: 30752 - protein, 214 aa, Arabidopsis thaliana
  peptide (1)..(214): Ceres Seq. ID no. 13576774
  misc_feature (26)..(164): Pfam Name: Vesicle transport v-SNARE protein Pfam Description: Vesicle transport v-SNARE protein
  misc_feature (26)..(164): Pfam Name: Vesicle transport v-SNARE protein Pfam Description: Vesicle transport v-SNARE protein
  misc_feature (1)..(43): Homolog of NCBI NO: 25370781 NR Description: F11A17.20 [imported] - Arabidopsis thaliana
  misc_feature (1)..(211): Homolog of NCBI NO: 25370780 NR Description: hypothetical protein At2g35190 [imported] -
  misc_feature (1)..(211): Homolog of NCBI NO: 27805643 NR Description: Novel plant SNARE 11 (AtNPSN11)
  misc_feature (1)..(211): Homolog of NCBI NO: 18403771 NR Description: expressed protein [Arabidopsis thaliana]
  misc_feature (1)..(214): Homolog of NCBI NO: 25370781 NR Description: F11A17.20 [imported] - Arabidopsis thaliana
  misc_feature (1)..(43): Homolog of NCBI NO: 25370781 NR Description: F11A17.20 [imported] - Arabidopsis thaliana
  misc_feature (1)..(211): Homolog of NCBI NO: 27805643 NR Description: Novel plant SNARE 11 (AtNPSN11)
  misc_feature (1)..(214): Homolog of NCBI NO: 25370781 NR Description: F11A17.20 [imported] - Arabidopsis thaliana
  misc_feature (1)..(214): Homolog of NCBI NO: 22330102 NR Description: expressed protein [Arabidopsis thaliana]
  misc_feature (1)..(213): Homolog of NCBI NO: 18401508 NR Description: expressed protein [Arabidopsis thaliana]
  misc_feature (1)..(213): Homolog of NCBI NO: 21536876 NR Description: unknown [Arabidopsis thaliana]
  misc_feature (1)..(210): Homolog of NCBI NO: 23237830 NR Description: contains ESTs
  misc_feature (1)..(206): Homolog of NCBI NO: 34896946 NR Description: putative vesicle soluble NSF attachment protein
  misc_feature (1)..(211): Homolog of NCBI NO: 18403771 NR Description: expressed protein [Arabidopsis thaliana]
  misc_feature (1)..(211): Homolog of NCBI NO: 25370780 NR Description: hypothetical protein At2g35190 [imported] -
  misc_feature (1)..(206): Homolog of NCBI NO: 34896946 NR Description: putative vesicle soluble NSF attachment protein
  misc_feature (1)..(210): Homolog of NCBI NO: 23237830 NR Description: contains ESTs
  misc_feature (1)..(213): Homolog of NCBI NO: 21536876 NR Description: unknown [Arabidopsis thaliana]
  misc_feature (1)..(213): Homolog of NCBI NO: 18401508 NR Description: expressed protein [Arabidopsis thaliana]
  misc_feature (1)..(214): Homolog of NCBI NO: 22330102 NR Description: expressed protein [Arabidopsis thaliana]
MRDCKRLVKEFDRELKDGEARNSPQVNKQLNDEKQSMIKELNSYVALRKTYLNTLGNKKVELFDTGAGVSGEPTAEENVQMASTMSNQELVDAGMKRMDETDQAIERSKQVVHQTLEVGTQTASNLKGQTDQMGRVVNDLDTIQFSLKKASQLVKEIGRQVATDKCIMAFLFLIVCGVIAIIIVKIVNPNNKDIRDIPGLAPPAQSRKLLYFRE

SEQ ID NO: 30753 - DNA, 1293 bp, Arabidopsis thaliana
  misc_feature (1)..(1293): Ceres Seq. ID no. 13489292
  misc_feature: MA Experiment ID: 108461 Result: Down-regulated in Transcription
  misc_feature: MA Experiment 108461 PARAMETER Experiment Name: At_Germinating_Seeds_cDNA_P Parameter: Age (day) Value: 1 vs. 0
  misc_feature: MA Experiment 108461 PARAMETER Experiment Name: At_Germinating_Seeds_cDNA_P Parameter: Tissue Value: Germinating Seeds
  misc_feature: MA Experiment ID: 108573 Result: Up-regulated in Transcription
  misc_feature: MA Experiment 108573 PARAMETER Experiment Name: At_Drought_cDNA_P Parameter: Timepoint (hr) Value: 6
  misc_feature: MA Experiment 108573 PARAMETER Experiment Name: At_Drought_cDNA_P Parameter: Tissue Value: Aerial
  misc_feature: MA Experiment 108573 PARAMETER Experiment Name: At_Drought_cDNA_P Parameter: Treatment Value: Drought vs. No Drought
  misc_feature: MA Experiment ID: 108579 Result: Down-regulated in Transcription
  misc_feature: MA Experiment 108579 PARAMETER Experiment Name: At_4deg_Cold_cDNA_P Parameter: Temperature (deg C) Value: 4 vs. 22
  misc_feature: MA Experiment 108579 PARAMETER Experiment Name: At_4deg_Cold_cDNA_P Parameter: Timepoint (hr) Value: 6
  misc_feature: MA Experiment 108579 PARAMETER Experiment Name: At_4deg_Cold_cDNA_P Parameter: Tissue Value: Aerial
  misc_feature: MA Experiment ID: 20000113 Result: Up-regulated in Transcription
  misc_feature: MA Experiment 20000113 PARAMETER Experiment Name: At_42deg_Heat_cDNA_P Parameter: Temperature (deg C) Value: 42 vs. 22
  misc_feature: MA Experiment 20000113 PARAMETER Experiment Name: At_42deg_Heat_cDNA_P Parameter: Timepoint (hr) Value: 8
  misc_feature: MA Experiment 20000113 PARAMETER Experiment Name: At_42deg_Heat_cDNA_P Parameter: Tissue Value: Aerial
  misc_feature: MA Experiment ID: 20000180 Result: Down-regulated in Transcription
  misc_feature: MA Experiment 20000180 PARAMETER Experiment Name: At_Germinating_Seeds_P Parameter: Age (hr) Value: 24 vs. 0
  misc_feature: MA Experiment 20000180 PARAMETER Experiment Name: At_Germinating_Seeds_P Parameter: Tissue Value: Germinating Seeds
  misc_feature: MA Experiment ID: 20000214 Result: Down-regulated in Transcription
  misc_feature: MA Experiment 20000214 PARAMETER Experiment Name: At_4deg_Cold_P Parameter: Timepoint (hr) Value: 6
  misc_feature: MA Experiment ID: 20000234 Result: Down-regulated in Transcription
  misc_feature: MA Experiment 20000234 PARAMETER Experiment Name: At_Siliques_P Parameter: Age (day) Value: 21
  misc_feature: MA Experiment 20000234 PARAMETER Experiment Name: At_Siliques_P Parameter: Organism Value: A. thaliana
  misc_feature: MA Experiment 20000234 PARAMETER Experiment Name: At_Siliques_P Parameter: Plant Line Value: WS
  misc_feature: MA Experiment 20000234 PARAMETER Experiment Name: At_Siliques_P Parameter: Tissue Value: Less Than 5mm Siliques vs. Whole Plant
  misc_feature: MA Experiment ID: 20000264 Result: Down-regulated in Transcription
  misc_feature: MA Experiment 20000264 PARAMETER Experiment Name: At_Open_Flower_P Parameter: Age (day) Value: 21
  misc_feature: MA Experiment 20000264 PARAMETER Experiment Name: At_Open_Flower_P Parameter: Plant Line Value: WS
  misc_feature: MA Experiment 20000264 PARAMETER Experiment Name: At_Open_Flower_P Parameter: Tissue Value: Open Flower vs. Whole Plant
  misc_feature: MA Experiment ID: 20001248 Result: Up-regulated in Transcription
  misc_feature: MA Experiment 20001248 PARAMETER Experiment Name: At_Far-red-induction_P Parameter: Age (day) Value: 7
  misc_feature: MA Experiment 20001248 PARAMETER Experiment Name: At_Far-red-induction_P Parameter: Light Value: Far-red vs. White
  misc_feature: MA Experiment 20001248 PARAMETER Experiment Name: At_Far-red-induction_P Parameter: Organism Value: A. thaliana
  misc_feature: MA Experiment 20001248 PARAMETER Experiment Name: At_Far-red-induction_P Parameter: Plant Line Value: Columbia
  misc_feature: MA Experiment 20001248 PARAMETER Experiment Name: At_Far-red-induction_P Parameter: Timepoint (hr) Value: 4
  misc_feature: MA Experiment 20001248 PARAMETER Experiment Name: At_Far-red-induction_P Parameter: Tissue Value: Whole Plant
  misc_feature: MA Experiment ID: 20001450 Result: Up-regulated in Transcription
  misc_feature: MA Experiment 20001450 PARAMETER Experiment Name: At_Far-red-induction_P Parameter: Age (day) Value: 7
  misc_feature: MA Experiment 20001450 PARAMETER Experiment Name: At_Far-red-induction_P Parameter: Light Value: Far-red vs. White
  misc_feature: MA Experiment 20001450 PARAMETER Experiment Name: At_Far-red-induction_P Parameter: Organism Value: A. thaliana
  misc_feature: MA Experiment 20001450 PARAMETER Experiment Name: At_Far-red-induction_P Parameter: Plant Line Value: Columbia
  misc_feature: MA Experiment 20001450 PARAMETER Experiment Name: At_Far-red-induction_P Parameter: Timepoint (hr) Value: 8
  misc_feature: MA Experiment 20001450 PARAMETER Experiment Name: At_Far-red-induction_P Parameter: Tissue Value: Whole Plant
  misc_feature: MA Experiment ID: 20001560 Result: Down-regulated in Transcription
  misc_feature: MA Experiment 20001560 PARAMETER Experiment Name: At_Drought_Soil_Dry_P Parameter: Age (day) Value: 28
  misc_feature: MA Experiment 20001560 PARAMETER Experiment Name: At_Drought_Soil_Dry_P Parameter: Organism Value: A. thaliana
  misc_feature: MA Experiment 20001560 PARAMETER Experiment Name: At_Drought_Soil_Dry_P Parameter: Plant Line Value: WS
  misc_feature: MA Experiment 20001560 PARAMETER Experiment Name: At_Drought_Soil_Dry_P Parameter: Post Timepoint (hr) Value: None
  misc_feature: MA Experiment 20001560 PARAMETER Experiment Name: At_Drought_Soil_Dry_P Parameter: Post-Treatment Value: None
  misc_feature: MA Experiment 20001560 PARAMETER Experiment Name: At_Drought_Soil_Dry_P Parameter: Timepoint (day) Value: 14
  misc_feature: MA Experiment 20001560 PARAMETER Experiment Name: At_Drought_Soil_Dry_P Parameter: Treatment Value: Drought vs. No Drought
  misc_feature: MA Experiment ID: 20001911 Result: Up-regulated in Transcription
  misc_feature: MA Experiment 20001911 PARAMETER Experiment Name: At_Drought_Reproduction_P Parameter: Age (day) Value: 40
  misc_feature: MA Experiment 20001911 PARAMETER Experiment Name: At_Drought_Reproduction_P Parameter: Organism Value: A. thaliana
  misc_feature: MA Experiment 20001911 PARAMETER Experiment Name: At_Drought_Reproduction_P Parameter: Plant Line Value: WS
  misc_feature: MA Experiment 20001911 PARAMETER Experiment Name: At_Drought_Reproduction_P Parameter: Timepoint (day) Value: 10
  misc_feature: MA Experiment 20001911 PARAMETER Experiment Name: At_Drought_Reproduction_P Parameter: Tissue Value: Flowers
  misc_feature: MA Experiment 20001911 PARAMETER Experiment Name: At_Drought_Reproduction_P Parameter: Treatment Value: Drought vs. No Drought
tggtactttcacatttctctgtaataaactcggtaggtttgcgaaaacctcgccgccgggaaaaaaaaaaatcaatggaaggaggaggaagaggaccaaatcaaacgattctcagtgaaatagaacatatgcctgaagctccacgtcaacgtatctctcatcaccgtcgagctcgctctgaaaccttcttctccggcgaatcaatcgacgatctcctcttattcgatccttccgatatcgatttctcttctctagacttcctcaacgctccaccaccaccacaacaatcacaacaacaaccgcaagcttctcccatgtccgttgattcggaagaaacctcatcgaacggtgttgttcctcctaattctcttcctccaaaacccgaagctagattcggtcgccatgttcgtagcttctcggttgattccgatttcttcgatgatttgggtgttactgaggagaagtttatagctacaagttcaggagagaagaagaaagggaatcatcatcatagcaggagtaattctatggatggagagatgagttcggcgtcgtttaatatcgaatcgattttagcttctgtgagtggtaaagatagtgggaagaagaatatgggtatgggtggtgatagacttgctgagcttgctttgcttgatcctaaaagagctaaaaggattttagcgaatagacaatctgcggcgaggtcgaaagagaggaagattaggtatactggtgagttagagaggaaggttcagacacttcagaatgaagctactacattgtctgctcaagtcactatgttacagagaggaacatcagagctgaacactgaaaataaacacctcaaaatgcggcttcaagctttagagcaacaagctgaacttagggatgctttgaatgaagcgctgcgggatgaactgaaccgacttaaggtggtagctggagaaattcctcaggggaatggaaattcttacaaccgtgctcaattctcatctcagcaatcggcaatgaatcagtttgggaacaaaacgaaccaacagatgagtacaaacgggcagccatcgctcccaagctacatggatttcaccaagagaggctgagttcgtgtcacctatatatgtttgctgagttataaatacgttatattcatttcgggctgcaatatttgatgtatgtaaaaagtatgtatgtatccatgtataatggcttttgtgttgttagcgtctatgcagatatgttcatggcgacatcggtctatctttacaagtagtatccattgtaatatactacccc

SEQ ID NO: 30754 - protein, 365 aa, Arabidopsis thaliana
  peptide (1)..(365): Ceres Seq. ID no. 13489293
  misc_feature (218)..(280): Pfam Name: bZIP transcription factor Pfam Description: bZIP transcription factor
  misc_feature (159)..(349): Homolog of NCBI NO: 21553831 NR Description: transcriptional activator RF2a, putative
  misc_feature (159)..(349): Homolog of NCBI NO: 15221391 NR Description: bZIP protein [Arabidopsis thaliana]
  misc_feature (149)..(352): Homolog of NCBI NO: 7489564 NR Description: probable transcription activator RF2a - rice
  misc_feature (159)..(352): Homolog of NCBI NO: 15224665 NR Description: bZIP transcription factor (POSF21) [Arabidopsis
  misc_feature (176)..(347): Homolog of NCBI NO: 29367343 NR Description: bZIP-like protein [Oryza sativa (japonica
  misc_feature (170)..(352): Homolog of NCBI NO: 2921823 NR Description: shoot-forming PKSF1 [Paulownia kawakamii]
  misc_feature (38)..(365): Homolog of NCBI NO: 8777512 NR Description: bZIP transcriptional activator RSG [Nicotiana
  misc_feature (105)..(365): Homolog of NCBI NO: 7258340 NR Description: VirE2-interacting protein VIP1 [Arabidopsis
  misc_feature (25)..(365): Homolog of NCBI NO: 21553989 NR Description: VirE2-interacting protein VIP1 [Arabidopsis
  misc_feature (25)..(365): Homolog of NCBI NO: 18400998 NR Description: VirE2-interacting protein VIP1 [Arabidopsis
VLSHFSVINSVGLRKPRRREKKKSMEGGGRGPNQTILSEIEHMPEAPRQRISHHRRARSETFFSGESIDDLLLFDPSDIDFSSLDFLNAPPPPQQSQQQPQASPMSVDSEETSSNGVVPPNSLPPKPEARFGRHVRSFSVDSDFFDDLGVTEEKFIATSSGEKKKGNHHHSRSNSMDGEMSSASFNIESILASVSGKDSGKKNMGMGGDRLAELALLDPKRAKRILANRQSAARSKERKIRYTGELERKVQTLQNEATTLSAQVTMLQRGTSELNTENKHLKMRLQALEQQAELRDALNEALRDELNRLKVVAGEIPQGNGNSYNRAQFSSQQSAMNQFGNKTNQQMSTNGQPSLPSYMDFTKRG

SEQ ID NO: 30755 - protein, 341 aa, Arabidopsis thaliana
  peptide (1)..(341): Ceres Seq. ID no. 13489294
  misc_feature (194)..(256): Pfam Name: bZIP transcription factor Pfam Description: bZIP transcription factor
  misc_feature (135)..(325): Homolog of NCBI NO: 21553831 NR Description: transcriptional activator RF2a, putative
  misc_feature (135)..(325): Homolog of NCBI NO: 15221391 NR Description: bZIP protein [Arabidopsis thaliana]
  misc_feature (125)..(328): Homolog of NCBI NO: 7489564 NR Description: probable transcription activator RF2a - rice
  misc_feature (135)..(328): Homolog of NCBI NO: 15224665 NR Description: bZIP transcription factor (POSF21) [Arabidopsis
  misc_feature (152)..(323): Homolog of NCBI NO: 29367343 NR Description: bZIP-like protein [Oryza sativa (japonica
  misc_feature (146)..(328): Homolog of NCBI NO: 2921823 NR Description: shoot-forming PKSF1 [Paulownia kawakamii]
  misc_feature (14)..(341): Homolog of NCBI NO: 8777512 NR Description: bZIP transcriptional activator RSG [Nicotiana
  misc_feature (81)..(341): Homolog of NCBI NO: 7258340 NR Description: VirE2-interacting protein VIP1 [Arabidopsis
  misc_feature (1)..(341): Homolog of NCBI NO: 21553989 NR Description: VirE2-interacting protein VIP1 [Arabidopsis
  misc_feature (1)..(341): Homolog of NCBI NO: 18400998 NR Description: VirE2-interacting protein VIP1 [Arabidopsis
MEGGGRGPNQTILSEIEHMPEAPRQRISHHRRARSETFFSGESIDDLLLFDPSDIDFSSLDFLNAPPPPQQSQQQPQASPMSVDSEETSSNGVVPPNSLPPKPEARFGRHVRSFSVDSDFFDDLGVTEEKFIATSSGEKKKGNHHHSRSNSMDGEMSSASFNIESILASVSGKDSGKKNMGMGGDRLAELALLDPKRAKRILANRQSAARSKERKIRYTGELERKVQTLQNEATTLSAQVTMLQRGTSELNTENKHLKMRLQALEQQAELRDALNEALRDELNRLKVVAGEIPQGNGNSYNRAQFSSQQSAMNQFGNKTNQQMSTNGQPSLPSYMDFTKRG

SEQ ID NO: 30756 - protein, 323 aa, Arabidopsis thaliana
  peptide (1)..(323): Ceres Seq. ID no. 13489295
  misc_feature (176)..(238): Pfam Name: bZIP transcription factor Pfam Description: bZIP transcription factor
  misc_feature (117)..(307): Homolog of NCBI NO: 21553831 NR Description: transcriptional activator RF2a, putative
  misc_feature (117)..(307): Homolog of NCBI NO: 15221391 NR Description: bZIP protein [Arabidopsis thaliana]
  misc_feature (107)..(310): Homolog of NCBI NO: 7489564 NR Description: probable transcription activator RF2a - rice
  misc_feature (117)..(310): Homolog of NCBI NO: 15224665 NR Description: bZIP transcription factor (POSF21) [Arabidopsis
  misc_feature (134)..(305): Homolog of NCBI NO: 29367343 NR Description: bZIP-like protein [Oryza sativa (japonica
  misc_feature (128)..(310): Homolog of NCBI NO: 2921823 NR Description: shoot-forming PKSF1 [Paulownia kawakamii]
  misc_feature (1)..(323): Homolog of NCBI NO: 8777512 NR Description: bZIP transcriptional activator RSG [Nicotiana
  misc_feature (63)..(323): Homolog of NCBI NO: 7258340 NR Description: VirE2-interacting protein VIP1 [Arabidopsis
  misc_feature (1)..(323): Homolog of NCBI NO: 21553989 NR Description: VirE2-interacting protein VIP1 [Arabidopsis
  misc_feature (1)..(323): Homolog of NCBI NO: 18400998 NR Description: VirE2-interacting protein VIP1 [Arabidopsis
MPEAPRQRISHHRRARSETFFSGESIDDLLLFDPSDIDFSSLDFLNAPPPPQQSQQQPQASPMSVDSEETSSNGVVPPNSLPPKPEARFGRHVRSFSVDSDFFDDLGVTEEKFIATSSGEKKKGNHHHSRSNSMDGEMSSASFNIESILASVSGKDSGKKNMGMGGDRLAELALLDPKRAKRILANRQSAARSKERKIRYTGELERKVQTLQNEATTLSAQVTMLQRGTSELNTENKHLKMRLQALEQQAELRDALNEALRDELNRLKVVAGEIPQGNGNSYNRAQFSSQQSAMNQFGNKTNQQMSTNGQPSLPSYMDFTKRG

SEQ ID NO: 30757 - DNA, 1430 bp, Arabidopsis thaliana
  misc_feature (1)..(1430): Ceres Seq. ID no. 12422339
  misc_feature: MA Experiment ID: 20000173 Result: Down-regulated in Transcription
  misc_feature: MA Experiment 20000173 PARAMETER Experiment Name: At_42deg_Heat_P Parameter: Age (day) Value: 14
  misc_feature: MA Experiment 20000173 PARAMETER Experiment Name: At_42deg_Heat_P Parameter: Organism Value: A. thaliana
  misc_feature: MA Experiment 20000173 PARAMETER Experiment Name: At_42deg_Heat_P Parameter: Plant Line Value: WS
  misc_feature: MA Experiment 20000173 PARAMETER Experiment Name: At_42deg_Heat_P Parameter: Temperature (deg C) Value: 42 vs. 22
  misc_feature: MA Experiment 20000173 PARAMETER Experiment Name: At_42deg_Heat_P Parameter: Timepoint (hr) Value: 6
  misc_feature: MA Experiment 20000173 PARAMETER Experiment Name: At_42deg_Heat_P Parameter: Tissue Value: Aerial
  misc_feature: MA Experiment ID: 20000179 Result: Up-regulated in Transcription
  misc_feature: MA Experiment 20000179 PARAMETER Experiment Name: At_Germinating_Seeds_P Parameter: Age (hr) Value: 6 vs. 0
  misc_feature: MA Experiment 20000179 PARAMETER Experiment Name: At_Germinating_Seeds_P Parameter: Tissue Value: Germinating Seeds
  misc_feature: MA Experiment ID: 20000180 Result: Up-regulated in Transcription
  misc_feature: MA Experiment 20000180 PARAMETER Experiment Name: At_Germinating_Seeds_P Parameter: Age (hr) Value: 24 vs. 0
  misc_feature: MA Experiment 20000180 PARAMETER Experiment Name: At_Germinating_Seeds_P Parameter: Tissue Value: Germinating Seeds
  misc_feature: MA Experiment ID: 20000227 Result: Up-regulated in Transcription
  misc_feature: MA Experiment 20000227 PARAMETER Experiment Name: At_Root-Tips-vs-Tops_P Parameter: Tissue Value: Root Tips vs. Root Tops
  misc_feature: MA Experiment ID: 20000437 Result: Up-regulated in Transcription
  misc_feature: MA Experiment 20000437 PARAMETER Experiment Name: At_Drought_P Parameter: Age (day) Value: 8
  misc_feature: MA Experiment 20000437 PARAMETER Experiment Name: At_Drought_P Parameter: Organism Value: A. thaliana
  misc_feature: MA Experiment 20000437 PARAMETER Experiment Name: At_Drought_P Parameter: Plant Line Value: WS
  misc_feature: MA Experiment 20000437 PARAMETER Experiment Name: At_Drought_P Parameter: Timepoint (hr) Value: 24
  misc_feature: MA Experiment 20000437 PARAMETER Experiment Name: At_Drought_P Parameter: Tissue Value: Whole Plant
  misc_feature: MA Experiment 20000437 PARAMETER Experiment Name: At_Drought_P Parameter: Treatment Value: Drought vs. No Drought
  misc_feature: MA Experiment ID: 20001248 Result: Up-regulated in Transcription
  misc_feature: MA Experiment 20001248 PARAMETER Experiment Name: At_Far-red-induction_P Parameter: Age (day) Value: 7
  misc_feature: MA Experiment 20001248 PARAMETER Experiment Name: At_Far-red-induction_P Parameter: Light Value: Far-red vs. White
  misc_feature: MA Experiment 20001248 PARAMETER Experiment Name: At_Far-red-induction_P Parameter: Organism Value: A. thaliana
  misc_feature: MA Experiment 20001248 PARAMETER Experiment Name: At_Far-red-induction_P Parameter: Plant Line Value: Columbia
  misc_feature: MA Experiment 20001248 PARAMETER Experiment Name: At_Far-red-induction_P Parameter: Timepoint (hr) Value: 4
  misc_feature: MA Experiment 20001248 PARAMETER Experiment Name: At_Far-red-induction_P Parameter: Tissue Value: Whole Plant
  misc_feature: MA Experiment ID: 20001558 Result: Down-regulated in Transcription
  misc_feature: MA Experiment 20001558 PARAMETER Experiment Name: At_Drought_Soil_Dry_P Parameter: Age (day) Value: 27
  misc_feature: MA Experiment 20001558 PARAMETER Experiment Name: At_Drought_Soil_Dry_P Parameter: Organism Value: A. thaliana
  misc_feature: MA Experiment 20001558 PARAMETER Experiment Name: At_Drought_Soil_Dry_P Parameter: Plant Line Value: WS
  misc_feature: MA Experiment 20001558 PARAMETER Experiment Name: At_Drought_Soil_Dry_P Parameter: Post Timepoint (hr) Value: 6
  misc_feature: MA Experiment 20001558 PARAMETER Experiment Name: At_Drought_Soil_Dry_P Parameter: Post-Treatment Value: Re-Water vs. No Drought
  misc_feature: MA Experiment 20001558 PARAMETER Experiment Name: At_Drought_Soil_Dry_P Parameter: Timepoint (day) Value: 13
  misc_feature: MA Experiment 20001558 PARAMETER Experiment Name: At_Drought_Soil_Dry_P Parameter: Treatment Value: Drought vs. No Drought
aaagaaaccaaaagagtaaaacaaacacagagaagcttcttcttaaacgatgccgtactataccagagatgacaacgacgtcgacgatttcgatgagtttgatccaacgccgtacagtggtggttacgacatcacggtgatctacggccgtccgattccaccttccgatgagacttgttatcctctctcatctggtgtcgatgatgatttcgaatacgagagacctgaatttactcagatccatgagccttctgcttacggtgatgaagctcttaacacagagtacagtagctattctcgacccaagccacgacccgcatttcgacccgatcctggttatggatctgaatccggttatgggaggaaaccggaatctgagtacggatctggctatggtggacaaacggaggtggagtatggtcggagacctgagcagagttatggatctggttatggtggaaggacggagactgaatcggagtatggatctggtggtggtggaagaactgaggttgagtatggtaggagacctgaatcagggcttggatctggttatggtgggagatcggagtctgagtatgagcgtaagcctagctatggaaggtctgaggaacaagaagaaggttataggaagcctagctatggaagatctgaagaacaggaggaaggttacaggaagccaagttatggaagatctgaggagcaggaagaaggatatagaaagcctagctatggaagatctgaggaggaacaagaggaaggttataggaagcctagctatggaagatctgaggaacaagaggaaggaagttacaggaaacctagttatgggaggtctgatgatcaggtggagagttacattaagcctagctatggaagatctgaggaacaggaggagggaagttacaggaagcctagttatgggaggtctgaggaacaggaagaggggagttacaggaagcagcctagctatggccgtggcaatgacgatgatgatgatgagcagcgtaggaaccgttctggttctggtgatgatgaggaagggagctatggccgcaagaaatatggtggcaatgactctgatgaggatgaggagaagaagaagcaccgtcacaagcatcaccaccagaagcgtcgtgacgaagacgatgagtaaactaaaccctctctgtgctagagagtgtaatgagaatgtgtgtttgcttagcctcaaaaatctactaaataaagagctaagtcacatacctttctacataatatcttccgacgttggtgttgtgtttgtttgaatctctgtattattactacagagtcttcgtactggttcataataagacctttaagtggtattgggtcaccatgtaactgttgctactctgtttcgttttctatctatcgttttgtgttatgatttacttttctatccttat

SEQ ID NO: 30758 - protein, 373 aa, Arabidopsis thaliana
  peptide (1)..(373): Ceres Seq. ID no. 12422340
  misc_feature (1)..(373): Homolog of NCBI NO: 18421880 NR Description: putative protein
MRLVILSHLVSMMISNTRDLNLLRSMSLLLTVMKLLTQSTVAILDPSHDPHFDPILVMDLNPVMGGNRNLSTDLAMVDKRRWSMVGDLSRVMDLVMVEGRRLNRSMDLVVVEELRLSMVGDLNQGLDLVMVGDRSLSMSVSLAMEGLRNKKKVIGSLAMEDLKNRRKVTGSQVMEDLRSRKKDIESLAMEDLRRNKRKVIGSLAMEDLRNKRKEVTGNLVMGGLMIRWRVTLSLAMEDLRNRRREVTGSLVMGGLRNRKRGVTGSSLAMAVAMTMMMMSSVGTVLVLVMMRKGAMAARNMVAMTLMRMRRRRSTVTSITTRSVVTKTMSKLNPLCARECNENVCLLSLKNLLNKELSHIPFYIISSDVGVVFV

SEQ ID NO: 30759 - protein, 368 aa, Arabidopsis thaliana
  peptide (1)..(368): Ceres Seq. ID no. 12422341
  misc_feature (44)..(349): Pfam Name: High molecular weight glutenin subunit Pfam Description: High molecular weight glutenin subunit
  misc_feature (150)..(365): Homolog of NCBI NO: 12580871 NR Description: hypothetical protein [Picea abies]
  misc_feature (51)..(343): Homolog of NCBI NO: 15228587 NR Description: hypothetical protein; protein id: At3g29075.1
  misc_feature (68)..(346): Homolog of NCBI NO: 6323826 NR Description: DNA damage inducible
  misc_feature (68)..(346): Homolog of NCBI NO: 171388 NR Description: DDR48 stress protein
  misc_feature (92)..(314): Homolog of NCBI NO: 12580871 NR Description: hypothetical protein [Picea abies]
  misc_feature (1)..(249): Homolog of NCBI NO: 21928162 NR Description: AT3g29075/MXE2_1 [Arabidopsis thaliana]
  misc_feature (1)..(283): Homolog of NCBI NO: 15228587 NR Description: hypothetical protein; protein id: At3g29075.1
  misc_feature (6)..(367): Homolog of NCBI NO: 32352182 NR Description: hypothetical protein [Oryza sativa (japonica
  misc_feature (1)..(368): Homolog of NCBI NO: 24417262 NR Description: unknown [Arabidopsis thaliana]
  misc_feature (1)..(368): Homolog of NCBI NO: 9758332 NR Description: gene_id:MIJ24.6~ref|NP_013897.1~similar to
MPYYTRDDNDVDDFDEFDPTPYSGGYDITVIYGRPIPPSDETCYPLSSGVDDDFEYERPEFTQIHEPSAYGDEALNTEYSSYSRPKPRPAFRPDPGYGSESGYGRKPESEYGSGYGGQTEVEYGRRPEQSYGSGYGGRTETESEYGSGGGGRTEVEYGRRPESGLGSGYGGRSESEYERKPSYGRSEEQEEGYRKPSYGRSEEQEEGYRKPSYGRSEEQEEGYRKPSYGRSEEEQEEGYRKPSYGRSEEQEEGSYRKPSYGRSDDQVESYIKPSYGRSEEQEEGSYRKPSYGRSEEQEEGSYRKQPSYGRGNDDDDDEQRRNRSGSGDDEEGSYGRKKYGGNDSDEDEEKKKHRHKHHHQKRRDEDDE

SEQ ID NO: 30760 - protein, 362 aa, Arabidopsis thaliana
  peptide (1)..(362): Ceres Seq. ID no. 12422342
  misc_feature (1)..(362): Homolog of NCBI NO: 18421880 NR Description: putative protein
MMISNTRDLNLLRSMSLLLTVMKLLTQSTVAILDPSHDPHFDPILVMDLNPVMGGNRNLSTDLAMVDKRRWSMVGDLSRVMDLVMVEGRRLNRSMDLVVVEELRLSMVGDLNQGLDLVMVGDRSLSMSVSLAMEGLRNKKKVIGSLAMEDLKNRRKVTGSQVMEDLRSRKKDIESLAMEDLRRNKRKVIGSLAMEDLRNKRKEVTGNLVMGGLMIRWRVTLSLAMEDLRNRRREVTGSLVMGGLRNRKRGVTGSSLAMAVAMTMMMMSSVGTVLVLVMMRKGAMAARNMVAMTLMRMRRRRSTVTSITTRSVVTKTMSKLNPLCARECNENVCLLSLKNLLNKELSHIPFYIISSDVGVVFV

SEQ ID NO: 30761 - DNA, 1280 bp, Arabidopsis thaliana
  misc_feature (1)..(1280): Ceres Seq. ID no. 12323503
  misc_feature: MA Experiment ID: 108434 Result: Down-regulated in Transcription
  misc_feature: MA Experiment 108434 PARAMETER Experiment Name: At_Root_Tips_cDNA_P Parameter: Tissue Value: Root Tips
  misc_feature: MA Experiment ID: 108461 Result: Up-regulated in Transcription
  misc_feature: MA Experiment 108461 PARAMETER Experiment Name: At_Germinating_Seeds_cDNA_P Parameter: Age (day) Value: 1 vs. 0
  misc_feature: MA Experiment 108461 PARAMETER Experiment Name: At_Germinating_Seeds_cDNA_P Parameter: Tissue Value: Germinating Seeds
  misc_feature: MA Experiment ID: 108462 Result: Up-regulated in Transcription
  misc_feature: MA Experiment 108462 PARAMETER Experiment Name: At_Germinating_Seeds_cDNA_P Parameter: Age (day) Value: 2 vs. 0
  misc_feature: MA Experiment 108462 PARAMETER Experiment Name: At_Germinating_Seeds_cDNA_P Parameter: Tissue Value: Germinating Seeds
  misc_feature: MA Experiment ID: 108463 Result: Up-regulated in Transcription
  misc_feature: MA Experiment 108463 PARAMETER Experiment Name: At_Germinating_Seeds_cDNA_P Parameter: Age (day) Value: 3 vs. 0
  misc_feature: MA Experiment 108463 PARAMETER Experiment Name: At_Germinating_Seeds_cDNA_P Parameter: Tissue Value: Germinating Seeds
  misc_feature: MA Experiment ID: 108464 Result: Up-regulated in Transcription
  misc_feature: MA Experiment 108464 PARAMETER Experiment Name: At_Germinating_Seeds_cDNA_P Parameter: Age (day) Value: 4 vs. 0
  misc_feature: MA Experiment 108464 PARAMETER Experiment Name: At_Germinating_Seeds_cDNA_P Parameter: Tissue Value: Germinating Seeds
  misc_feature: MA Experiment ID: 108469 Result: Up-regulated in Transcription
  misc_feature: MA Experiment ID: 108488 Result: Down-regulated in Transcription
  misc_feature: MA Experiment ID: 108573 Result: Up-regulated in Transcription
  misc_feature: MA Experiment 108573 PARAMETER Experiment Name: At_Drought_cDNA_P Parameter: Timepoint (hr) Value: 6
  misc_feature: MA Experiment 108573 PARAMETER Experiment Name: At_Drought_cDNA_P Parameter: Tissue Value: Aerial
  misc_feature: MA Experiment 108573 PARAMETER Experiment Name: At_Drought_cDNA_P Parameter: Treatment Value: Drought vs. No Drought
  misc_feature: MA Experiment ID: 108574 Result: Up-regulated in Transcription
  misc_feature: MA Experiment 108574 PARAMETER Experiment Name: At_Wounding__cDNA_P Parameter: Timepoint (hr) Value: 1
  misc_feature: MA Experiment 108574 PARAMETER Experiment Name: At_Wounding__cDNA_P Parameter: Tissue Value: Aerial
  misc_feature: MA Experiment 108574 PARAMETER Experiment Name: At_Wounding__cDNA_P Parameter: Treatment Value: Wounding vs. No Wounding
  misc_feature: MA Experiment ID: 108577 Result: Down-regulated in Transcription
  misc_feature: MA Experiment 108577 PARAMETER Experiment Name: At_42deg_Heat_cDNA_P Parameter: Temperature (deg C) Value: 42 vs. 22
  misc_feature: MA Experiment 108577 PARAMETER Experiment Name: At_42deg_Heat_cDNA_P Parameter: Timepoint (hr) Value: 6
  misc_feature: MA Experiment 108577 PARAMETER Experiment Name: At_42deg_Heat_cDNA_P Parameter: Tissue Value: Aerial
  misc_feature: MA Experiment ID: 108579 Result: Up-regulated in Transcription
  misc_feature: MA Experiment 108579 PARAMETER Experiment Name: At_4deg_Cold_cDNA_P Parameter: Temperature (deg C) Value: 4 vs. 22
  misc_feature: MA Experiment 108579 PARAMETER Experiment Name: At_4deg_Cold_cDNA_P Parameter: Timepoint (hr) Value: 6
  misc_feature: MA Experiment 108579 PARAMETER Experiment Name: At_4deg_Cold_cDNA_P Parameter: Tissue Value: Aerial
  misc_feature: MA Experiment ID: 108585 Result: Up-regulated in Transcription
  misc_feature: MA Experiment 108585 PARAMETER Experiment Name: At_5mM_NaNP_cDNA_P Parameter: Timepoint (hr) Value: 6
  misc_feature: MA Experiment 108585 PARAMETER Experiment Name: At_5mM_NaNP_cDNA_P Parameter: Tissue Value: Aerial
  misc_feature: MA Experiment 108585 PARAMETER Experiment Name: At_5mM_NaNP_cDNA_P Parameter: Treatment Value: null
  misc_feature: MA Experiment ID: 108667 Result: Up-regulated in Transcription
  misc_feature: MA Experiment 108667 PARAMETER Experiment Name: At_2mM_SA_cDNA_P Parameter: Plant Line Value: WS
  misc_feature: MA Experiment 108667 PARAMETER Experiment Name: At_2mM_SA_cDNA_P Parameter: Timepoint (hr) Value: 1
  misc_feature: MA Experiment 108667 PARAMETER Experiment Name: At_2mM_SA_cDNA_P Parameter: Treatment Value: 2mM SA vs. No Treatment
  misc_feature: MA Experiment ID: 20000144 Result: Down-regulated in Transcription
  misc_feature: MA Experiment 20000144 PARAMETER Experiment Name: At_42deg_Heat_cDNA_P Parameter: Temperature (deg C) Value: 42 vs. 22
  misc_feature: MA Experiment 20000144 PARAMETER Experiment Name: At_42deg_Heat_cDNA_P Parameter: Timepoint (hr) Value: 1
  misc_feature: MA Experiment 20000144 PARAMETER Experiment Name: At_42deg_Heat_cDNA_P Parameter: Tissue Value: Aerial
  misc_feature: MA Experiment ID: 20000171 Result: Down-regulated in Transcription
  misc_feature: MA Experiment 20000171 PARAMETER Experiment Name: At_42deg_Heat_P Parameter: Age (day) Value: 14
  misc_feature: MA Experiment 20000171 PARAMETER Experiment Name: At_42deg_Heat_P Parameter: Organism Value: A. thaliana
  misc_feature: MA Experiment 20000171 PARAMETER Experiment Name: At_42deg_Heat_P Parameter: Plant Line Value: WS
  misc_feature: MA Experiment 20000171 PARAMETER Experiment Name: At_42deg_Heat_P Parameter: Temperature (deg C) Value: 42 vs. 22
  misc_feature: MA Experiment 20000171 PARAMETER Experiment Name: At_42deg_Heat_P Parameter: Timepoint (hr) Value: 1
  misc_feature: MA Experiment 20000171 PARAMETER Experiment Name: At_42deg_Heat_P Parameter: Tissue Value: Aerial
  misc_feature: MA Experiment ID: 20000173 Result: Down-regulated in Transcription
  misc_feature: MA Experiment 20000173 PARAMETER Experiment Name: At_42deg_Heat_P Parameter: Age (day) Value: 14
  misc_feature: MA Experiment 20000173 PARAMETER Experiment Name: At_42deg_Heat_P Parameter: Organism Value: A. thaliana
  misc_feature: MA Experiment 20000173 PARAMETER Experiment Name: At_42deg_Heat_P Parameter: Plant Line Value: WS
  misc_feature: MA Experiment 20000173 PARAMETER Experiment Name: At_42deg_Heat_P Parameter: Temperature (deg C) Value: 42 vs. 22
  misc_feature: MA Experiment 20000173 PARAMETER Experiment Name: At_42deg_Heat_P Parameter: Timepoint (hr) Value: 6
  misc_feature: MA Experiment 20000173 PARAMETER Experiment Name: At_42deg_Heat_P Parameter: Tissue Value: Aerial
  misc_feature: MA Experiment ID: 20000180 Result: Up-regulated in Transcription
  misc_feature: MA Experiment 20000180 PARAMETER Experiment Name: At_Germinating_Seeds_P Parameter: Age (hr) Value: 24 vs. 0
  misc_feature: MA Experiment 20000180 PARAMETER Experiment Name: At_Germinating_Seeds_P Parameter: Tissue Value: Germinating Seeds
  misc_feature: MA Experiment ID: 20000182 Result: Up-regulated in Transcription
  misc_feature: MA Experiment 20000182 PARAMETER Experiment Name: At_2mM_SA_P Parameter: Age (day) Value: 14
  misc_feature: MA Experiment 20000182 PARAMETER Experiment Name: At_2mM_SA_P Parameter: Organism Value: A. thaliana
  misc_feature: MA Experiment 20000182 PARAMETER Experiment Name: At_2mM_SA_P Parameter: Plant Line Value: WS
  misc_feature: MA Experiment 20000182 PARAMETER Experiment Name: At_2mM_SA_P Parameter: Timepoint (hr) Value: 6
  misc_feature: MA Experiment 20000182 PARAMETER Experiment Name: At_2mM_SA_P Parameter: Tissue Value: Aerial
  misc_feature: MA Experiment 20000182 PARAMETER Experiment Name: At_2mM_SA_P Parameter: Treatment Value: 2mM SA vs. No Treatment
  misc_feature: MA Experiment ID: 20000185 Result: Down-regulated in Transcription
  misc_feature: MA Experiment 20000185 PARAMETER Experiment Name: At_Roots__P Parameter: Age (day) Value: 7 vs. 21
  misc_feature: MA Experiment 20000185 PARAMETER Experiment Name: At_Roots__P Parameter: Organism Value: A. thaliana
  misc_feature: MA Experiment 20000185 PARAMETER Experiment Name: At_Roots__P Parameter: Tissue Value: Roots vs. Whole Plant
  misc_feature: MA Experiment ID: 20000213 Result: Up-regulated in Transcription
  misc_feature: MA Experiment 20000213 PARAMETER Experiment Name: At_4deg_Cold_P Parameter: Timepoint (hr) Value: 2
  misc_feature: MA Experiment ID: 20000227 Result: Up-regulated in Transcription
  misc_feature: MA Experiment 20000227 PARAMETER Experiment Name: At_Root-Tips-vs-Tops_P Parameter: Tissue Value: Root Tips vs. Root Tops
  misc_feature: MA Experiment ID: 20000265 Result: Down-regulated in Transcription
  misc_feature: MA Experiment 20000265 PARAMETER Experiment Name: At_Open_Flower_P Parameter: Age (day) Value: 21
  misc_feature: MA Experiment 20000265 PARAMETER Experiment Name: At_Open_Flower_P Parameter: Plant Line Value: WS
  misc_feature: MA Experiment 20000265 PARAMETER Experiment Name: At_Open_Flower_P Parameter: Tissue Value: Closed Flower vs. Whole Plant
  misc_feature: MA Experiment ID: 20000438 Result: Down-regulated in Transcription
  misc_feature: MA Experiment 20000438 PARAMETER Experiment Name: At_Shoots__P Parameter: Age (day) Value: 14
  misc_feature: MA Experiment 20000438 PARAMETER Experiment Name: At_Shoots__P Parameter: Tissue Value: Shoots vs. Whole Plant
  misc_feature: MA Experiment ID: 20000439 Result: Down-regulated in Transcription
  misc_feature: MA Experiment 20000439 PARAMETER Experiment Name: At_Roots__P Parameter: Age (day) Value: 14 vs. 21
  misc_feature: MA Experiment 20000439 PARAMETER Experiment Name: At_Roots__P Parameter: Organism Value: A. thaliana
  misc_feature: MA Experiment 20000439 PARAMETER Experiment Name: At_Roots__P Parameter: Tissue Value: Roots vs. Whole Plant
  misc_feature: MA Experiment ID: 20000455 Result: Down-regulated in Transcription
  misc_feature: MA Experiment 20000455 PARAMETER Experiment Name: At_100uM_ABA_P Parameter: Age (day) Value: 16
  misc_feature: MA Experiment 20000455 PARAMETER Experiment Name: At_100uM_ABA_P Parameter: Organism Value: A. thaliana
  misc_feature: MA Experiment 20000455 PARAMETER Experiment Name: At_100uM_ABA_P Parameter: Plant Line Value: WS
  misc_feature: MA Experiment 20000455 PARAMETER Experiment Name: At_100uM_ABA_P Parameter: Timepoint (hr) Value: 48
  misc_feature: MA Experiment 20000455 PARAMETER Experiment Name: At_100uM_ABA_P Parameter: Tissue Value: Aerial
  misc_feature: MA Experiment 20000455 PARAMETER Experiment Name: At_100uM_ABA_P Parameter: Treatment Value: 100uM ABA vs. No Treatment
  misc_feature: MA Experiment ID: 20000460 Result: Up-regulated in Transcription
  misc_feature: MA Experiment 20000460 PARAMETER Experiment Name: At_10percent_PEG_P Parameter: Age (day) Value: 12
  misc_feature: MA Experiment 20000460 PARAMETER Experiment Name: At_10percent_PEG_P Parameter: Organism Value: A. thaliana
  misc_feature: MA Experiment 20000460 PARAMETER Experiment Name: At_10percent_PEG_P Parameter: Plant Line Value: WS
  misc_feature: MA Experiment 20000460 PARAMETER Experiment Name: At_10percent_PEG_P Parameter: Timepoint (day) Value: 12
  misc_feature: MA Experiment 20000460 PARAMETER Experiment Name: At_10percent_PEG_P Parameter: Tissue Value: Whole Plant
  misc_feature: MA Experiment 20000460 PARAMETER Experiment Name: At_10percent_PEG_P Parameter: Treatment Value: 10percent PEG vs. No Treatment
  misc_feature: MA Experiment ID: 20000495 Result: Down-regulated in Transcription
  misc_feature: MA Experiment 20000495 PARAMETER Experiment Name: At_Guard_Cells_P Parameter: Harvest Date Value: 8/2/2002
  misc_feature: MA Experiment 20000495 PARAMETER Experiment Name: At_Guard_Cells_P Parameter: Organism Value: A. thaliana
  misc_feature: MA Experiment 20000495 PARAMETER Experiment Name: At_Guard_Cells_P Parameter: Tissue Value: Guard Cells vs. Leaves
  misc_feature: MA Experiment ID: 20000527 Result: Up-regulated in Transcription
  misc_feature: MA Experiment 20000527 PARAMETER Experiment Name: At_10percent_PEG_P Parameter: Age (day) Value: 20
  misc_feature: MA Experiment 20000527 PARAMETER Experiment Name: At_10percent_PEG_P Parameter: Organism Value: A. thaliana
  misc_feature: MA Experiment 20000527 PARAMETER Experiment Name: At_10percent_PEG_P Parameter: Plant Line Value: WS
  misc_feature: MA Experiment 20000527 PARAMETER Experiment Name: At_10percent_PEG_P Parameter: Timepoint (day) Value: 20
  misc_feature: MA Experiment 20000527 PARAMETER Experiment Name: At_10percent_PEG_P Parameter: Tissue Value: Whole Plant
  misc_feature: MA Experiment 20000527 PARAMETER Experiment Name: At_10percent_PEG_P Parameter: Treatment Value: 10percent PEG vs. No Treatment
  misc_feature: MA Experiment ID: 20000709 Result: Up-regulated in Transcription
  misc_feature: MA Experiment 20000709 PARAMETER Experiment Name: At_15mM_NH4NO3_L-to-H_P Parameter: Age (hr) Value: 14
  misc_feature: MA Experiment 20000709 PARAMETER Experiment Name: At_15mM_NH4NO3_L-to-H_P Parameter: Organism Value: A. thaliana
  misc_feature: MA Experiment 20000709 PARAMETER Experiment Name: At_15mM_NH4NO3_L-to-H_P Parameter: Plant Line Value: WS
  misc_feature: MA Experiment 20000709 PARAMETER Experiment Name: At_15mM_NH4NO3_L-to-H_P Parameter: Timepoint (hr) Value: 4
  misc_feature: MA Experiment 20000709 PARAMETER Experiment Name: At_15mM_NH4NO3_L-to-H_P Parameter: Tissue Value: Aerial
  misc_feature: MA Experiment 20000709 PARAMETER Experiment Name: At_15mM_NH4NO3_L-to-H_P Parameter: Treatment Value: 15mM NH4NO3 vs. 30mM Mannitol
  misc_feature: MA Experiment ID: 20001247 Result: Up-regulated in Transcription
  misc_feature: MA Experiment 20001247 PARAMETER Experiment Name: At_Far-red-induction_P Parameter: Age (day) Value: 7
  misc_feature: MA Experiment 20001247 PARAMETER Experiment Name: At_Far-red-induction_P Parameter: Light Value: Far-red vs. White
  misc_feature: MA Experiment 20001247 PARAMETER Experiment Name: At_Far-red-induction_P Parameter: Organism Value: A. thaliana
  misc_feature: MA Experiment 20001247 PARAMETER Experiment Name: At_Far-red-induction_P Parameter: Plant Line Value: Columbia
  misc_feature: MA Experiment 20001247 PARAMETER Experiment Name: At_Far-red-induction_P Parameter: Timepoint (hr) Value: 1
  misc_feature: MA Experiment 20001247 PARAMETER Experiment Name: At_Far-red-induction_P Parameter: Tissue Value: Whole Plant
  misc_feature: MA Experiment ID: 20001554 Result: Down-regulated in Transcription
  misc_feature: MA Experiment 20001554 PARAMETER Experiment Name: At_Drought_Soil_Dry_P Parameter: Age (day) Value: 21
  misc_feature: MA Experiment 20001554 PARAMETER Experiment Name: At_Drought_Soil_Dry_P Parameter: Organism Value: A. thaliana
  misc_feature: MA Experiment 20001554 PARAMETER Experiment Name: At_Drought_Soil_Dry_P Parameter: Plant Line Value: WS
  misc_feature: MA Experiment 20001554 PARAMETER Experiment Name: At_Drought_Soil_Dry_P Parameter: Post Timepoint (hr) Value: None
  misc_feature: MA Experiment 20001554 PARAMETER Experiment Name: At_Drought_Soil_Dry_P Parameter: Post-Treatment Value: None
  misc_feature: MA Experiment 20001554 PARAMETER Experiment Name: At_Drought_Soil_Dry_P Parameter: Timepoint (day) Value: 7
  misc_feature: MA Experiment 20001554 PARAMETER Experiment Name: At_Drought_Soil_Dry_P Parameter: Treatment Value: Drought vs. No Drought
  misc_feature: MA Experiment ID: 20001555 Result: Down-regulated in Transcription
  misc_feature: MA Experiment 20001555 PARAMETER Experiment Name: At_Drought_Soil_Dry_P Parameter: Age (day) Value: 24
  misc_feature: MA Experiment 20001555 PARAMETER Experiment Name: At_Drought_Soil_Dry_P Parameter: Organism Value: A. thaliana
  misc_feature: MA Experiment 20001555 PARAMETER Experiment Name: At_Drought_Soil_Dry_P Parameter: Plant Line Value: WS
  misc_feature: MA Experiment 20001555 PARAMETER Experiment Name: At_Drought_Soil_Dry_P Parameter: Post Timepoint (hr) Value: None
  misc_feature: MA Experiment 20001555 PARAMETER Experiment Name: At_Drought_Soil_Dry_P Parameter: Post-Treatment Value: None
  misc_feature: MA Experiment 20001555 PARAMETER Experiment Name: At_Drought_Soil_Dry_P Parameter: Timepoint (day) Value: 10
  misc_feature: MA Experiment 20001555 PARAMETER Experiment Name: At_Drought_Soil_Dry_P Parameter: Treatment Value: Drought vs. No Drought
  misc_feature: MA Experiment ID: 20001556 Result: Down-regulated in Transcription
  misc_feature: MA Experiment 20001556 PARAMETER Experiment Name: At_Drought_Soil_Dry_P Parameter: Age (day) Value: 26
  misc_feature: MA Experiment 20001556 PARAMETER Experiment Name: At_Drought_Soil_Dry_P Parameter: Organism Value: A. thaliana
  misc_feature: MA Experiment 20001556 PARAMETER Experiment Name: At_Drought_Soil_Dry_P Parameter: Plant Line Value: WS
  misc_feature: MA Experiment 20001556 PARAMETER Experiment Name: At_Drought_Soil_Dry_P Parameter: Post Timepoint (hr) Value: None
  misc_feature: MA Experiment 20001556 PARAMETER Experiment Name: At_Drought_Soil_Dry_P Parameter: Post-Treatment Value: None
  misc_feature: MA Experiment 20001556 PARAMETER Experiment Name: At_Drought_Soil_Dry_P Parameter: Timepoint (day) Value: 12
  misc_feature: MA Experiment 20001556 PARAMETER Experiment Name: At_Drought_Soil_Dry_P Parameter: Treatment Value: Drought vs. No Drought
  misc_feature: MA Experiment ID: 20001557 Result: Up-regulated in Transcription
  misc_feature: MA Experiment 20001557 PARAMETER Experiment Name: At_Drought_Soil_Dry_P Parameter: Age (day) Value: 27
  misc_feature: MA Experiment 20001557 PARAMETER Experiment Name: At_Drought_Soil_Dry_P Parameter: Organism Value: A. thaliana
  misc_feature: MA Experiment 20001557 PARAMETER Experiment Name: At_Drought_Soil_Dry_P Parameter: Plant Line Value: WS
  misc_feature: MA Experiment 20001557 PARAMETER Experiment Name: At_Drought_Soil_Dry_P Parameter: Post Timepoint (hr) Value: 3
  misc_feature: MA Experiment 20001557 PARAMETER Experiment Name: At_Drought_Soil_Dry_P Parameter: Post-Treatment Value: Re-Water vs. No Drought
  misc_feature: MA Experiment 20001557 PARAMETER Experiment Name: At_Drought_Soil_Dry_P Parameter: Timepoint (day) Value: 13
  misc_feature: MA Experiment 20001557 PARAMETER Experiment Name: At_Drought_Soil_Dry_P Parameter: Treatment Value: Drought vs. No Drought
  misc_feature: MA Experiment ID: 20001774 Result: Down-regulated in Transcription
  misc_feature: MA Experiment 20001774 PARAMETER Experiment Name: At_Far-red-enriched-adult_P Parameter: Age (day) Value: 31
  misc_feature: MA Experiment 20001774 PARAMETER Experiment Name: At_Far-red-enriched-adult_P Parameter: Light Value: Far-red enriched vs. White
  misc_feature: MA Experiment 20001774 PARAMETER Experiment Name: At_Far-red-enriched-adult_P Parameter: Organism Value: A. thaliana
  misc_feature: MA Experiment 20001774 PARAMETER Experiment Name: At_Far-red-enriched-adult_P Parameter: Plant Line Value: Columbia
  misc_feature: MA Experiment 20001774 PARAMETER Experiment Name: At_Far-red-enriched-adult_P Parameter: Timepoint (hr) Value: 72
  misc_feature: MA Experiment 20001774 PARAMETER Experiment Name: At_Far-red-enriched-adult_P Parameter: Tissue Value: Aerial
  misc_feature: MA Experiment ID: 20001905 Result: Up-regulated in Transcription
  misc_feature: MA Experiment 20001905 PARAMETER Experiment Name: At_Drought_Reproduction_P Parameter: Age (day) Value: 40
  misc_feature: MA Experiment 20001905 PARAMETER Experiment Name: At_Drought_Reproduction_P Parameter: Organism Value: A. thaliana
  misc_feature: MA Experiment 20001905 PARAMETER Experiment Name: At_Drought_Reproduction_P Parameter: Plant Line Value: WS
  misc_feature: MA Experiment 20001905 PARAMETER Experiment Name: At_Drought_Reproduction_P Parameter: Timepoint (day) Value: 10
  misc_feature: MA Experiment 20001905 PARAMETER Experiment Name: At_Drought_Reproduction_P Parameter: Tissue Value: Rosettes
  misc_feature: MA Experiment 20001905 PARAMETER Experiment Name: At_Drought_Reproduction_P Parameter: Treatment Value: Drought vs. No Drought
  misc_feature: MA Experiment ID: 20001911 Result: Down-regulated in Transcription
  misc_feature: MA Experiment 20001911 PARAMETER Experiment Name: At_Drought_Reproduction_P Parameter: Age (day) Value: 40
  misc_feature: MA Experiment 20001911 PARAMETER Experiment Name: At_Drought_Reproduction_P Parameter: Organism Value: A. thaliana
  misc_feature: MA Experiment 20001911 PARAMETER Experiment Name: At_Drought_Reproduction_P Parameter: Plant Line Value: WS
  misc_feature: MA Experiment 20001911 PARAMETER Experiment Name: At_Drought_Reproduction_P Parameter: Timepoint (day) Value: 10
  misc_feature: MA Experiment 20001911 PARAMETER Experiment Name: At_Drought_Reproduction_P Parameter: Tissue Value: Flowers
  misc_feature: MA Experiment 20001911 PARAMETER Experiment Name: At_Drought_Reproduction_P Parameter: Treatment Value: Drought vs. No Drought
agaaacaccaaaccttaaaaagagctctgctttgagatcttagccattaagttctcttgatgatgtctggttcaagattagtctctagactaataataatcttctcaataatctccacatctttcctcaccgttgaatcgattcgattactccccgattcgttcgaagatgcatcttcagatttcatggaagctccagcatatcaaaacggtcttgaatgctctgttttagccaaaaacagactcttgttagcttgtgatccatcagctgttcatatagctatgactctagatccagcttacttgcgtggcacggtatctgcagtacattccatcctcaaacacacttcttgccctgaaaacatcttcttccacttcattgcttcgggtacaagtcagggttcgctcgccaagaccctatcctctgtttttccttctttgagtttcaaagtctatacctttgatgaaactatagtaaagaatctaatctcttcatctataagacaagctcttgatagtcctttgaattacgcaagaagctacttatccgagatcctttctttgtgtgttagtcgagtgatatatctcgattcggatgtgattgtggtcaatgatattcagaaactatggaagatttctttatccgggtcaagaacaatcggtgcaccagagtattgccacgcaaatttcaccaaatacttcacagatagcttctggtccgatcgaaaactctcgagcgtcttcgattccaagactccttgttatttcaacacaggagtgatggttattgatttagagcggtggagagaaggagattacacgagaaagatcgaaaactggatgaagattcagaaagaagataagagaatctacgaattgggttctttaccaccgtttcttctagtgtttggtggtgatattgaagctattgatcatcaatggaaccaacacggtctcggtggagacaacattgtgagtagttgtagatctttgcatcctggtccggttagtttgatacattggagtggtaaagggaagccatgggttaggcttgatgatggtaagccttgtccaattgattatctttgggctccttatgatcttcacaagtcacagaggcagtatcttcaatacaatcaagagttagaaattctttgatttattcattttttggggttttggtatggtaaattttgtgaactcattacatggattctatgttttttgttattccttttttaatgtacatacaacataaatacatcgaggattttgttcaag

SEQ ID NO: 30762 - protein, 365 aa, Arabidopsis thaliana
  peptide (1)..(365): Ceres Seq. ID no. 12323504
  misc_feature (1)..(351): Homolog of NCBI NO: 34898906 NR Description: putative glycosyl transferase
  misc_feature (2)..(357): Homolog of NCBI NO: 15230679 NR Description: putative glycosyl transferase; protein id:
  misc_feature (8)..(350): Homolog of NCBI NO: 21554300 NR Description: putative glycosyl transferase [Arabidopsis
  misc_feature (8)..(350): Homolog of NCBI NO: 15235247 NR Description: predicted glycosyl transferase
  misc_feature (1)..(349): Homolog of NCBI NO: 11281926 NR Description: hypothetical protein F26K9.90 - Arabidopsis
  misc_feature (1)..(349): Homolog of NCBI NO: 22331906 NR Description: putative protein
  misc_feature (42)..(350): Homolog of NCBI NO: 15221684 NR Description: putative glycosyl transferase; protein id:
  misc_feature (42)..(353): Homolog of NCBI NO: 18409445 NR Description: expressed protein
  misc_feature (11)..(350): Homolog of NCBI NO: 12003394 NR Description: Avr9/Cf-9 rapidly elicited protein 231 [Nicotiana
  misc_feature (1)..(365): Homolog of NCBI NO: 30689156 NR Description: galactinol synthase, putative [Arabidopsis
MMSGSRLVSRLIIIFSIISTSFLTVESIRLLPDSFEDASSDFMEAPAYQNGLECSVLAKNRLLLACDPSAVHIAMTLDPAYLRGTVSAVHSILKHTSCPENIFFHFIASGTSQGSLAKTLSSVFPSLSFKVYTFDETIVKNLISSSIRQALDSPLNYARSYLSEILSLCVSRVIYLDSDVIVVNDIQKLWKISLSGSRTIGAPEYCHANFTKYFTDSFWSDRKLSSVFDSKTPCYFNTGVMVIDLERWREGDYTRKIENWMKIQKEDKRIYELGSLPPFLLVFGGDIEAIDHQWNQHGLGGDNIVSSCRSLHPGPVSLIHWSGKGKPWVRLDDGKPCPIDYLWAPYDLHKSQRQYLQYNQELEIL

SEQ ID NO: 30763 - protein, 364 aa, Arabidopsis thaliana
  peptide (1)..(364): Ceres Seq. ID no. 12323505
  misc_feature (1)..(350): Homolog of NCBI NO: 34898906 NR Description: putative glycosyl transferase
  misc_feature (1)..(356): Homolog of NCBI NO: 15230679 NR Description: putative glycosyl transferase; protein id:
  misc_feature (7)..(349): Homolog of NCBI NO: 21554300 NR Description: putative glycosyl transferase [Arabidopsis
  misc_feature (7)..(349): Homolog of NCBI NO: 15235247 NR Description: predicted glycosyl transferase
  misc_feature (1)..(348): Homolog of NCBI NO: 11281926 NR Description: hypothetical protein F26K9.90 - Arabidopsis
  misc_feature (1)..(348): Homolog of NCBI NO: 22331906 NR Description: putative protein
  misc_feature (41)..(349): Homolog of NCBI NO: 15221684 NR Description: putative glycosyl transferase; protein id:
  misc_feature (41)..(352): Homolog of NCBI NO: 18409445 NR Description: expressed protein
  misc_feature (10)..(349): Homolog of NCBI NO: 12003394 NR Description: Avr9/Cf-9 rapidly elicited protein 231 [Nicotiana
  misc_feature (1)..(364): Homolog of NCBI NO: 30689156 NR Description: galactinol synthase, putative [Arabidopsis
MSGSRLVSRLIIIFSIISTSFLTVESIRLLPDSFEDASSDFMEAPAYQNGLECSVLAKNRLLLACDPSAVHIAMTLDPAYLRGTVSAVHSILKHTSCPENIFFHFIASGTSQGSLAKTLSSVFPSLSFKVYTFDETIVKNLISSSIRQALDSPLNYARSYLSEILSLCVSRVIYLDSDVIVVNDIQKLWKISLSGSRTIGAPEYCHANFTKYFTDSFWSDRKLSSVFDSKTPCYFNTGVMVIDLERWREGDYTRKIENWMKIQKEDKRIYELGSLPPFLLVFGGDIEAIDHQWNQHGLGGDNIVSSCRSLHPGPVSLIHWSGKGKPWVRLDDGKPCPIDYLWAPYDLHKSQRQYLQYNQELEIL

SEQ ID NO: 30764 - protein, 323 aa, Arabidopsis thaliana
  peptide (1)..(323): Ceres Seq. ID no. 12323506
  misc_feature (1)..(309): Homolog of NCBI NO: 34898906 NR Description: putative glycosyl transferase
  misc_feature (1)..(315): Homolog of NCBI NO: 15230679 NR Description: putative glycosyl transferase; protein id:
  misc_feature (1)..(308): Homolog of NCBI NO: 21554300 NR Description: putative glycosyl transferase [Arabidopsis
  misc_feature (1)..(308): Homolog of NCBI NO: 15235247 NR Description: predicted glycosyl transferase
  misc_feature (1)..(307): Homolog of NCBI NO: 11281926 NR Description: hypothetical protein F26K9.90 - Arabidopsis
  misc_feature (1)..(307): Homolog of NCBI NO: 22331906 NR Description: putative protein
  misc_feature (1)..(308): Homolog of NCBI NO: 15221684 NR Description: putative glycosyl transferase; protein id:
  misc_feature (1)..(311): Homolog of NCBI NO: 18409445 NR Description: expressed protein
  misc_feature (1)..(308): Homolog of NCBI NO: 12003394 NR Description: Avr9/Cf-9 rapidly elicited protein 231 [Nicotiana
  misc_feature (1)..(323): Homolog of NCBI NO: 30689156 NR Description: galactinol synthase, putative [Arabidopsis
MEAPAYQNGLECSVLAKNRLLLACDPSAVHIAMTLDPAYLRGTVSAVHSILKHTSCPENIFFHFIASGTSQGSLAKTLSSVFPSLSFKVYTFDETIVKNLISSSIRQALDSPLNYARSYLSEILSLCVSRVIYLDSDVIVVNDIQKLWKISLSGSRTIGAPEYCHANFTKYFTDSFWSDRKLSSVFDSKTPCYFNTGVMVIDLERWREGDYTRKIENWMKIQKEDKRIYELGSLPPFLLVFGGDIEAIDHQWNQHGLGGDNIVSSCRSLHPGPVSLIHWSGKGKPWVRLDDGKPCPIDYLWAPYDLHKSQRQYLQYNQELEIL

SEQ ID NO: 30765 - DNA, 1608 bp, Arabidopsis thaliana
  misc_feature (1)..(1608): Ceres Seq. ID no. 12340059
  misc_feature: MA Experiment ID: 108434 Result: Up-regulated in Transcription
  misc_feature: MA Experiment 108434 PARAMETER Experiment Name: At_Root_Tips_cDNA_P Parameter: Tissue Value: Root Tips
  misc_feature: MA Experiment ID: 108435 Result: Up-regulated in Transcription
  misc_feature: MA Experiment 108435 PARAMETER Experiment Name: At_stm_Mutants_cDNA_P Parameter: Plant Line Value: wt Landsburg vs stm
  misc_feature: MA Experiment 108435 PARAMETER Experiment Name: At_stm_Mutants_cDNA_P Parameter: Tissue Value: Shoot Apical Meristem Region
ataagccaagcaaagggggttttagggtttttgaccgcgagccagatctctttctcttgtttctcccacttccgaatcaatggccttctcttctctcctcagatctgccgcctcctatacggttgccgctcctcgccctgactttttctcgtcgccggcgtctgatcattctaaggtgttgtcaagtcttggatttagtcgcaacctgaagccatcaagattttcttctgggatatcttcatctctacaaaatggcaatgcaagaagtgtgcaacccatcaaggccacggctacagaagtgccatctgcagttcgaaggtcaagtagcagtggaaagacaaaggttgggatcaacggttttggtcggattggaaggttggtcctccgcattgcaacatcaagggatgatattgaggttgtagcagtgaatgacccattcattgatgccaagtacatggcttacatgttgaagtatgattctactcatggaaatttcaagggaagcatcaatgtcattgatgattctactttggagatcaatgggaagaaggtcaatgttgtcagcaagagagatccatctgagatcccatgggctgatcttggagctgattatgttgttgagtcttccggtgtattcaccaccctgtcaaaggctgcatcccatttgaagggcggtgccaagaaagttataatttctgccccttctggctgacgcacctatgtttgttgttggagtaaacgagcacacataccaaccaaacatggatatagtctccaatgcaagttgtaccaccaattgtcttgcccctcttgccaaggtggtacatgaggaatttggtattcttgaaggcttgatgacaactgtccacgcaactacagctactcagaaaactgttgatgggccatcaatgaaggactggagaggaggtcggggcgctagtcaaaacatcattcctagctcaaccggcgccgcgaaggctgtaggtaaagttcttccagaactgaatgggaaacttacgggaatggccttccgtgtaccaacatcgaatgtttctgtggtggatttaacttgtcgacttgagaagggtgcctcttacgaagatgttaaggcagccattaagcatgcctcagaaggacctcttaaaggcattctcgggtacacagatgaagatgtcgtctccaatgatttcgtcggtgattcaaggtccagtatctttgacgccaatgctggtattggattgagcaagtcctttgtgaaacttgtctcttggtacgacaacgaatggggttacagcaaccgagttcttgaccttatagagcacatggctttggtagctgccagccactaaatacacacaccagttcttgcagaagcttgagtctttctgctttttgcgtaacctgctctacaaagccggtttggatttgttcggttcaattaggtgccactgtgctaggtgttttgaaatatttggcttgaatctcgagcctttactctatttttgttctgttccagtatcagcaaccatggaaactagatttggtccaaaagactgaaaaactgtgcgacttacatctatgaataaggggctaagctagttgtacttt

SEQ ID NO: 30766 - protein, 210 aa, Arabidopsis thaliana
  peptide (1)..(210): Ceres Seq. ID no. 12340060
  misc_feature (67)..(209): Homolog of NCBI NO: 3059122 NR Description: glyeraldehyde-3-phosphate dehydrogenase [Marsilea
  misc_feature (60)..(210): Homolog of NCBI NO: 3059140 NR Description: NAD-dependent glyceraldehyde-3-phosphate
  misc_feature (1)..(209): Homolog of NCBI NO: 2129472 NR Description: glyceraldehyde-3-phosphate dehydrogenase
  misc_feature (1)..(209): Homolog of NCBI NO: 2129471 NR Description: glyceraldehyde-3-phosphate dehydrogenase
  misc_feature (1)..(209): Homolog of NCBI NO: 18072805 NR Description: glyceraldehyde-3-phosphate dehydrogenase
  misc_feature (1)..(209): Homolog of NCBI NO: 25284351 NR Description: hypothetical protein F3O9.10 - Arabidopsis
  misc_feature (1)..(209): Homolog of NCBI NO: 27754473 NR Description: putative glyceraldehyde-3-phosphate dehydrogenase
  misc_feature (1)..(209): Homolog of NCBI NO: 21618027 NR Description: putative glyceraldehyde-3-phosphate dehydrogenase
  misc_feature (1)..(209): Homolog of NCBI NO: 15219206 NR Description: putative glyceraldehyde-3-phosphate dehydrogenase
  misc_feature (1)..(209): Homolog of NCBI NO: 15219406 NR Description: glyceraldehyde-3-phosphate dehydrogenase, putative
MAFSSLLRSAASYTVAAPRPDFFSSPASDHSKVLSSLGFSRNLKPSRFSSGISSSLQNGNARSVQPIKATATEVPSAVRRSSSSGKTKVGINGFGRIGRLVLRIATSRDDIEVVAVNDPFIDAKYMAYMLKYDSTHGNFKGSINVIDDSTLEINGKKVNVVSKRDPSEIPWADLGADYVVESSGVFTTLSKAASHLKGGAKKVIISAPSG

SEQ ID NO: 30767 - protein, 209 aa, Arabidopsis thaliana
  peptide (1)..(209): Ceres Seq. ID no. 12340061
  misc_feature (24)..(185): Pfam Name: Glyceraldehyde 3-phosphate dehydrogenase, Pfam Description: Glyceraldehyde 3-phosphate dehydrogenase,
  misc_feature (1)..(209): Homolog of NCBI NO: 3059122 NR Description: glyeraldehyde-3-phosphate dehydrogenase [Marsilea
  misc_feature (1)..(207): Homolog of NCBI NO: 3059140 NR Description: NAD-dependent glyceraldehyde-3-phosphate
  misc_feature (1)..(207): Homolog of NCBI NO: 2129472 NR Description: glyceraldehyde-3-phosphate dehydrogenase
  misc_feature (1)..(207): Homolog of NCBI NO: 2129471 NR Description: glyceraldehyde-3-phosphate dehydrogenase
  misc_feature (1)..(208): Homolog of NCBI NO: 18072805 NR Description: glyceraldehyde-3-phosphate dehydrogenase
  misc_feature (1)..(208): Homolog of NCBI NO: 25284351 NR Description: hypothetical protein F3O9.10 - Arabidopsis
  misc_feature (1)..(208): Homolog of NCBI NO: 27754473 NR Description: putative glyceraldehyde-3-phosphate dehydrogenase
  misc_feature (1)..(208): Homolog of NCBI NO: 21618027 NR Description: putative glyceraldehyde-3-phosphate dehydrogenase
  misc_feature (1)..(208): Homolog of NCBI NO: 15219206 NR Description: putative glyceraldehyde-3-phosphate dehydrogenase
  misc_feature (1)..(209): Homolog of NCBI NO: 15219406 NR Description: glyceraldehyde-3-phosphate dehydrogenase, putative
MFVVGVNEHTYQPNMDIVSNASCTTNCLAPLAKVVHEEFGILEGLMTTVHATTATQKTVDGPSMKDWRGGRGASQNIIPSSTGAAKAVGKVLPELNGKLTGMAFRVPTSNVSVVDLTCRLEKGASYEDVKAAIKHASEGPLKGILGYTDEDVVSNDFVGDSRSSIFDANAGIGLSKSFVKLVSWYDNEWGYSNRVLDLIEHMALVAASH

SEQ ID NO: 30768 - protein, 195 aa, Arabidopsis thaliana
  peptide (1)..(195): Ceres Seq. ID no. 12340062
  misc_feature (10)..(171): Pfam Name: Glyceraldehyde 3-phosphate dehydrogenase, Pfam Description: Glyceraldehyde 3-phosphate dehydrogenase,
  misc_feature (1)..(195): Homolog of NCBI NO: 3059122 NR Description: glyeraldehyde-3-phosphate dehydrogenase [Marsilea
  misc_feature (1)..(193): Homolog of NCBI NO: 3059140 NR Description: NAD-dependent glyceraldehyde-3-phosphate
  misc_feature (1)..(193): Homolog of NCBI NO: 2129472 NR Description: glyceraldehyde-3-phosphate dehydrogenase
  misc_feature (1)..(193): Homolog of NCBI NO: 2129471 NR Description: glyceraldehyde-3-phosphate dehydrogenase
  misc_feature (1)..(194): Homolog of NCBI NO: 18072805 NR Description: glyceraldehyde-3-phosphate dehydrogenase
  misc_feature (1)..(194): Homolog of NCBI NO: 25284351 NR Description: hypothetical protein F3O9.10 - Arabidopsis
  misc_feature (1)..(194): Homolog of NCBI NO: 27754473 NR Description: putative glyceraldehyde-3-phosphate dehydrogenase
  misc_feature (1)..(194): Homolog of NCBI NO: 21618027 NR Description: putative glyceraldehyde-3-phosphate dehydrogenase
  misc_feature (1)..(194): Homolog of NCBI NO: 15219206 NR Description: putative glyceraldehyde-3-phosphate dehydrogenase
  misc_feature (1)..(195): Homolog of NCBI NO: 15219406 NR Description: glyceraldehyde-3-phosphate dehydrogenase, putative
MDIVSNASCTTNCLAPLAKVVHEEFGILEGLMTTVHATTATQKTVDGPSMKDWRGGRGASQNIIPSSTGAAKAVGKVLPELNGKLTGMAFRVPTSNVSVVDLTCRLEKGASYEDVKAAIKHASEGPLKGILGYTDEDVVSNDFVGDSRSSIFDANAGIGLSKSFVKLVSWYDNEWGYSNRVLDLIEHMALVAASH

SEQ ID NO: 30769 - DNA, 1437 bp, Arabidopsis thaliana
  misc_feature (1)..(1437): Ceres Seq. ID no. 12338079
  misc_feature: MA Experiment ID: 20000437 Result: Down-regulated in Transcription
  misc_feature: MA Experiment 20000437 PARAMETER Experiment Name: At_Drought_P Parameter: Age (day) Value: 8
  misc_feature: MA Experiment 20000437 PARAMETER Experiment Name: At_Drought_P Parameter: Organism Value: A. thaliana
  misc_feature: MA Experiment 20000437 PARAMETER Experiment Name: At_Drought_P Parameter: Plant Line Value: WS
  misc_feature: MA Experiment 20000437 PARAMETER Experiment Name: At_Drought_P Parameter: Timepoint (hr) Value: 24
  misc_feature: MA Experiment 20000437 PARAMETER Experiment Name: At_Drought_P Parameter: Tissue Value: Whole Plant
  misc_feature: MA Experiment 20000437 PARAMETER Experiment Name: At_Drought_P Parameter: Treatment Value: Drought vs. No Drought
  misc_feature: MA Experiment ID: 20001557 Result: Up-regulated in Transcription
  misc_feature: MA Experiment 20001557 PARAMETER Experiment Name: At_Drought_Soil_Dry_P Parameter: Age (day) Value: 27
  misc_feature: MA Experiment 20001557 PARAMETER Experiment Name: At_Drought_Soil_Dry_P Parameter: Organism Value: A. thaliana
  misc_feature: MA Experiment 20001557 PARAMETER Experiment Name: At_Drought_Soil_Dry_P Parameter: Plant Line Value: WS
  misc_feature: MA Experiment 20001557 PARAMETER Experiment Name: At_Drought_Soil_Dry_P Parameter: Post Timepoint (hr) Value: 3
  misc_feature: MA Experiment 20001557 PARAMETER Experiment Name: At_Drought_Soil_Dry_P Parameter: Post-Treatment Value: Re-Water vs. No Drought
  misc_feature: MA Experiment 20001557 PARAMETER Experiment Name: At_Drought_Soil_Dry_P Parameter: Timepoint (day) Value: 13
  misc_feature: MA Experiment 20001557 PARAMETER Experiment Name: At_Drought_Soil_Dry_P Parameter: Treatment Value: Drought vs. No Drought
  misc_feature: MA Experiment ID: 20001558 Result: Up-regulated in Transcription
  misc_feature: MA Experiment 20001558 PARAMETER Experiment Name: At_Drought_Soil_Dry_P Parameter: Age (day) Value: 27
  misc_feature: MA Experiment 20001558 PARAMETER Experiment Name: At_Drought_Soil_Dry_P Parameter: Organism Value: A. thaliana
  misc_feature: MA Experiment 20001558 PARAMETER Experiment Name: At_Drought_Soil_Dry_P Parameter: Plant Line Value: WS
  misc_feature: MA Experiment 20001558 PARAMETER Experiment Name: At_Drought_Soil_Dry_P Parameter: Post Timepoint (hr) Value: 6
  misc_feature: MA Experiment 20001558 PARAMETER Experiment Name: At_Drought_Soil_Dry_P Parameter: Post-Treatment Value: Re-Water vs. No Drought
  misc_feature: MA Experiment 20001558 PARAMETER Experiment Name: At_Drought_Soil_Dry_P Parameter: Timepoint (day) Value: 13
  misc_feature: MA Experiment 20001558 PARAMETER Experiment Name: At_Drought_Soil_Dry_P Parameter: Treatment Value: Drought vs. No Drought
actgccgcatcttttcttagggttcttgtttcgctatctcttaaacacaaacagctctgtccgaataatctctcttcaagtacctctttttcctgattctgtatatcgccatgaattactgatttccctctctataaacccatcaaagtaaaccaatttctcctgtcacttgtacctaactcgatcttaccagactggtgatggcgtctttgaaccctttcgatcttctaggagatgatgctgaggatccaagccagctcgctgtggctttgtctcagaaagtcgagaaagctgctgctgctgttcagcctcctaaggccgctaagttcccaaccaagccggctcctccttctcaagcagtgagggagtcgaggaatgctcctcaaggaggtcgtggtgggactggtggacgtggtggattttcccgtggcaggggtaatggtggatacaaccgggacaacaggaacaatgatgctcctggaaatgagaatggattttctggaggatacaggagaccttctgaagatgctgatggagcaagccgtggtgggtctgttggtggataccgtgttggcggtggtcttgaaggacctcgccgtggtggagttgccaacggggaatctggtgatgttgaacgcccaccgaggaattatgaccgccatagcaggacaggtcatggtactggcatgaaacgtaatggtggaggtcgtggaaactggggcactactgaagatgatatccctccaacgtctgaggaacctaccacagaggttgagaagagccctgttgctgagaagcaaggaggtgaggatgaaacccctgaagcaaagaaagaactcactgcggaagagaaagcacagaaagaagctgaagaagctgaagccagggagatgactctagaagagtatgagaaaattctggaggagaagaagaaggctctgcaagccacaaaggttgaggaaaggaaagttgacaccaaagtgtttgagtccatgcaacagctctctaacaagaagaacaccgatgaagaaatcttcatcaagctgggatctgacaaggaaaaacgcaaagatgctactgagaaggccaaaaagtcgttgagcattaatgagttcttgaagccggctgatggaaagaggtacaacgggagaggtggaggctcccgcggaagaggaggtcgcggtggtcgtggtgaaggaggaaaccaaaggtatgcaaaagaagctgcagctccggcgattggagacacagctcagttcccttcgttgggctagtaaagacccctggtccttcagcctcgctatctctgtctttcgtttctctttggttgaattttgttagttttataattttttgttacactttctgaaggtcttttctgcgaaactattacgttttttaagttatgaaaaaaattattaagatatttttctctcc

SEQ ID NO: 30770 - protein, 357 aa, Arabidopsis thaliana
  peptide (1)..(357): Ceres Seq. ID no. 12338080
  misc_feature (131)..(303): Pfam Name: Hyaluronan / mRNA binding family Pfam Description: Hyaluronan / mRNA binding family
  misc_feature (1)..(357): Homolog of NCBI NO: 39725276 NR Description: salt tolerance protein 1 [Beta vulgaris]
  misc_feature (1)..(357): Homolog of NCBI NO: 6492266 NR Description: nuclear RNA binding protein A [Spinacia oleracea]
  misc_feature (1)..(357): Homolog of NCBI NO: 34910712 NR Description: putative nuclear RNA binding protein A
  misc_feature (1)..(357): Homolog of NCBI NO: 21537052 NR Description: nuclear antigen homolog [Arabidopsis thaliana]
  misc_feature (1)..(357): Homolog of NCBI NO: 15235894 NR Description: nuclear antigen homolog
  misc_feature (1)..(357): Homolog of NCBI NO: 39725278 NR Description: salt tolerance protein 2 [Beta vulgaris]
  misc_feature (1)..(337): Homolog of NCBI NO: 21593013 NR Description: nuclear RNA binding protein A-like protein
  misc_feature (1)..(337): Homolog of NCBI NO: 15236552 NR Description: nuclear RNA binding protein A-like protein
  misc_feature (1)..(357): Homolog of NCBI NO: 15238039 NR Description: putative protein
  misc_feature (1)..(357): Homolog of NCBI NO: 21553991 NR Description: nuclear RNA binding protein A-like protein
MASLNPFDLLGDDAEDPSQLAVALSQKVEKAAAAVQPPKAAKFPTKPAPPSQAVRESRNAPQGGRGGTGGRGGFSRGRGNGGYNRDNRNNDAPGNENGFSGGYRRPSEDADGASRGGSVGGYRVGGGLEGPRRGGVANGESGDVERPPRNYDRHSRTGHGTGMKRNGGGRGNWGTTEDDIPPTSEEPTTEVEKSPVAEKQGGEDETPEAKKELTAEEKAQKEAEEAEAREMTLEEYEKILEEKKKALQATKVEERKVDTKVFESMQQLSNKKNTDEEIFIKLGSDKEKRKDATEKAKKSLSINEFLKPADGKRYNGRGGGSRGRGGRGGRGEGGNQRYAKEAAAPAIGDTAQFPSLG

SEQ ID NO: 30771 - protein, 195 aa, Arabidopsis thaliana; identical to SEQ ID NO: 24160
  peptide (1)..(195): Ceres Seq. ID no. 12338081
  misc_feature (1)..(141): Pfam Name: Hyaluronan / mRNA binding family Pfam Description: Hyaluronan / mRNA binding family
  misc_feature (1)..(195): Homolog of NCBI NO: 39725276 NR Description: salt tolerance protein 1 [Beta vulgaris]
  misc_feature (1)..(195): Homolog of NCBI NO: 6492266 NR Description: nuclear RNA binding protein A [Spinacia oleracea]
  misc_feature (1)..(195): Homolog of NCBI NO: 34910712 NR Description: putative nuclear RNA binding protein A
  misc_feature (1)..(195): Homolog of NCBI NO: 21537052 NR Description: nuclear antigen homolog [Arabidopsis thaliana]
  misc_feature (1)..(195): Homolog of NCBI NO: 15235894 NR Description: nuclear antigen homolog
  misc_feature (1)..(195): Homolog of NCBI NO: 39725278 NR Description: salt tolerance protein 2 [Beta vulgaris]
  misc_feature (1)..(175): Homolog of NCBI NO: 21593013 NR Description: nuclear RNA binding protein A-like protein
  misc_feature (1)..(175): Homolog of NCBI NO: 15236552 NR Description: nuclear RNA binding protein A-like protein
  misc_feature (1)..(195): Homolog of NCBI NO: 15238039 NR Description: putative protein
  misc_feature (1)..(195): Homolog of NCBI NO: 21553991 NR Description: nuclear RNA binding protein A-like protein

SEQ ID NO: 30772 - DNA, 1191 bp, Arabidopsis thaliana
  misc_feature (1)..(1191): Ceres Seq. ID no. 13497360
  misc_feature: MA Experiment ID: 108464 Result: Down-regulated in Transcription
  misc_feature: MA Experiment 108464 PARAMETER Experiment Name: At_Germinating_Seeds_cDNA_P Parameter: Age (day) Value: 4 vs. 0
  misc_feature: MA Experiment 108464 PARAMETER Experiment Name: At_Germinating_Seeds_cDNA_P Parameter: Tissue Value: Germinating Seeds
  misc_feature: MA Experiment ID: 20000113 Result: Down-regulated in Transcription
  misc_feature: MA Experiment 20000113 PARAMETER Experiment Name: At_42deg_Heat_cDNA_P Parameter: Temperature (deg C) Value: 42 vs. 22
  misc_feature: MA Experiment 20000113 PARAMETER Experiment Name: At_42deg_Heat_cDNA_P Parameter: Timepoint (hr) Value: 8
  misc_feature: MA Experiment 20000113 PARAMETER Experiment Name: At_42deg_Heat_cDNA_P Parameter: Tissue Value: Aerial
tgatagaacaatcaacaattacacttattttgctatcgtttgagcatctcaaaaatttctccggggagatttgtttgtatatatactcttccacaaagaagatgctcaaggtccctgaacaccaagttgctggtcacattgctagtgatgggaagctcggtccactcgtagatgaccaaggccggttcttcaagccacttcagggagattctcgtggcgaacacgaggctaagttctatgagtctttcacatcgaacatgaaggttccagatcacatccatagatacttcccggtgtatcacggcactcagctagttgaagcatctgatggatctggcaagcttcctcatcttgttcttgatgatgttgtttcagggtacgcaaacccgtcggtaatggatgttaagattggatctaggacatggtacccggatgtatcagaagaatacttcaagaaatgtattaagaaagatagacagaccaccacggtttcgttggggttcagggtttcaggttttaagatttttgatcaccaagaatcaagtttttggagagctgagaagaagcttgttcttgggtataatgcagatggtgctagattggctctgaggaagtttgtgtcatcgaactctcccgctgactctaacttgacaccaaactgtgcttttgcatcagaggtttatggcggttgtaacgggatcttagcgcagttgttggagcttaaagattggttcgaaacccaaacgctttaccatttcaattcctgctcgattctgatgatttacgagaatgaatcaatcttgatgcaaggaggagatgatgcaccggcaccacgggcacaagtgaagctggtggatttcgcgcatgttcttgatggaaacggtgtcatcgaccataatttcttgggtggactctgctctttcataaagttcatcaaagatattcttcagagcgttgaaaagcacgatgaaaccgatacttccctacttgagaacgggcgctagagaaacgtcgttcttcccggctccatttcaaataatctccaagtttttcctttcttggactagttgggttttggacatgaacgtttgtccctttcaattgtataatttcgttaactaaaccattgtactttctcattagagaaatatatcgagagtttcatgaaagtaagctaaggcagttaagctt

SEQ ID NO: 30773 - protein, 333 aa, Arabidopsis thaliana
  peptide (1)..(333): Ceres Seq. ID no. 13497361
  misc_feature (49)..(312): Pfam Name: Inositol polyphosphate kinase Pfam Description: Inositol polyphosphate kinase
  misc_feature (37)..(265): Homolog of NCBI NO: 19705555 NR Description: inositol polyphosphate multikinase [Rattus
  misc_feature (41)..(315): Homolog of NCBI NO: 24580674 NR Description: CG13688-PA [Drosophila melanogaster]
  misc_feature (41)..(315): Homolog of NCBI NO: 21430778 NR Description: SD14726p [Drosophila melanogaster]
  misc_feature (34)..(313): Homolog of NCBI NO: 13509210 NR Description: hypothetical protein [Linum usitatissimum]
  misc_feature (34)..(332): Homolog of NCBI NO: 13509208 NR Description: hypothetical protein [Linum usitatissimum]
  misc_feature (35)..(320): Homolog of NCBI NO: 8919088 NR Description: putative inositol hexaphosphate kinase
  misc_feature (35)..(320): Homolog of NCBI NO: 15240776 NR Description: inositol polyphosphate 6-/3-/5-kinase 2a (IPK2a)
  misc_feature (35)..(320): Homolog of NCBI NO: 21592823 NR Description: putative inositol hexaphosphate kinase
  misc_feature (34)..(333): Homolog of NCBI NO: 21553994 NR Description: putative inositol hexaphosphate kinase
  misc_feature (34)..(333): Homolog of NCBI NO: 15240350 NR Description: inositol polyphosphate 6-/3-/5-kinase 2b (IPK2b)
IEQSTITLILLSFEHLKNFSGEICLYIYSSTKKMLKVPEHQVAGHIASDGKLGPLVDDQGRFFKPLQGDSRGEHEAKFYESFTSNMKVPDHIHRYFPVYHGTQLVEASDGSGKLPHLVLDDVVSGYANPSVMDVKIGSRTWYPDVSEEYFKKCIKKDRQTTTVSLGFRVSGFKIFDHQESSFWRAEKKLVLGYNADGARLALRKFVSSNSPADSNLTPNCAFASEVYGGCNGILAQLLELKDWFETQTLYHFNSCSILMIYENESILMQGGDDAPAPRAQVKLVDFAHVLDGNGVIDHNFLGGLCSFIKFIKDILQSVEKHDETDTSLLENGR

SEQ ID NO: 30774 - protein, 300 aa, Arabidopsis thaliana
  peptide (1)..(300): Ceres Seq. ID no. 13497362
  misc_feature (16)..(279): Pfam Name: Inositol polyphosphate kinase Pfam Description: Inositol polyphosphate kinase
  misc_feature (4)..(232): Homolog of NCBI NO: 19705555 NR Description: inositol polyphosphate multikinase [Rattus
  misc_feature (8)..(282): Homolog of NCBI NO: 24580674 NR Description: CG13688-PA [Drosophila melanogaster]
  misc_feature (8)..(282): Homolog of NCBI NO: 21430778 NR Description: SD14726p [Drosophila melanogaster]
  misc_feature (1)..(280): Homolog of NCBI NO: 13509210 NR Description: hypothetical protein [Linum usitatissimum]
  misc_feature (1)..(299): Homolog of NCBI NO: 13509208 NR Description: hypothetical protein [Linum usitatissimum]
  misc_feature (2)..(287): Homolog of NCBI NO: 8919088 NR Description: putative inositol hexaphosphate kinase
  misc_feature (2)..(287): Homolog of NCBI NO: 15240776 NR Description: inositol polyphosphate 6-/3-/5-kinase 2a (IPK2a)
  misc_feature (2)..(287): Homolog of NCBI NO: 21592823 NR Description: putative inositol hexaphosphate kinase
  misc_feature (1)..(300): Homolog of NCBI NO: 21553994 NR Description: putative inositol hexaphosphate kinase
  misc_feature (1)..(300): Homolog of NCBI NO: 15240350 NR Description: inositol polyphosphate 6-/3-/5-kinase 2b (IPK2b)
MLKVPEHQVAGHIASDGKLGPLVDDQGRFFKPLQGDSRGEHEAKFYESFTSNMKVPDHIHRYFPVYHGTQLVEASDGSGKLPHLVLDDVVSGYANPSVMDVKIGSRTWYPDVSEEYFKKCIKKDRQTTTVSLGFRVSGFKIFDHQESSFWRAEKKLVLGYNADGARLALRKFVSSNSPADSNLTPNCAFASEVYGGCNGILAQLLELKDWFETQTLYHFNSCSILMIYENESILMQGGDDAPAPRAQVKLVDFAHVLDGNGVIDHNFLGGLCSFIKFIKDILQSVEKHDETDTSLLENGR

SEQ ID NO: 30775 - protein, 248 aa, Arabidopsis thaliana
  peptide (1)..(248): Ceres Seq. ID no. 13497363
  misc_feature (1)..(227): Pfam Name: Inositol polyphosphate kinase Pfam Description: Inositol polyphosphate kinase
  misc_feature (1)..(180): Homolog of NCBI NO: 19705555 NR Description: inositol polyphosphate multikinase [Rattus
  misc_feature (1)..(230): Homolog of NCBI NO: 24580674 NR Description: CG13688-PA [Drosophila melanogaster]
  misc_feature (1)..(230): Homolog of NCBI NO: 21430778 NR Description: SD14726p [Drosophila melanogaster]
  misc_feature (1)..(228): Homolog of NCBI NO: 13509210 NR Description: hypothetical protein [Linum usitatissimum]
  misc_feature (1)..(247): Homolog of NCBI NO: 13509208 NR Description: hypothetical protein [Linum usitatissimum]
  misc_feature (1)..(235): Homolog of NCBI NO: 8919088 NR Description: putative inositol hexaphosphate kinase
  misc_feature (1)..(235): Homolog of NCBI NO: 15240776 NR Description: inositol polyphosphate 6-/3-/5-kinase 2a (IPK2a)
  misc_feature (1)..(235): Homolog of NCBI NO: 21592823 NR Description: putative inositol hexaphosphate kinase
  misc_feature (1)..(248): Homolog of NCBI NO: 21553994 NR Description: putative inositol hexaphosphate kinase
  misc_feature (1)..(248): Homolog of NCBI NO: 15240350 NR Description: inositol polyphosphate 6-/3-/5-kinase 2b (IPK2b)
MKVPDHIHRYFPVYHGTQLVEASDGSGKLPHLVLDDVVSGYANPSVMDVKIGSRTWYPDVSEEYFKKCIKKDRQTTTVSLGFRVSGFKIFDHQESSFWRAEKKLVLGYNADGARLALRKFVSSNSPADSNLTPNCAFASEVYGGCNGILAQLLELKDWFETQTLYHFNSCSILMIYENESILMQGGDDAPAPRAQVKLVDFAHVLDGNGVIDHNFLGGLCSFIKFIKDILQSVEKHDETDTSLLENGR

SEQ ID NO: 30776 - DNA, 1536 bp, Arabidopsis thaliana
  misc_feature (1)..(1536): Ceres Seq. ID no. 12335031
  misc_feature: MA Experiment ID: 20000112 Result: Up-regulated in Transcription
  misc_feature: MA Experiment 20000112 PARAMETER Experiment Name: At_42deg_Heat_cDNA_P Parameter: Temperature (deg C) Value: 42 vs. 22
  misc_feature: MA Experiment 20000112 PARAMETER Experiment Name: At_42deg_Heat_cDNA_P Parameter: Timepoint (hr) Value: 2
  misc_feature: MA Experiment 20000112 PARAMETER Experiment Name: At_42deg_Heat_cDNA_P Parameter: Tissue Value: Aerial
  misc_feature: MA Experiment ID: 20000144 Result: Up-regulated in Transcription
  misc_feature: MA Experiment 20000144 PARAMETER Experiment Name: At_42deg_Heat_cDNA_P Parameter: Temperature (deg C) Value: 42 vs. 22
  misc_feature: MA Experiment 20000144 PARAMETER Experiment Name: At_42deg_Heat_cDNA_P Parameter: Timepoint (hr) Value: 1
  misc_feature: MA Experiment 20000144 PARAMETER Experiment Name: At_42deg_Heat_cDNA_P Parameter: Tissue Value: Aerial
  misc_feature: MA Experiment ID: 20000171 Result: Up-regulated in Transcription
  misc_feature: MA Experiment 20000171 PARAMETER Experiment Name: At_42deg_Heat_P Parameter: Age (day) Value: 14
  misc_feature: MA Experiment 20000171 PARAMETER Experiment Name: At_42deg_Heat_P Parameter: Organism Value: A. thaliana
  misc_feature: MA Experiment 20000171 PARAMETER Experiment Name: At_42deg_Heat_P Parameter: Plant Line Value: WS
  misc_feature: MA Experiment 20000171 PARAMETER Experiment Name: At_42deg_Heat_P Parameter: Temperature (deg C) Value: 42 vs. 22
  misc_feature: MA Experiment 20000171 PARAMETER Experiment Name: At_42deg_Heat_P Parameter: Timepoint (hr) Value: 1
  misc_feature: MA Experiment 20000171 PARAMETER Experiment Name: At_42deg_Heat_P Parameter: Tissue Value: Aerial
  misc_feature: Phenotype: WHOLE PLANT Color-Dark Green
  misc_feature: Phenotype: WHOLE PLANT Size-Small
  misc_feature: Phenotype: INFLORESCENCE Height-Short
  misc_feature: Phenotype: INFLORESCENCE Internode Length-Short Internode
  misc_feature: Phenotype: INFLORESCENCE Strength-Strong
  misc_feature: Phenotype: WHOLE PLANT Color-Dark Green
  misc_feature: Phenotype: WHOLE PLANT Size-Small
  misc_feature: Phenotype: WHOLE PLANT Color-Dark Green
  misc_feature: Phenotype: WHOLE PLANT Size-Small
  misc_feature: Phenotype: WHOLE PLANT Color-Dark Green
  misc_feature: Phenotype: WHOLE PLANT Size-Small
  misc_feature: Phenotype: INFLORESCENCE Height-Short
  misc_feature: Phenotype: INFLORESCENCE Internode Length-Short Internode
  misc_feature: Phenotype: WHOLE PLANT Color-Dark Green
  misc_feature: Phenotype: WHOLE PLANT Size-Small
  misc_feature: Phenotype: INFLORESCENCE Height-Short
  misc_feature: Phenotype: INFLORESCENCE Internode Length-Short Internode
  misc_feature: Phenotype: ROSETTE LEAVES Shape-Oval
  misc_feature: Phenotype: WHOLE PLANT Color-Dark Green
  misc_feature: Phenotype: WHOLE PLANT Size-Small
  misc_feature: Phenotype: INFLORESCENCE Internode Length-Short Internode
  misc_feature: Phenotype: WHOLE PLANT Color-Dark Green
  misc_feature: Phenotype: WHOLE PLANT Size-Small
  misc_feature: Phenotype: INFLORESCENCE Height-Short
  misc_feature: Phenotype: INFLORESCENCE Internode Length-Short Internode
  misc_feature: Phenotype: WHOLE PLANT Color-Dark Green
  misc_feature: Phenotype: INFLORESCENCE Height-Short
  misc_feature: Phenotype: INFLORESCENCE Internode Length-Short Internode
gtggtaaattagtcagatttcgatttggaaccctaaaaaaattcaaaagacgatcctcttctcgaagaaactcgattcttgtggattcgatttcattaaggaattttgaattgttgcctgtgatgggtggtttggctatggaggaaatgcctttatcggtgctattcgagcaagctaggaaaattcatcttgctgcttcagagtctggtgttgatcaggatgttgtgaagaaaggatgtgagatgtttcagaagtgcgaagatatgatcgggaagctggcgctgttttcgtctaacgagactaaagaagatattagcaccaacaatctcaaatatcttttggtgccttattatcttgcggagttgacagagaaaatcatacaggaggaccggattcagattgtcaaagcctcgtatgctaagttgaaggagttcttttcgttctgtgaggcaatggagcttgttccggatgaggagttggaggcttcttcacgaggaggttctggtgcacctgctgatcgaagggctctcaagatagctcggttcaaacgtcaaaaggctgcagaggcaaagcttcttgaaattaaagagaggaaggagcgacgtggacgttccactaaagcatcagctttgtcgactccggttgaatctggagaagatgatattccagatgatgacagcgaagaagagagagaggcctggctctcctcaattaacttggctatttgtaaggctattgatctgttggaaatgctaaagagagaagaggaaatgctctctgcaataaaggaaagacagttgaaggatggagagggtggattttctcgggatgctcttgatgatcgtacaaagaaagctgaaacctggcacagagacgctgctgcaaggatacagtactctaaaccggcacaaccaatcacttgtgccacatttgcacaagatgtgttagaaggaagagcttcggtatcacaaggtcacgaacacaagaaccaacctcttatattcggtccagcaagcatcgtgggtggaccgctctctaccgagagagaaagaatgatagctcaggtcttccaaccaagtcacaggatgccaacaatgtgcatagaggatgctgggttaacagagatgaacataatgaatgattggcaagagcagacgaaaaaagccattgaagaagcaaccacctcatggtacaatgataaacctctaagaagaaaagaagaagacgaggaagatgatgatgaagacgaagaagctgtgatgaaagctagagctttcgatgattggaaggatgataatcctcgcggtgcaggtaacaagaaactcacaccttgtggctgagactagagaccgagacacacattatttaacactttctccctctcttttgtttcttatttccaaaacctcttcgttcacttattataatgtctgtaatgtaatcatctttctactcttaagccttagacttacagattttggattcacggattcactttcattttcgttgggaatattatttttaaatacgccgact

SEQ ID NO: 30777 - protein, 445 aa, Arabidopsis thaliana
  peptide (1)..(445): Ceres Seq. ID no. 12335032
  misc_feature (49)..(433): Pfam Name: TAP42-like family Pfam Description: TAP42-like family
  misc_feature (345)..(440): Homolog of NCBI NO: 30584781 NR Description: Homo sapiens immunoglobulin (CD79A) binding
  misc_feature (48)..(281): Homolog of NCBI NO: 30584781 NR Description: Homo sapiens immunoglobulin (CD79A) binding
  misc_feature (345)..(440): Homolog of NCBI NO: 4557663 NR Description: immunoglobulin (CD79A) binding protein 1
  misc_feature (48)..(281): Homolog of NCBI NO: 4557663 NR Description: immunoglobulin (CD79A) binding protein 1
  misc_feature (227)..(445): Homolog of NCBI NO: 7489459 NR Description: chilling-induced protein - rice
  misc_feature (48)..(263): Homolog of NCBI NO: 7489459 NR Description: chilling-induced protein - rice
  misc_feature (48)..(445): Homolog of NCBI NO: 29367365 NR Description: PP2A regulatory subunit-like protein
  misc_feature (41)..(445): Homolog of NCBI NO: 8809589 NR Description: PP2A regulatory subunit [Arabidopsis thaliana]
  misc_feature (41)..(445): Homolog of NCBI NO: 21553995 NR Description: PP2A regulatory subunit [Arabidopsis thaliana]
  misc_feature (41)..(445): Homolog of NCBI NO: 18423459 NR Description: PP2A regulatory subunit
GKLVRFRFGTLKKFKRRSSSRRNSILVDSISLRNFELLPVMGGLAMEEMPLSVLFEQARKIHLAASESGVDQDVVKKGCEMFQKCEDMIGKLALFSSNETKEDISTNNLKYLLVPYYLAELTEKIIQEDRIQIVKASYAKLKEFFSFCEAMELVPDEELEASSRGGSGAPADRRALKIARFKRQKAAEAKLLEIKERKERRGRSTKASALSTPVESGEDDIPDDDSEEEREAWLSSINLAICKAIDLLEMLKREEEMLSAIKERQLKDGEGGFSRDALDDRTKKAETWHRDAAARIQYSKPAQPITCATFAQDVLEGRASVSQGHEHKNQPLIFGPASIVGGPLSTERERMIAQVFQPSHRMPTMCIEDAGLTEMNIMNDWQEQTKKAIEEATTSWYNDKPLRRKEEDEEDDDEDEEAVMKARAFDDWKDDNPRGAGNKKLTPCG

SEQ ID NO: 30778 - protein, 405 aa, Arabidopsis thaliana
  peptide (1)..(405): Ceres Seq. ID no. 12335033
  misc_feature (9)..(393): Pfam Name: TAP42-like family Pfam Description: TAP42-like family
  misc_feature (305)..(400): Homolog of NCBI NO: 30584781 NR Description: Homo sapiens immunoglobulin (CD79A) binding
  misc_feature (8)..(241): Homolog of NCBI NO: 30584781 NR Description: Homo sapiens immunoglobulin (CD79A) binding
  misc_feature (305)..(400): Homolog of NCBI NO: 4557663 NR Description: immunoglobulin (CD79A) binding protein 1
  misc_feature (8)..(241): Homolog of NCBI NO: 4557663 NR Description: immunoglobulin (CD79A) binding protein 1
  misc_feature (187)..(405): Homolog of NCBI NO: 7489459 NR Description: chilling-induced protein - rice
  misc_feature (8)..(223): Homolog of NCBI NO: 7489459 NR Description: chilling-induced protein - rice
  misc_feature (8)..(405): Homolog of NCBI NO: 29367365 NR Description: PP2A regulatory subunit-like protein
  misc_feature (1)..(405): Homolog of NCBI NO: 8809589 NR Description: PP2A regulatory subunit [Arabidopsis thaliana]
  misc_feature (1)..(405): Homolog of NCBI NO: 21553995 NR Description: PP2A regulatory subunit [Arabidopsis thaliana]
  misc_feature (1)..(405): Homolog of NCBI NO: 18423459 NR Description: PP2A regulatory subunit
MGGLAMEEMPLSVLFEQARKIHLAASESGVDQDVVKKGCEMFQKCEDMIGKLALFSSNETKEDISTNNLKYLLVPYYLAELTEKIIQEDRIQIVKASYAKLKEFFSFCEAMELVPDEELEASSRGGSGAPADRRALKIARFKRQKAAEAKLLEIKERKERRGRSTKASALSTPVESGEDDIPDDDSEEEREAWLSSINLAICKAIDLLEMLKREEEMLSAIKERQLKDGEGGFSRDALDDRTKKAETWHRDAAARIQYSKPAQPITCATFAQDVLEGRASVSQGHEHKNQPLIFGPASIVGGPLSTERERMIAQVFQPSHRMPTMCIEDAGLTEMNIMNDWQEQTKKAIEEATTSWYNDKPLRRKEEDEEDDDEDEEAVMKARAFDDWKDDNPRGAGNKKLTPCG

SEQ ID NO: 30779 - protein, 400 aa, Arabidopsis thaliana
  peptide (1)..(400): Ceres Seq. ID no. 12335034
  misc_feature (4)..(388): Pfam Name: TAP42-like family Pfam Description: TAP42-like family
  misc_feature (300)..(395): Homolog of NCBI NO: 30584781 NR Description: Homo sapiens immunoglobulin (CD79A) binding
  misc_feature (3)..(236): Homolog of NCBI NO: 30584781 NR Description: Homo sapiens immunoglobulin (CD79A) binding
  misc_feature (300)..(395): Homolog of NCBI NO: 4557663 NR Description: immunoglobulin (CD79A) binding protein 1
  misc_feature (3)..(236): Homolog of NCBI NO: 4557663 NR Description: immunoglobulin (CD79A) binding protein 1
  misc_feature (182)..(400): Homolog of NCBI NO: 7489459 NR Description: chilling-induced protein - rice
  misc_feature (3)..(218): Homolog of NCBI NO: 7489459 NR Description: chilling-induced protein - rice
  misc_feature (3)..(400): Homolog of NCBI NO: 29367365 NR Description: PP2A regulatory subunit-like protein
  misc_feature (1)..(400): Homolog of NCBI NO: 8809589 NR Description: PP2A regulatory subunit [Arabidopsis thaliana]
  misc_feature (1)..(400): Homolog of NCBI NO: 21553995 NR Description: PP2A regulatory subunit [Arabidopsis thaliana]
  misc_feature (1)..(400): Homolog of NCBI NO: 18423459 NR Description: PP2A regulatory subunit
MEEMPLSVLFEQARKIHLAASESGVDQDVVKKGCEMFQKCEDMIGKLALFSSNETKEDISTNNLKYLLVPYYLAELTEKIIQEDRIQIVKASYAKLKEFFSFCEAMELVPDEELEASSRGGSGAPADRRALKIARFKRQKAAEAKLLEIKERKERRGRSTKASALSTPVESGEDDIPDDDSEEEREAWLSSINLAICKAIDLLEMLKREEEMLSAIKERQLKDGEGGFSRDALDDRTKKAETWHRDAAARIQYSKPAQPITCATFAQDVLEGRASVSQGHEHKNQPLIFGPASIVGGPLSTERERMIAQVFQPSHRMPTMCIEDAGLTEMNIMNDWQEQTKKAIEEATTSWYNDKPLRRKEEDEEDDDEDEEAVMKARAFDDWKDDNPRGAGNKKLTPCG

SEQ ID NO: 30780 - DNA, 1169 bp, Arabidopsis thaliana
  misc_feature (1)..(1169): Ceres Seq. ID no. 13486807
  misc_feature: MA Experiment ID: 108434 Result: Up-regulated in Transcription
  misc_feature: MA Experiment 108434 PARAMETER Experiment Name: At_Root_Tips_cDNA_P Parameter: Tissue Value: Root Tips
  misc_feature: MA Experiment ID: 108488 Result: Up-regulated in Transcription
  misc_feature: MA Experiment ID: 108573 Result: Up-regulated in Transcription
  misc_feature: MA Experiment 108573 PARAMETER Experiment Name: At_Drought_cDNA_P Parameter: Timepoint (hr) Value: 6
  misc_feature: MA Experiment 108573 PARAMETER Experiment Name: At_Drought_cDNA_P Parameter: Tissue Value: Aerial
  misc_feature: MA Experiment 108573 PARAMETER Experiment Name: At_Drought_cDNA_P Parameter: Treatment Value: Drought vs. No Drought
  misc_feature: MA Experiment ID: 108595 Result: Down-regulated in Transcription
  misc_feature: MA Experiment 108595 PARAMETER Experiment Name: At_Ler-pi_Ovule_cDNA_P Parameter: Plant Line Value: null
  misc_feature: MA Experiment ID: 20000069 Result: Down-regulated in Transcription
  misc_feature: MA Experiment 20000069 PARAMETER Experiment Name: At_100uM_ABA_Mutants_cDNA_P Parameter: Plant Line Value: CS23
  misc_feature: MA Experiment 20000069 PARAMETER Experiment Name: At_100uM_ABA_Mutants_cDNA_P Parameter: Timepoint (hr) Value: 6
  misc_feature: MA Experiment 20000069 PARAMETER Experiment Name: At_100uM_ABA_Mutants_cDNA_P Parameter: Tissue Value: Aerial
  misc_feature: MA Experiment 20000069 PARAMETER Experiment Name: At_100uM_ABA_Mutants_cDNA_P Parameter: Treatment Value: 100uM ABA vs. No Treatment
  misc_feature: MA Experiment ID: 20000070 Result: Down-regulated in Transcription
  misc_feature: MA Experiment 20000070 PARAMETER Experiment Name: At_100uM_ABA_Mutants_cDNA_P Parameter: Plant Line Value: CS24
  misc_feature: MA Experiment 20000070 PARAMETER Experiment Name: At_100uM_ABA_Mutants_cDNA_P Parameter: Timepoint (hr) Value: 6
  misc_feature: MA Experiment 20000070 PARAMETER Experiment Name: At_100uM_ABA_Mutants_cDNA_P Parameter: Tissue Value: Aerial
  misc_feature: MA Experiment 20000070 PARAMETER Experiment Name: At_100uM_ABA_Mutants_cDNA_P Parameter: Treatment Value: 100uM ABA vs. No Treatment
  misc_feature: MA Experiment ID: 20000071 Result: Down-regulated in Transcription
  misc_feature: MA Experiment 20000071 PARAMETER Experiment Name: At_100uM_ABA_Mutants_cDNA_P Parameter: Plant Line Value: CS8104
  misc_feature: MA Experiment 20000071 PARAMETER Experiment Name: At_100uM_ABA_Mutants_cDNA_P Parameter: Timepoint (hr) Value: 6
  misc_feature: MA Experiment 20000071 PARAMETER Experiment Name: At_100uM_ABA_Mutants_cDNA_P Parameter: Tissue Value: Aerial
  misc_feature: MA Experiment 20000071 PARAMETER Experiment Name: At_100uM_ABA_Mutants_cDNA_P Parameter: Treatment Value: 100uM ABA vs. No Treatment
  misc_feature: MA Experiment ID: 20000072 Result: Down-regulated in Transcription
  misc_feature: MA Experiment 20000072 PARAMETER Experiment Name: At_100uM_ABA_Mutants_cDNA_P Parameter: Plant Line Value: CS8105
  misc_feature: MA Experiment 20000072 PARAMETER Experiment Name: At_100uM_ABA_Mutants_cDNA_P Parameter: Timepoint (hr) Value: 6
  misc_feature: MA Experiment 20000072 PARAMETER Experiment Name: At_100uM_ABA_Mutants_cDNA_P Parameter: Tissue Value: Aerial
  misc_feature: MA Experiment 20000072 PARAMETER Experiment Name: At_100uM_ABA_Mutants_cDNA_P Parameter: Treatment Value: 100uM ABA vs. No Treatment
  misc_feature: MA Experiment ID: 20000086 Result: Down-regulated in Transcription
  misc_feature: MA Experiment 20000086 PARAMETER Experiment Name: At_100uM_ABA_Mutants_cDNA_P Parameter: Plant Line Value: CS22
  misc_feature: MA Experiment 20000086 PARAMETER Experiment Name: At_100uM_ABA_Mutants_cDNA_P Parameter: Timepoint (hr) Value: 6
  misc_feature: MA Experiment 20000086 PARAMETER Experiment Name: At_100uM_ABA_Mutants_cDNA_P Parameter: Tissue Value: Aerial
  misc_feature: MA Experiment 20000086 PARAMETER Experiment Name: At_100uM_ABA_Mutants_cDNA_P Parameter: Treatment Value: 100uM ABA vs. No Treatment
  misc_feature: MA Experiment ID: 20000087 Result: Down-regulated in Transcription
  misc_feature: MA Experiment 20000087 PARAMETER Experiment Name: At_100uM_ABA_Mutants_cDNA_P Parameter: Plant Line Value: WS
  misc_feature: MA Experiment 20000087 PARAMETER Experiment Name: At_100uM_ABA_Mutants_cDNA_P Parameter: Timepoint (hr) Value: 6
  misc_feature: MA Experiment 20000087 PARAMETER Experiment Name: At_100uM_ABA_Mutants_cDNA_P Parameter: Tissue Value: Aerial
  misc_feature: MA Experiment 20000087 PARAMETER Experiment Name: At_100uM_ABA_Mutants_cDNA_P Parameter: Treatment Value: 100uM ABA vs. No Treatment
  misc_feature: MA Experiment ID: 20000088 Result: Down-regulated in Transcription
  misc_feature: MA Experiment 20000088 PARAMETER Experiment Name: At_100uM_ABA_Mutants_cDNA_P Parameter: Plant Line Value: Landsberg
  misc_feature: MA Experiment 20000088 PARAMETER Experiment Name: At_100uM_ABA_Mutants_cDNA_P Parameter: Timepoint (hr) Value: 6
  misc_feature: MA Experiment 20000088 PARAMETER Experiment Name: At_100uM_ABA_Mutants_cDNA_P Parameter: Tissue Value: Aerial
  misc_feature: MA Experiment 20000088 PARAMETER Experiment Name: At_100uM_ABA_Mutants_cDNA_P Parameter: Treatment Value: 100uM ABA vs. No Treatment
  misc_feature: MA Experiment ID: 20000089 Result: Down-regulated in Transcription
  misc_feature: MA Experiment ID: 20000090 Result: Down-regulated in Transcription
  misc_feature: MA Experiment ID: 20000117 Result: Down-regulated in Transcription
  misc_feature: MA Experiment 20000117 PARAMETER Experiment Name: At_100uM_ABA_Mutants_cDNA_P Parameter: Plant Line Value: Columbia
  misc_feature: MA Experiment 20000117 PARAMETER Experiment Name: At_100uM_ABA_Mutants_cDNA_P Parameter: Timepoint (hr) Value: 6
  misc_feature: MA Experiment 20000117 PARAMETER Experiment Name: At_100uM_ABA_Mutants_cDNA_P Parameter: Tissue Value: Aerial
  misc_feature: MA Experiment 20000117 PARAMETER Experiment Name: At_100uM_ABA_Mutants_cDNA_P Parameter: Treatment Value: 100uM ABA vs. No Treatment
  misc_feature: MA Experiment ID: 20000184 Result: Up-regulated in Transcription
  misc_feature: MA Experiment 20000184 PARAMETER Experiment Name: At_Shoots__P Parameter: Age (day) Value: 7
  misc_feature: MA Experiment 20000184 PARAMETER Experiment Name: At_Shoots__P Parameter: Tissue Value: Shoots vs. Whole Plant
  misc_feature: MA Experiment ID: 20000185 Result: Down-regulated in Transcription
  misc_feature: MA Experiment 20000185 PARAMETER Experiment Name: At_Roots__P Parameter: Age (day) Value: 7 vs. 21
  misc_feature: MA Experiment 20000185 PARAMETER Experiment Name: At_Roots__P Parameter: Organism Value: A. thaliana
  misc_feature: MA Experiment 20000185 PARAMETER Experiment Name: At_Roots__P Parameter: Tissue Value: Roots vs. Whole Plant
  misc_feature: MA Experiment ID: 20000437 Result: Down-regulated in Transcription
  misc_feature: MA Experiment 20000437 PARAMETER Experiment Name: At_Drought_P Parameter: Age (day) Value: 8
  misc_feature: MA Experiment 20000437 PARAMETER Experiment Name: At_Drought_P Parameter: Organism Value: A. thaliana
  misc_feature: MA Experiment 20000437 PARAMETER Experiment Name: At_Drought_P Parameter: Plant Line Value: WS
  misc_feature: MA Experiment 20000437 PARAMETER Experiment Name: At_Drought_P Parameter: Timepoint (hr) Value: 24
  misc_feature: MA Experiment 20000437 PARAMETER Experiment Name: At_Drought_P Parameter: Tissue Value: Whole Plant
  misc_feature: MA Experiment 20000437 PARAMETER Experiment Name: At_Drought_P Parameter: Treatment Value: Drought vs. No Drought
  misc_feature: MA Experiment ID: 20000438 Result: Up-regulated in Transcription
  misc_feature: MA Experiment 20000438 PARAMETER Experiment Name: At_Shoots__P Parameter: Age (day) Value: 14
  misc_feature: MA Experiment 20000438 PARAMETER Experiment Name: At_Shoots__P Parameter: Tissue Value: Shoots vs. Whole Plant
  misc_feature: MA Experiment ID: 20000439 Result: Down-regulated in Transcription
  misc_feature: MA Experiment 20000439 PARAMETER Experiment Name: At_Roots__P Parameter: Age (day) Value: 14 vs. 21
  misc_feature: MA Experiment 20000439 PARAMETER Experiment Name: At_Roots__P Parameter: Organism Value: A. thaliana
  misc_feature: MA Experiment 20000439 PARAMETER Experiment Name: At_Roots__P Parameter: Tissue Value: Roots vs. Whole Plant
  misc_feature: MA Experiment ID: 20000794 Result: Down-regulated in Transcription
  misc_feature: MA Experiment 20000794 PARAMETER Experiment Name: At_Petals_P Parameter: Age (day) Value: 23-25 days
  misc_feature: MA Experiment 20000794 PARAMETER Experiment Name: At_Petals_P Parameter: Plant Line Value: WS
  misc_feature: MA Experiment 20000794 PARAMETER Experiment Name: At_Petals_P Parameter: Tissue Value: Petals vs. Whole plant
  misc_feature: MA Experiment ID: 20001451 Result: Down-regulated in Transcription
  misc_feature: MA Experiment 20001451 PARAMETER Experiment Name: At_Far-red-induction_P Parameter: Age (day) Value: 7
  misc_feature: MA Experiment 20001451 PARAMETER Experiment Name: At_Far-red-induction_P Parameter: Light Value: Far-red vs. White
  misc_feature: MA Experiment 20001451 PARAMETER Experiment Name: At_Far-red-induction_P Parameter: Organism Value: A. thaliana
  misc_feature: MA Experiment 20001451 PARAMETER Experiment Name: At_Far-red-induction_P Parameter: Plant Line Value: Columbia
  misc_feature: MA Experiment 20001451 PARAMETER Experiment Name: At_Far-red-induction_P Parameter: Timepoint (hr) Value: 24
  misc_feature: MA Experiment 20001451 PARAMETER Experiment Name: At_Far-red-induction_P Parameter: Tissue Value: Whole Plant
  misc_feature: MA Experiment ID: 20001757 Result: Up-regulated in Transcription
  misc_feature: MA Experiment 20001757 PARAMETER Experiment Name: At_50mM_NH4NO3_L-to-H_P Parameter: Timepoint (hr) Value: 6
  misc_feature: MA Experiment 20001757 PARAMETER Experiment Name: At_50mM_NH4NO3_L-to-H_P Parameter: Tissue Value: Leaf
  misc_feature: MA Experiment 20001757 PARAMETER Experiment Name: At_50mM_NH4NO3_L-to-H_P Parameter: Treatment Value: 50mM NH4NO3 vs 100mM Mannitol
tcgtttgtgtttttgattggcggagaattggtgatagataagcttcttcttccctcttctcaacttggtggatctgtcatcgatggcctctttgatgctcaacggggccattaccttccccaaaggtttaggttcccctggttccaatttgcatgccagatcgattcctcggccgaccttactctcagttacccgaacctccacacctagactctcggtggctactagatgcagcagcagcagcgtgtcgtcttcccggccatcggcgcaacctaggttcattcagcacaagaaggaggcttactggttctacaggttcttatccatcgtatacgaccatgtcatcaatcctgggcattggaccgaggatatgagagacgacgctcttgagccagcggatctcagccatccggacatgcgagtggtcgatgtcggcggcggaactggtttcactactctgggcatagtcaagacagtgaaggccaagaatgtgaccattctggaccagtcgccacatcagctggccaaagcaaagcaaaaggagccgttgaaagaatgcaagatcgtcgagggagatgctgaggatcttccttttccaaccgattatgctgacagatacgtttctgctggaagcattgagtactggccggacccgcagaggggaataagggaagcgtacagggttctcaagatcggtggcaaagcgtgtctcatcggccctgtctacccaaccttctggctctctcgcttcttttctgatgtctggatgctcttccccaaggaggaagaatacattgagtggttcaagaatgccggtttcaaggacgttcagctcaagaggattggccccaagtggtaccgtggtgttcgcaggcacggccttatcatgggatattctgtcactggtgttaaacctgcctccggtgactctcctctccagcttggtccaaaggaagaggacgtagagaagcctgtcaacaaccccttctccttcttgggacgcttcctcctgggaactctagcagctgcctggtttgtgttaatccctatctacatgtggatcaaggatcagatcgttcccaaagaccaacccatctgatccttctcttctaggacatgatcattgtatcattgtaaacccctcttgtggtaaagaaagattcgagtcc

SEQ ID NO: 30781 - protein, 338 aa, Arabidopsis thaliana
  peptide (1)..(338): Ceres Seq. ID no. 13486808
  misc_feature (67)..(257): Pfam Name: ubiE/COQ5 methyltransferase family Pfam Description: ubiE/COQ5 methyltransferase family
  misc_feature (67)..(250): Homolog of NCBI NO: 15790980 NR Description: membrane protein; Hmp [Halobacterium sp. NRC-1]
  misc_feature (67)..(260): Homolog of NCBI NO: 11498123 NR Description: chloroplast inner envelope membrane protein
  misc_feature (1)..(186): Homolog of NCBI NO: 25458195 NR Description: membrane protein, 37K, chloroplast inner envelope
  misc_feature (21)..(335): Homolog of NCBI NO: 37265798 NR Description: MPBQ/MSBQ methyltransferase [Chlamydomonas
  misc_feature (46)..(338): Homolog of NCBI NO: 34393472 NR Description: putative 37kDa chloroplast inner envelope
  misc_feature (1)..(338): Homolog of NCBI NO: 124429 NR Description: 37 KD INNER ENVELOPE MEMBRANE PROTEIN,
  misc_feature (1)..(338): Homolog of NCBI NO: 7489166 NR Description: membrane protein, 37K, precursor, chloroplast
  misc_feature (1)..(338): Homolog of NCBI NO: 15005009 NR Description: APG1 [Arabidopsis thaliana]
  misc_feature (1)..(338): Homolog of NCBI NO: 15229430 NR Description: chloroplast inner envelope membrane protein,
  misc_feature (1)..(338): Homolog of NCBI NO: 21553996 NR Description: putative chloroplast inner envelope protein
MASLMLNGAITFPKGLGSPGSNLHARSIPRPTLLSVTRTSTPRLSVATRCSSSSVSSSRPSAQPRFIQHKKEAYWFYRFLSIVYDHVINPGHWTEDMRDDALEPADLSHPDMRVVDVGGGTGFTTLGIVKTVKAKNVTILDQSPHQLAKAKQKEPLKECKIVEGDAEDLPFPTDYADRYVSAGSIEYWPDPQRGIREAYRVLKIGGKACLIGPVYPTFWLSRFFSDVWMLFPKEEEYIEWFKNAGFKDVQLKRIGPKWYRGVRRHGLIMGYSVTGVKPASGDSPLQLGPKEEDVEKPVNNPFSFLGRFLLGTLAAAWFVLIPIYMWIKDQIVPKDQPI

SEQ ID NO: 30782 - protein, 334 aa, Arabidopsis thaliana
  peptide (1)..(334): Ceres Seq. ID no. 13486809
  misc_feature (63)..(253): Pfam Name: ubiE/COQ5 methyltransferase family Pfam Description: ubiE/COQ5 methyltransferase family
  misc_feature (63)..(246): Homolog of NCBI NO: 15790980 NR Description: membrane protein; Hmp [Halobacterium sp. NRC-1]
  misc_feature (63)..(256): Homolog of NCBI NO: 11498123 NR Description: chloroplast inner envelope membrane protein
  misc_feature (1)..(182): Homolog of NCBI NO: 25458195 NR Description: membrane protein, 37K, chloroplast inner envelope
  misc_feature (17)..(331): Homolog of NCBI NO: 37265798 NR Description: MPBQ/MSBQ methyltransferase [Chlamydomonas
  misc_feature (42)..(334): Homolog of NCBI NO: 34393472 NR Description: putative 37kDa chloroplast inner envelope
  misc_feature (1)..(334): Homolog of NCBI NO: 124429 NR Description: 37 KD INNER ENVELOPE MEMBRANE PROTEIN,
  misc_feature (1)..(334): Homolog of NCBI NO: 7489166 NR Description: membrane protein, 37K, precursor, chloroplast
  misc_feature (1)..(334): Homolog of NCBI NO: 15005009 NR Description: APG1 [Arabidopsis thaliana]
  misc_feature (1)..(334): Homolog of NCBI NO: 15229430 NR Description: chloroplast inner envelope membrane protein,
  misc_feature (1)..(334): Homolog of NCBI NO: 21553996 NR Description: putative chloroplast inner envelope protein
MLNGAITFPKGLGSPGSNLHARSIPRPTLLSVTRTSTPRLSVATRCSSSSVSSSRPSAQPRFIQHKKEAYWFYRFLSIVYDHVINPGHWTEDMRDDALEPADLSHPDMRVVDVGGGTGFTTLGIVKTVKAKNVTILDQSPHQLAKAKQKEPLKECKIVEGDAEDLPFPTDYADRYVSAGSIEYWPDPQRGIREAYRVLKIGGKACLIGPVYPTFWLSRFFSDVWMLFPKEEEYIEWFKNAGFKDVQLKRIGPKWYRGVRRHGLIMGYSVTGVKPASGDSPLQLGPKEEDVEKPVNNPFSFLGRFLLGTLAAAWFVLIPIYMWIKDQIVPKDQPI

SEQ ID NO: 30783 - protein, 242 aa, Arabidopsis thaliana
  peptide (1)..(242): Ceres Seq. ID no. 13486810
  misc_feature (1)..(161): Pfam Name: ubiE/COQ5 methyltransferase family Pfam Description: ubiE/COQ5 methyltransferase family
  misc_feature (1)..(154): Homolog of NCBI NO: 15790980 NR Description: membrane protein; Hmp [Halobacterium sp. NRC-1]
  misc_feature (1)..(164): Homolog of NCBI NO: 11498123 NR Description: chloroplast inner envelope membrane protein
  misc_feature (1)..(90): Homolog of NCBI NO: 25458195 NR Description: membrane protein, 37K, chloroplast inner envelope
  misc_feature (1)..(239): Homolog of NCBI NO: 37265798 NR Description: MPBQ/MSBQ methyltransferase [Chlamydomonas
  misc_feature (1)..(242): Homolog of NCBI NO: 34393472 NR Description: putative 37kDa chloroplast inner envelope
  misc_feature (1)..(242): Homolog of NCBI NO: 124429 NR Description: 37 KD INNER ENVELOPE MEMBRANE PROTEIN,
  misc_feature (1)..(242): Homolog of NCBI NO: 7489166 NR Description: membrane protein, 37K, precursor, chloroplast
  misc_feature (1)..(242): Homolog of NCBI NO: 15005009 NR Description: APG1 [Arabidopsis thaliana]
  misc_feature (1)..(242): Homolog of NCBI NO: 15229430 NR Description: chloroplast inner envelope membrane protein,
  misc_feature (1)..(242): Homolog of NCBI NO: 21553996 NR Description: putative chloroplast inner envelope protein
MRDDALEPADLSHPDMRVVDVGGGTGFTTLGIVKTVKAKNVTILDQSPHQLAKAKQKEPLKECKIVEGDAEDLPFPTDYADRYVSAGSIEYWPDPQRGIREAYRVLKIGGKACLIGPVYPTFWLSRFFSDVWMLFPKEEEYIEWFKNAGFKDVQLKRIGPKWYRGVRRHGLIMGYSVTGVKPASGDSPLQLGPKEEDVEKPVNNPFSFLGRFLLGTLAAAWFVLIPIYMWIKDQIVPKDQPI

SEQ ID NO: 30784 - DNA, 1466 bp, Arabidopsis thaliana
  misc_feature (1)..(1466): Ceres Seq. ID no. 13486703
  misc_feature: MA Experiment ID: 108434 Result: Up-regulated in Transcription
  misc_feature: MA Experiment 108434 PARAMETER Experiment Name: At_Root_Tips_cDNA_P Parameter: Tissue Value: Root Tips
  misc_feature: MA Experiment ID: 108461 Result: Down-regulated in Transcription
  misc_feature: MA Experiment 108461 PARAMETER Experiment Name: At_Germinating_Seeds_cDNA_P Parameter: Age (day) Value: 1 vs. 0
  misc_feature: MA Experiment 108461 PARAMETER Experiment Name: At_Germinating_Seeds_cDNA_P Parameter: Tissue Value: Germinating Seeds
  misc_feature: MA Experiment ID: 108462 Result: Down-regulated in Transcription
  misc_feature: MA Experiment 108462 PARAMETER Experiment Name: At_Germinating_Seeds_cDNA_P Parameter: Age (day) Value: 2 vs. 0
  misc_feature: MA Experiment 108462 PARAMETER Experiment Name: At_Germinating_Seeds_cDNA_P Parameter: Tissue Value: Germinating Seeds
  misc_feature: MA Experiment ID: 108463 Result: Down-regulated in Transcription
  misc_feature: MA Experiment 108463 PARAMETER Experiment Name: At_Germinating_Seeds_cDNA_P Parameter: Age (day) Value: 3 vs. 0
  misc_feature: MA Experiment 108463 PARAMETER Experiment Name: At_Germinating_Seeds_cDNA_P Parameter: Tissue Value: Germinating Seeds
  misc_feature: MA Experiment ID: 108576 Result: Up-regulated in Transcription
  misc_feature: MA Experiment 108576 PARAMETER Experiment Name: At_42deg_Heat_cDNA_P Parameter: Temperature (deg C) Value: 42 vs. 22
  misc_feature: MA Experiment 108576 PARAMETER Experiment Name: At_42deg_Heat_cDNA_P Parameter: Timepoint (hr) Value: 1
  misc_feature: MA Experiment 108576 PARAMETER Experiment Name: At_42deg_Heat_cDNA_P Parameter: Tissue Value: Aerial
  misc_feature: MA Experiment ID: 108577 Result: Up-regulated in Transcription
  misc_feature: MA Experiment 108577 PARAMETER Experiment Name: At_42deg_Heat_cDNA_P Parameter: Temperature (deg C) Value: 42 vs. 22
  misc_feature: MA Experiment 108577 PARAMETER Experiment Name: At_42deg_Heat_cDNA_P Parameter: Timepoint (hr) Value: 6
  misc_feature: MA Experiment 108577 PARAMETER Experiment Name: At_42deg_Heat_cDNA_P Parameter: Tissue Value: Aerial
  misc_feature: MA Experiment ID: 108595 Result: Up-regulated in Transcription
  misc_feature: MA Experiment 108595 PARAMETER Experiment Name: At_Ler-pi_Ovule_cDNA_P Parameter: Plant Line Value: null
  misc_feature: MA Experiment ID: 108668 Result: Up-regulated in Transcription
  misc_feature: MA Experiment 108668 PARAMETER Experiment Name: At_2mM_SA_cDNA_P Parameter: Plant Line Value: WS
  misc_feature: MA Experiment 108668 PARAMETER Experiment Name: At_2mM_SA_cDNA_P Parameter: Timepoint (hr) Value: 6
  misc_feature: MA Experiment 108668 PARAMETER Experiment Name: At_2mM_SA_cDNA_P Parameter: Treatment Value: 2mM SA vs. No Treatment
  misc_feature: MA Experiment ID: 20000070 Result: Up-regulated in Transcription
  misc_feature: MA Experiment 20000070 PARAMETER Experiment Name: At_100uM_ABA_Mutants_cDNA_P Parameter: Plant Line Value: CS24
  misc_feature: MA Experiment 20000070 PARAMETER Experiment Name: At_100uM_ABA_Mutants_cDNA_P Parameter: Timepoint (hr) Value: 6
  misc_feature: MA Experiment 20000070 PARAMETER Experiment Name: At_100uM_ABA_Mutants_cDNA_P Parameter: Tissue Value: Aerial
  misc_feature: MA Experiment 20000070 PARAMETER Experiment Name: At_100uM_ABA_Mutants_cDNA_P Parameter: Treatment Value: 100uM ABA vs. No Treatment
  misc_feature: MA Experiment ID: 20000089 Result: Up-regulated in Transcription
  misc_feature: MA Experiment ID: 20000090 Result: Up-regulated in Transcription
  misc_feature: MA Experiment ID: 20000093 Result: Up-regulated in Transcription
  misc_feature: MA Experiment 20000093 PARAMETER Experiment Name: At_42deg_Heat_cDNA_P Parameter: Temperature (deg C) Value: 42 vs. 22
  misc_feature: MA Experiment 20000093 PARAMETER Experiment Name: At_42deg_Heat_cDNA_P Parameter: Timepoint (hr) Value: 0.5
  misc_feature: MA Experiment 20000093 PARAMETER Experiment Name: At_42deg_Heat_cDNA_P Parameter: Tissue Value: Aerial
  misc_feature: MA Experiment ID: 20000112 Result: Up-regulated in Transcription
  misc_feature: MA Experiment 20000112 PARAMETER Experiment Name: At_42deg_Heat_cDNA_P Parameter: Temperature (deg C) Value: 42 vs. 22
  misc_feature: MA Experiment 20000112 PARAMETER Experiment Name: At_42deg_Heat_cDNA_P Parameter: Timepoint (hr) Value: 2
  misc_feature: MA Experiment 20000112 PARAMETER Experiment Name: At_42deg_Heat_cDNA_P Parameter: Tissue Value: Aerial
  misc_feature: MA Experiment ID: 20000113 Result: Up-regulated in Transcription
  misc_feature: MA Experiment 20000113 PARAMETER Experiment Name: At_42deg_Heat_cDNA_P Parameter: Temperature (deg C) Value: 42 vs. 22
  misc_feature: MA Experiment 20000113 PARAMETER Experiment Name: At_42deg_Heat_cDNA_P Parameter: Timepoint (hr) Value: 8
  misc_feature: MA Experiment 20000113 PARAMETER Experiment Name: At_42deg_Heat_cDNA_P Parameter: Tissue Value: Aerial
  misc_feature: MA Experiment ID: 20000117 Result: Up-regulated in Transcription
  misc_feature: MA Experiment 20000117 PARAMETER Experiment Name: At_100uM_ABA_Mutants_cDNA_P Parameter: Plant Line Value: Columbia
  misc_feature: MA Experiment 20000117 PARAMETER Experiment Name: At_100uM_ABA_Mutants_cDNA_P Parameter: Timepoint (hr) Value: 6
  misc_feature: MA Experiment 20000117 PARAMETER Experiment Name: At_100uM_ABA_Mutants_cDNA_P Parameter: Tissue Value: Aerial
  misc_feature: MA Experiment 20000117 PARAMETER Experiment Name: At_100uM_ABA_Mutants_cDNA_P Parameter: Treatment Value: 100uM ABA vs. No Treatment
  misc_feature: MA Experiment ID: 20000144 Result: Up-regulated in Transcription
  misc_feature: MA Experiment 20000144 PARAMETER Experiment Name: At_42deg_Heat_cDNA_P Parameter: Temperature (deg C) Value: 42 vs. 22
  misc_feature: MA Experiment 20000144 PARAMETER Experiment Name: At_42deg_Heat_cDNA_P Parameter: Timepoint (hr) Value: 1
  misc_feature: MA Experiment 20000144 PARAMETER Experiment Name: At_42deg_Heat_cDNA_P Parameter: Tissue Value: Aerial
  misc_feature: MA Experiment ID: 20000171 Result: Up-regulated in Transcription
  misc_feature: MA Experiment 20000171 PARAMETER Experiment Name: At_42deg_Heat_P Parameter: Age (day) Value: 14
  misc_feature: MA Experiment 20000171 PARAMETER Experiment Name: At_42deg_Heat_P Parameter: Organism Value: A. thaliana
  misc_feature: MA Experiment 20000171 PARAMETER Experiment Name: At_42deg_Heat_P Parameter: Plant Line Value: WS
  misc_feature: MA Experiment 20000171 PARAMETER Experiment Name: At_42deg_Heat_P Parameter: Temperature (deg C) Value: 42 vs. 22
  misc_feature: MA Experiment 20000171 PARAMETER Experiment Name: At_42deg_Heat_P Parameter: Timepoint (hr) Value: 1
  misc_feature: MA Experiment 20000171 PARAMETER Experiment Name: At_42deg_Heat_P Parameter: Tissue Value: Aerial
  misc_feature: MA Experiment ID: 20000173 Result: Up-regulated in Transcription
  misc_feature: MA Experiment 20000173 PARAMETER Experiment Name: At_42deg_Heat_P Parameter: Age (day) Value: 14
  misc_feature: MA Experiment 20000173 PARAMETER Experiment Name: At_42deg_Heat_P Parameter: Organism Value: A. thaliana
  misc_feature: MA Experiment 20000173 PARAMETER Experiment Name: At_42deg_Heat_P Parameter: Plant Line Value: WS
  misc_feature: MA Experiment 20000173 PARAMETER Experiment Name: At_42deg_Heat_P Parameter: Temperature (deg C) Value: 42 vs. 22
  misc_feature: MA Experiment 20000173 PARAMETER Experiment Name: At_42deg_Heat_P Parameter: Timepoint (hr) Value: 6
  misc_feature: MA Experiment 20000173 PARAMETER Experiment Name: At_42deg_Heat_P Parameter: Tissue Value: Aerial
  misc_feature: MA Experiment ID: 20000180 Result: Down-regulated in Transcription
  misc_feature: MA Experiment 20000180 PARAMETER Experiment Name: At_Germinating_Seeds_P Parameter: Age (hr) Value: 24 vs. 0
  misc_feature: MA Experiment 20000180 PARAMETER Experiment Name: At_Germinating_Seeds_P Parameter: Tissue Value: Germinating Seeds
  misc_feature: MA Experiment ID: 20000182 Result: Up-regulated in Transcription
  misc_feature: MA Experiment 20000182 PARAMETER Experiment Name: At_2mM_SA_P Parameter: Age (day) Value: 14
  misc_feature: MA Experiment 20000182 PARAMETER Experiment Name: At_2mM_SA_P Parameter: Organism Value: A. thaliana
  misc_feature: MA Experiment 20000182 PARAMETER Experiment Name: At_2mM_SA_P Parameter: Plant Line Value: WS
  misc_feature: MA Experiment 20000182 PARAMETER Experiment Name: At_2mM_SA_P Parameter: Timepoint (hr) Value: 6
  misc_feature: MA Experiment 20000182 PARAMETER Experiment Name: At_2mM_SA_P Parameter: Tissue Value: Aerial
  misc_feature: MA Experiment 20000182 PARAMETER Experiment Name: At_2mM_SA_P Parameter: Treatment Value: 2mM SA vs. No Treatment
  misc_feature: MA Experiment ID: 20000437 Result: Up-regulated in Transcription
  misc_feature: MA Experiment 20000437 PARAMETER Experiment Name: At_Drought_P Parameter: Age (day) Value: 8
  misc_feature: MA Experiment 20000437 PARAMETER Experiment Name: At_Drought_P Parameter: Organism Value: A. thaliana
  misc_feature: MA Experiment 20000437 PARAMETER Experiment Name: At_Drought_P Parameter: Plant Line Value: WS
  misc_feature: MA Experiment 20000437 PARAMETER Experiment Name: At_Drought_P Parameter: Timepoint (hr) Value: 24
  misc_feature: MA Experiment 20000437 PARAMETER Experiment Name: At_Drought_P Parameter: Tissue Value: Whole Plant
  misc_feature: MA Experiment 20000437 PARAMETER Experiment Name: At_Drought_P Parameter: Treatment Value: Drought vs. No Drought
  misc_feature: MA Experiment ID: 20000456 Result: Up-regulated in Transcription
  misc_feature: MA Experiment 20000456 PARAMETER Experiment Name: At_100uM_BA_P Parameter: Age (day) Value: 14
  misc_feature: MA Experiment 20000456 PARAMETER Experiment Name: At_100uM_BA_P Parameter: Organism Value: A. thaliana
  misc_feature: MA Experiment 20000456 PARAMETER Experiment Name: At_100uM_BA_P Parameter: Plant Line Value: WS
  misc_feature: MA Experiment 20000456 PARAMETER Experiment Name: At_100uM_BA_P Parameter: Timepoint (hr) Value: 6
  misc_feature: MA Experiment 20000456 PARAMETER Experiment Name: At_100uM_BA_P Parameter: Tissue Value: Aerial
  misc_feature: MA Experiment 20000456 PARAMETER Experiment Name: At_100uM_BA_P Parameter: Treatment Value: 100uM BA vs. No Treatment
  misc_feature: MA Experiment ID: 20000709 Result: Up-regulated in Transcription
  misc_feature: MA Experiment 20000709 PARAMETER Experiment Name: At_15mM_NH4NO3_L-to-H_P Parameter: Age (hr) Value: 14
  misc_feature: MA Experiment 20000709 PARAMETER Experiment Name: At_15mM_NH4NO3_L-to-H_P Parameter: Organism Value: A. thaliana
  misc_feature: MA Experiment 20000709 PARAMETER Experiment Name: At_15mM_NH4NO3_L-to-H_P Parameter: Plant Line Value: WS
  misc_feature: MA Experiment 20000709 PARAMETER Experiment Name: At_15mM_NH4NO3_L-to-H_P Parameter: Timepoint (hr) Value: 4
  misc_feature: MA Experiment 20000709 PARAMETER Experiment Name: At_15mM_NH4NO3_L-to-H_P Parameter: Tissue Value: Aerial
  misc_feature: MA Experiment 20000709 PARAMETER Experiment Name: At_15mM_NH4NO3_L-to-H_P Parameter: Treatment Value: 15mM NH4NO3 vs. 30mM Mannitol
  misc_feature: MA Experiment ID: 20001247 Result: Down-regulated in Transcription
  misc_feature: MA Experiment 20001247 PARAMETER Experiment Name: At_Far-red-induction_P Parameter: Age (day) Value: 7
  misc_feature: MA Experiment 20001247 PARAMETER Experiment Name: At_Far-red-induction_P Parameter: Light Value: Far-red vs. White
  misc_feature: MA Experiment 20001247 PARAMETER Experiment Name: At_Far-red-induction_P Parameter: Organism Value: A. thaliana
  misc_feature: MA Experiment 20001247 PARAMETER Experiment Name: At_Far-red-induction_P Parameter: Plant Line Value: Columbia
  misc_feature: MA Experiment 20001247 PARAMETER Experiment Name: At_Far-red-induction_P Parameter: Timepoint (hr) Value: 1
  misc_feature: MA Experiment 20001247 PARAMETER Experiment Name: At_Far-red-induction_P Parameter: Tissue Value: Whole Plant
  misc_feature: MA Experiment ID: 20001248 Result: Down-regulated in Transcription
  misc_feature: MA Experiment 20001248 PARAMETER Experiment Name: At_Far-red-induction_P Parameter: Age (day) Value: 7
  misc_feature: MA Experiment 20001248 PARAMETER Experiment Name: At_Far-red-induction_P Parameter: Light Value: Far-red vs. White
  misc_feature: MA Experiment 20001248 PARAMETER Experiment Name: At_Far-red-induction_P Parameter: Organism Value: A. thaliana
  misc_feature: MA Experiment 20001248 PARAMETER Experiment Name: At_Far-red-induction_P Parameter: Plant Line Value: Columbia
  misc_feature: MA Experiment 20001248 PARAMETER Experiment Name: At_Far-red-induction_P Parameter: Timepoint (hr) Value: 4
  misc_feature: MA Experiment 20001248 PARAMETER Experiment Name: At_Far-red-induction_P Parameter: Tissue Value: Whole Plant
  misc_feature: MA Experiment ID: 20001450 Result: Down-regulated in Transcription
  misc_feature: MA Experiment 20001450 PARAMETER Experiment Name: At_Far-red-induction_P Parameter: Age (day) Value: 7
  misc_feature: MA Experiment 20001450 PARAMETER Experiment Name: At_Far-red-induction_P Parameter: Light Value: Far-red vs. White
  misc_feature: MA Experiment 20001450 PARAMETER Experiment Name: At_Far-red-induction_P Parameter: Organism Value: A. thaliana
  misc_feature: MA Experiment 20001450 PARAMETER Experiment Name: At_Far-red-induction_P Parameter: Plant Line Value: Columbia
  misc_feature: MA Experiment 20001450 PARAMETER Experiment Name: At_Far-red-induction_P Parameter: Timepoint (hr) Value: 8
  misc_feature: MA Experiment 20001450 PARAMETER Experiment Name: At_Far-red-induction_P Parameter: Tissue Value: Whole Plant
  misc_feature: MA Experiment ID: 20001451 Result: Down-regulated in Transcription
  misc_feature: MA Experiment 20001451 PARAMETER Experiment Name: At_Far-red-induction_P Parameter: Age (day) Value: 7
  misc_feature: MA Experiment 20001451 PARAMETER Experiment Name: At_Far-red-induction_P Parameter: Light Value: Far-red vs. White
  misc_feature: MA Experiment 20001451 PARAMETER Experiment Name: At_Far-red-induction_P Parameter: Organism Value: A. thaliana
  misc_feature: MA Experiment 20001451 PARAMETER Experiment Name: At_Far-red-induction_P Parameter: Plant Line Value: Columbia
  misc_feature: MA Experiment 20001451 PARAMETER Experiment Name: At_Far-red-induction_P Parameter: Timepoint (hr) Value: 24
  misc_feature: MA Experiment 20001451 PARAMETER Experiment Name: At_Far-red-induction_P Parameter: Tissue Value: Whole Plant
  misc_feature: MA Experiment ID: 20001557 Result: Up-regulated in Transcription
  misc_feature: MA Experiment 20001557 PARAMETER Experiment Name: At_Drought_Soil_Dry_P Parameter: Age (day) Value: 27
  misc_feature: MA Experiment 20001557 PARAMETER Experiment Name: At_Drought_Soil_Dry_P Parameter: Organism Value: A. thaliana
  misc_feature: MA Experiment 20001557 PARAMETER Experiment Name: At_Drought_Soil_Dry_P Parameter: Plant Line Value: WS
  misc_feature: MA Experiment 20001557 PARAMETER Experiment Name: At_Drought_Soil_Dry_P Parameter: Post Timepoint (hr) Value: 3
  misc_feature: MA Experiment 20001557 PARAMETER Experiment Name: At_Drought_Soil_Dry_P Parameter: Post-Treatment Value: Re-Water vs. No Drought
  misc_feature: MA Experiment 20001557 PARAMETER Experiment Name: At_Drought_Soil_Dry_P Parameter: Timepoint (day) Value: 13
  misc_feature: MA Experiment 20001557 PARAMETER Experiment Name: At_Drought_Soil_Dry_P Parameter: Treatment Value: Drought vs. No Drought
  misc_feature: MA Experiment ID: 20001560 Result: Up-regulated in Transcription
  misc_feature: MA Experiment 20001560 PARAMETER Experiment Name: At_Drought_Soil_Dry_P Parameter: Age (day) Value: 28
  misc_feature: MA Experiment 20001560 PARAMETER Experiment Name: At_Drought_Soil_Dry_P Parameter: Organism Value: A. thaliana
  misc_feature: MA Experiment 20001560 PARAMETER Experiment Name: At_Drought_Soil_Dry_P Parameter: Plant Line Value: WS
  misc_feature: MA Experiment 20001560 PARAMETER Experiment Name: At_Drought_Soil_Dry_P Parameter: Post Timepoint (hr) Value: None
  misc_feature: MA Experiment 20001560 PARAMETER Experiment Name: At_Drought_Soil_Dry_P Parameter: Post-Treatment Value: None
  misc_feature: MA Experiment 20001560 PARAMETER Experiment Name: At_Drought_Soil_Dry_P Parameter: Timepoint (day) Value: 14
  misc_feature: MA Experiment 20001560 PARAMETER Experiment Name: At_Drought_Soil_Dry_P Parameter: Treatment Value: Drought vs. No Drought
  misc_feature: MA Experiment ID: 20001772 Result: Down-regulated in Transcription
  misc_feature: MA Experiment 20001772 PARAMETER Experiment Name: At_Far-red-enriched-adult_P Parameter: Age (day) Value: 29
  misc_feature: MA Experiment 20001772 PARAMETER Experiment Name: At_Far-red-enriched-adult_P Parameter: Light Value: Far-red enriched vs. White
  misc_feature: MA Experiment 20001772 PARAMETER Experiment Name: At_Far-red-enriched-adult_P Parameter: Organism Value: A. thaliana
  misc_feature: MA Experiment 20001772 PARAMETER Experiment Name: At_Far-red-enriched-adult_P Parameter: Plant Line Value: Columbia
  misc_feature: MA Experiment 20001772 PARAMETER Experiment Name: At_Far-red-enriched-adult_P Parameter: Timepoint (hr) Value: 24
  misc_feature: MA Experiment 20001772 PARAMETER Experiment Name: At_Far-red-enriched-adult_P Parameter: Tissue Value: Aerial
  misc_feature: MA Experiment ID: 20001905 Result: Up-regulated in Transcription
  misc_feature: MA Experiment 20001905 PARAMETER Experiment Name: At_Drought_Reproduction_P Parameter: Age (day) Value: 40
  misc_feature: MA Experiment 20001905 PARAMETER Experiment Name: At_Drought_Reproduction_P Parameter: Organism Value: A. thaliana
  misc_feature: MA Experiment 20001905 PARAMETER Experiment Name: At_Drought_Reproduction_P Parameter: Plant Line Value: WS
  misc_feature: MA Experiment 20001905 PARAMETER Experiment Name: At_Drought_Reproduction_P Parameter: Timepoint (day) Value: 10
  misc_feature: MA Experiment 20001905 PARAMETER Experiment Name: At_Drought_Reproduction_P Parameter: Tissue Value: Rosettes
  misc_feature: MA Experiment 20001905 PARAMETER Experiment Name: At_Drought_Reproduction_P Parameter: Treatment Value: Drought vs. No Drought
  misc_feature: MA Experiment ID: 20001911 Result: Up-regulated in Transcription
  misc_feature: MA Experiment 20001911 PARAMETER Experiment Name: At_Drought_Reproduction_P Parameter: Age (day) Value: 40
  misc_feature: MA Experiment 20001911 PARAMETER Experiment Name: At_Drought_Reproduction_P Parameter: Organism Value: A. thaliana
  misc_feature: MA Experiment 20001911 PARAMETER Experiment Name: At_Drought_Reproduction_P Parameter: Plant Line Value: WS
  misc_feature: MA Experiment 20001911 PARAMETER Experiment Name: At_Drought_Reproduction_P Parameter: Timepoint (day) Value: 10
  misc_feature: MA Experiment 20001911 PARAMETER Experiment Name: At_Drought_Reproduction_P Parameter: Tissue Value: Flowers
  misc_feature: MA Experiment 20001911 PARAMETER Experiment Name: At_Drought_Reproduction_P Parameter: Treatment Value: Drought vs. No Drought
aagatttttaagaatgttgtagtagcttcgcgaataatctcaggtcttctataaaaccaaactagcgattagtcgactcttcctctttattattacaaagacgaaaaggcttcgagttttgtaatttcttcttctgttacaagttcttttcactgtgaaagtaattcttcaatggcgaaagacggacctaattgggatggtttgcttaagtggagtctctctcacgccgacggtactcgacccactcgccagttgagtgaggaggatcgaaaatggtttatggaggctatgcaatcgcagactgtagatgtagtcaaacgcatgaaggagattacactagttatgcaaacacctgaacaagttttggtggaacatggagtaacacctgaagatatccaagatttgctggatgagctgcaagagcacgttgaatcgatcgatatggctaacgatcttcattcaattggaggcttggttcctcttcttagtttccttaaaaactctcatgctaatattcgggcaaaagctgcggatgtagttagcacaatagttcagaacaatcctagaagtcaggaacttgttatggaaaccaatgctctggagtcattgctctcgaatttcacttcagacactgatattcacgctcgaacccaggctcttggcgcaatatcatctttgattcgccataacaaaccaggagtaacggctttcaagcttgccaatggttatgctggcctaagagacgccttggcatctgatagtgtgagatttcaaaggaaagccttaaacttgttgcaatatctactgcaagaggatgattcagaccgcagtattgccactggacttggattcccccgagtgatgatgcatcttgcctctagtgacgatgctgagatcagagaagccgctcttcgtggattacttgagctttcaagagagaaaaacgatggaagtagcagcatagataaaagcgatgagaaactgaggcagctactagaagaacggatcaaaggaatcaccttgatgtcacaagaggatcttgaaacggttaaagaagagagacagctcgtggatttactgtggagcatttgctacaatgaaccttcttctctgagagaaaaaggacttgtcgttcttcccggtgaagacgcattgcctcctgatgtcgctagcaagctctttgagcctcctcttagagcttctgcagcaaaccgtaatgctactgagaagaaagatgaacctatgaaactacttggaccatagacgagaaatcaaagctaaaactttttattacttttccttgttttttatgttttgtaacttttcaaattgtcagaaaagtttcatagatatatgtattatgtcaatgatcaagggctatgttatgttaatttttgttttcatcattcgagatctttagtcttgttattgttgagattaagaatattcagcttcaatgcttttcc

SEQ ID NO: 30785 - protein, 363 aa, Arabidopsis thaliana
  peptide (1)..(363): Ceres Seq. ID no. 13486704
  misc_feature (130)..(171): Pfam Name: Armadillo/beta-catenin-like repeat Pfam Description: Armadillo/beta-catenin-like repeat
  misc_feature (7)..(316): Homolog of NCBI NO: 12667701 NR Description: Hsp70 binding protein [Danio rerio]
  misc_feature (7)..(316): Homolog of NCBI NO: 29436427 NR Description: Similar to RIKEN cDNA 1500019G21 gene [Danio
  misc_feature (1)..(314): Homolog of NCBI NO: 15241689 NR Description: expressed protein [Arabidopsis thaliana]
  misc_feature (1)..(363): Homolog of NCBI NO: 26449490 NR Description: unknown protein [Arabidopsis thaliana]
  misc_feature (1)..(363): Homolog of NCBI NO: 15232329 NR Description: expressed protein [Arabidopsis thaliana]
  misc_feature (1)..(363): Homolog of NCBI NO: 34897412 NR Description: putative Hsp70 binding protein
  misc_feature (1)..(29): Homolog of NCBI NO: 6478927 NR Description: hypothetical protein [Arabidopsis thaliana]
  misc_feature (30)..(363): Homolog of NCBI NO: 6478927 NR Description: hypothetical protein [Arabidopsis thaliana]
  misc_feature (1)..(363): Homolog of NCBI NO: 21553998 NR Description: unknown [Arabidopsis thaliana]
  misc_feature (1)..(363): Homolog of NCBI NO: 18398480 NR Description: expressed protein [Arabidopsis thaliana]
MAKDGPNWDGLLKWSLSHADGTRPTRQLSEEDRKWFMEAMQSQTVDVVKRMKEITLVMQTPEQVLVEHGVTPEDIQDLLDELQEHVESIDMANDLHSIGGLVPLLSFLKNSHANIRAKAADVVSTIVQNNPRSQELVMETNALESLLSNFTSDTDIHARTQALGAISSLIRHNKPGVTAFKLANGYAGLRDALASDSVRFQRKALNLLQYLLQEDDSDRSIATGLGFPRVMMHLASSDDAEIREAALRGLLELSREKNDGSSSIDKSDEKLRQLLEERIKGITLMSQEDLETVKEERQLVDLLWSICYNEPSSLREKGLVVLPGEDALPPDVASKLFEPPLRASAANRNATEKKDEPMKLLGP

SEQ ID NO: 30786 - protein, 327 aa, Arabidopsis thaliana
  peptide (1)..(327): Ceres Seq. ID no. 13486705
  misc_feature (94)..(135): Pfam Name: Armadillo/beta-catenin-like repeat Pfam Description: Armadillo/beta-catenin-like repeat
  misc_feature (1)..(264): Homolog of NCBI NO: 15231095 NR Description: expressed protein [Arabidopsis thaliana]
  misc_feature (1)..(280): Homolog of NCBI NO: 12667701 NR Description: Hsp70 binding protein [Danio rerio]
  misc_feature (1)..(280): Homolog of NCBI NO: 29436427 NR Description: Similar to RIKEN cDNA 1500019G21 gene [Danio
  misc_feature (1)..(278): Homolog of NCBI NO: 15241689 NR Description: expressed protein [Arabidopsis thaliana]
  misc_feature (1)..(327): Homolog of NCBI NO: 26449490 NR Description: unknown protein [Arabidopsis thaliana]
  misc_feature (1)..(327): Homolog of NCBI NO: 15232329 NR Description: expressed protein [Arabidopsis thaliana]
  misc_feature (1)..(327): Homolog of NCBI NO: 34897412 NR Description: putative Hsp70 binding protein
  misc_feature (1)..(327): Homolog of NCBI NO: 6478927 NR Description: hypothetical protein [Arabidopsis thaliana]
  misc_feature (1)..(327): Homolog of NCBI NO: 21553998 NR Description: unknown [Arabidopsis thaliana]
  misc_feature (1)..(327): Homolog of NCBI NO: 18398480 NR Description: expressed protein [Arabidopsis thaliana]
MEAMQSQTVDVVKRMKEITLVMQTPEQVLVEHGVTPEDIQDLLDELQEHVESIDMANDLHSIGGLVPLLSFLKNSHANIRAKAADVVSTIVQNNPRSQELVMETNALESLLSNFTSDTDIHARTQALGAISSLIRHNKPGVTAFKLANGYAGLRDALASDSVRFQRKALNLLQYLLQEDDSDRSIATGLGFPRVMMHLASSDDAEIREAALRGLLELSREKNDGSSSIDKSDEKLRQLLEERIKGITLMSQEDLETVKEERQLVDLLWSICYNEPSSLREKGLVVLPGEDALPPDVASKLFEPPLRASAANRNATEKKDEPMKLLGP

SEQ ID NO: 30787 - protein, 324 aa, Arabidopsis thaliana
  peptide (1)..(324): Ceres Seq. ID no. 13486706
  misc_feature (91)..(132): Pfam Name: Armadillo/beta-catenin-like repeat Pfam Description: Armadillo/beta-catenin-like repeat
  misc_feature (1)..(261): Homolog of NCBI NO: 15231095 NR Description: expressed protein [Arabidopsis thaliana]
  misc_feature (1)..(277): Homolog of NCBI NO: 12667701 NR Description: Hsp70 binding protein [Danio rerio]
  misc_feature (1)..(277): Homolog of NCBI NO: 29436427 NR Description: Similar to RIKEN cDNA 1500019G21 gene [Danio
  misc_feature (1)..(275): Homolog of NCBI NO: 15241689 NR Description: expressed protein [Arabidopsis thaliana]
  misc_feature (1)..(324): Homolog of NCBI NO: 26449490 NR Description: unknown protein [Arabidopsis thaliana]
  misc_feature (1)..(324): Homolog of NCBI NO: 15232329 NR Description: expressed protein [Arabidopsis thaliana]
  misc_feature (1)..(324): Homolog of NCBI NO: 34897412 NR Description: putative Hsp70 binding protein
  misc_feature (1)..(324): Homolog of NCBI NO: 6478927 NR Description: hypothetical protein [Arabidopsis thaliana]
  misc_feature (1)..(324): Homolog of NCBI NO: 21553998 NR Description: unknown [Arabidopsis thaliana]
  misc_feature (1)..(324): Homolog of NCBI NO: 18398480 NR Description: expressed protein [Arabidopsis thaliana]
MQSQTVDVVKRMKEITLVMQTPEQVLVEHGVTPEDIQDLLDELQEHVESIDMANDLHSIGGLVPLLSFLKNSHANIRAKAADVVSTIVQNNPRSQELVMETNALESLLSNFTSDTDIHARTQALGAISSLIRHNKPGVTAFKLANGYAGLRDALASDSVRFQRKALNLLQYLLQEDDSDRSIATGLGFPRVMMHLASSDDAEIREAALRGLLELSREKNDGSSSIDKSDEKLRQLLEERIKGITLMSQEDLETVKEERQLVDLLWSICYNEPSSLREKGLVVLPGEDALPPDVASKLFEPPLRASAANRNATEKKDEPMKLLGP

SEQ ID NO: 30788 - DNA, 1148 bp, Arabidopsis thaliana
  misc_feature (1)..(1148): Ceres Seq. ID no. 13491548
  misc_feature: MA Experiment ID: 20000169 Result: Up-regulated in Transcription
  misc_feature: MA Experiment 20000169 PARAMETER Experiment Name: At_100uM_ABA_P Parameter: Age (day) Value: 14
  misc_feature: MA Experiment 20000169 PARAMETER Experiment Name: At_100uM_ABA_P Parameter: Organism Value: A. thaliana
  misc_feature: MA Experiment 20000169 PARAMETER Experiment Name: At_100uM_ABA_P Parameter: Plant Line Value: WS
  misc_feature: MA Experiment 20000169 PARAMETER Experiment Name: At_100uM_ABA_P Parameter: Timepoint (hr) Value: 6
  misc_feature: MA Experiment 20000169 PARAMETER Experiment Name: At_100uM_ABA_P Parameter: Tissue Value: Aerial
  misc_feature: MA Experiment 20000169 PARAMETER Experiment Name: At_100uM_ABA_P Parameter: Treatment Value: 100uM ABA vs. No Treatment
  misc_feature: MA Experiment ID: 20000179 Result: Up-regulated in Transcription
  misc_feature: MA Experiment 20000179 PARAMETER Experiment Name: At_Germinating_Seeds_P Parameter: Age (hr) Value: 6 vs. 0
  misc_feature: MA Experiment 20000179 PARAMETER Experiment Name: At_Germinating_Seeds_P Parameter: Tissue Value: Germinating Seeds
  misc_feature: MA Experiment ID: 20000180 Result: Up-regulated in Transcription
  misc_feature: MA Experiment 20000180 PARAMETER Experiment Name: At_Germinating_Seeds_P Parameter: Age (hr) Value: 24 vs. 0
  misc_feature: MA Experiment 20000180 PARAMETER Experiment Name: At_Germinating_Seeds_P Parameter: Tissue Value: Germinating Seeds
  misc_feature: MA Experiment ID: 20000184 Result: Down-regulated in Transcription
  misc_feature: MA Experiment 20000184 PARAMETER Experiment Name: At_Shoots__P Parameter: Age (day) Value: 7
  misc_feature: MA Experiment 20000184 PARAMETER Experiment Name: At_Shoots__P Parameter: Tissue Value: Shoots vs. Whole Plant
  misc_feature: MA Experiment ID: 20000185 Result: Down-regulated in Transcription
  misc_feature: MA Experiment 20000185 PARAMETER Experiment Name: At_Roots__P Parameter: Age (day) Value: 7 vs. 21
  misc_feature: MA Experiment 20000185 PARAMETER Experiment Name: At_Roots__P Parameter: Organism Value: A. thaliana
  misc_feature: MA Experiment 20000185 PARAMETER Experiment Name: At_Roots__P Parameter: Tissue Value: Roots vs. Whole Plant
  misc_feature: MA Experiment ID: 20000234 Result: Down-regulated in Transcription
  misc_feature: MA Experiment 20000234 PARAMETER Experiment Name: At_Siliques_P Parameter: Age (day) Value: 21
  misc_feature: MA Experiment 20000234 PARAMETER Experiment Name: At_Siliques_P Parameter: Organism Value: A. thaliana
  misc_feature: MA Experiment 20000234 PARAMETER Experiment Name: At_Siliques_P Parameter: Plant Line Value: WS
  misc_feature: MA Experiment 20000234 PARAMETER Experiment Name: At_Siliques_P Parameter: Tissue Value: Less Than 5mm Siliques vs. Whole Plant
  misc_feature: MA Experiment ID: 20000235 Result: Down-regulated in Transcription
  misc_feature: MA Experiment 20000235 PARAMETER Experiment Name: At_Siliques_P Parameter: Age (day) Value: 21
  misc_feature: MA Experiment 20000235 PARAMETER Experiment Name: At_Siliques_P Parameter: Organism Value: A. thaliana
  misc_feature: MA Experiment 20000235 PARAMETER Experiment Name: At_Siliques_P Parameter: Plant Line Value: WS
  misc_feature: MA Experiment 20000235 PARAMETER Experiment Name: At_Siliques_P Parameter: Tissue Value: 5-10mm Siliques vs. Whole Plant
  misc_feature: MA Experiment ID: 20000264 Result: Up-regulated in Transcription
  misc_feature: MA Experiment 20000264 PARAMETER Experiment Name: At_Open_Flower_P Parameter: Age (day) Value: 21
  misc_feature: MA Experiment 20000264 PARAMETER Experiment Name: At_Open_Flower_P Parameter: Plant Line Value: WS
  misc_feature: MA Experiment 20000264 PARAMETER Experiment Name: At_Open_Flower_P Parameter: Tissue Value: Open Flower vs. Whole Plant
  misc_feature: MA Experiment ID: 20000265 Result: Down-regulated in Transcription
  misc_feature: MA Experiment 20000265 PARAMETER Experiment Name: At_Open_Flower_P Parameter: Age (day) Value: 21
  misc_feature: MA Experiment 20000265 PARAMETER Experiment Name: At_Open_Flower_P Parameter: Plant Line Value: WS
  misc_feature: MA Experiment 20000265 PARAMETER Experiment Name: At_Open_Flower_P Parameter: Tissue Value: Closed Flower vs. Whole Plant
  misc_feature: MA Experiment ID: 20000268 Result: Down-regulated in Transcription
  misc_feature: MA Experiment 20000268 PARAMETER Experiment Name: At_100mM_NaCl__P Parameter: Age (day) Value: 14
  misc_feature: MA Experiment 20000268 PARAMETER Experiment Name: At_100mM_NaCl__P Parameter: Organism Value: A. thaliana
  misc_feature: MA Experiment 20000268 PARAMETER Experiment Name: At_100mM_NaCl__P Parameter: Plant Line Value: WS
  misc_feature: MA Experiment 20000268 PARAMETER Experiment Name: At_100mM_NaCl__P Parameter: Timepoint (hr) Value: 6
  misc_feature: MA Experiment 20000268 PARAMETER Experiment Name: At_100mM_NaCl__P Parameter: Tissue Value: Whole Plant
  misc_feature: MA Experiment 20000268 PARAMETER Experiment Name: At_100mM_NaCl__P Parameter: Treatment Value: 100mM NaCl vs. No Treatment
  misc_feature: MA Experiment ID: 20000286 Result: Down-regulated in Transcription
  misc_feature: MA Experiment 20000286 PARAMETER Experiment Name: At_Open_Flower_P Parameter: Age (day) Value: 21
  misc_feature: MA Experiment 20000286 PARAMETER Experiment Name: At_Open_Flower_P Parameter: Plant Line Value: WS
  misc_feature: MA Experiment 20000286 PARAMETER Experiment Name: At_Open_Flower_P Parameter: Tissue Value: Half Open vs. Whole Plant
  misc_feature: MA Experiment ID: 20000436 Result: Down-regulated in Transcription
  misc_feature: MA Experiment 20000436 PARAMETER Experiment Name: At_Drought_P Parameter: Age (day) Value: 7
  misc_feature: MA Experiment 20000436 PARAMETER Experiment Name: At_Drought_P Parameter: Organism Value: A. thaliana
  misc_feature: MA Experiment 20000436 PARAMETER Experiment Name: At_Drought_P Parameter: Plant Line Value: WS
  misc_feature: MA Experiment 20000436 PARAMETER Experiment Name: At_Drought_P Parameter: Timepoint (hr) Value: 12
  misc_feature: MA Experiment 20000436 PARAMETER Experiment Name: At_Drought_P Parameter: Tissue Value: Whole Plant
  misc_feature: MA Experiment 20000436 PARAMETER Experiment Name: At_Drought_P Parameter: Treatment Value: Drought vs. No Drought
  misc_feature: MA Experiment ID: 20000437 Result: Down-regulated in Transcription
  misc_feature: MA Experiment 20000437 PARAMETER Experiment Name: At_Drought_P Parameter: Age (day) Value: 8
  misc_feature: MA Experiment 20000437 PARAMETER Experiment Name: At_Drought_P Parameter: Organism Value: A. thaliana
  misc_feature: MA Experiment 20000437 PARAMETER Experiment Name: At_Drought_P Parameter: Plant Line Value: WS
  misc_feature: MA Experiment 20000437 PARAMETER Experiment Name: At_Drought_P Parameter: Timepoint (hr) Value: 24
  misc_feature: MA Experiment 20000437 PARAMETER Experiment Name: At_Drought_P Parameter: Tissue Value: Whole Plant
  misc_feature: MA Experiment 20000437 PARAMETER Experiment Name: At_Drought_P Parameter: Treatment Value: Drought vs. No Drought
  misc_feature: MA Experiment ID: 20000438 Result: Down-regulated in Transcription
  misc_feature: MA Experiment 20000438 PARAMETER Experiment Name: At_Shoots__P Parameter: Age (day) Value: 14
  misc_feature: MA Experiment 20000438 PARAMETER Experiment Name: At_Shoots__P Parameter: Tissue Value: Shoots vs. Whole Plant
  misc_feature: MA Experiment ID: 20000441 Result: Up-regulated in Transcription
  misc_feature: MA Experiment 20000441 PARAMETER Experiment Name: At_1uM_BR-BRZ__P Parameter: Tissue Value: Shoot Apices
  misc_feature: MA Experiment 20000441 PARAMETER Experiment Name: At_1uM_BR-BRZ__P Parameter: Treatment Value: 1uM BR vs. No Treatment
  misc_feature: MA Experiment ID: 20000443 Result: Up-regulated in Transcription
  misc_feature: MA Experiment 20000443 PARAMETER Experiment Name: At_1uM_BR-BRZ__P Parameter: Tissue Value: Shoot Apices
  misc_feature: MA Experiment 20000443 PARAMETER Experiment Name: At_1uM_BR-BRZ__P Parameter: Treatment Value: 1uM BRZ vs. No Treatment
  misc_feature: MA Experiment ID: 20000453 Result: Up-regulated in Transcription
  misc_feature: MA Experiment 20000453 PARAMETER Experiment Name: At_100uM_ABA_P Parameter: Age (day) Value: 15
  misc_feature: MA Experiment 20000453 PARAMETER Experiment Name: At_100uM_ABA_P Parameter: Organism Value: A. thaliana
  misc_feature: MA Experiment 20000453 PARAMETER Experiment Name: At_100uM_ABA_P Parameter: Plant Line Value: WS
  misc_feature: MA Experiment 20000453 PARAMETER Experiment Name: At_100uM_ABA_P Parameter: Timepoint (hr) Value: 24
  misc_feature: MA Experiment 20000453 PARAMETER Experiment Name: At_100uM_ABA_P Parameter: Tissue Value: Aerial
  misc_feature: MA Experiment 20000453 PARAMETER Experiment Name: At_100uM_ABA_P Parameter: Treatment Value: 100uM ABA vs. No Treatment
  misc_feature: MA Experiment ID: 20000495 Result: Down-regulated in Transcription
  misc_feature: MA Experiment 20000495 PARAMETER Experiment Name: At_Guard_Cells_P Parameter: Harvest Date Value: 8/2/2002
  misc_feature: MA Experiment 20000495 PARAMETER Experiment Name: At_Guard_Cells_P Parameter: Organism Value: A. thaliana
  misc_feature: MA Experiment 20000495 PARAMETER Experiment Name: At_Guard_Cells_P Parameter: Tissue Value: Guard Cells vs. Leaves
  misc_feature: MA Experiment ID: 20000573 Result: Up-regulated in Transcription
  misc_feature: MA Experiment 20000573 PARAMETER Experiment Name: At_100uM_ABA_Mutants__P Parameter: Organism Value: A. thaliana
  misc_feature: MA Experiment 20000573 PARAMETER Experiment Name: At_100uM_ABA_Mutants__P Parameter: Plant Line Value: CS22 vs. Ler wt
  misc_feature: MA Experiment 20000573 PARAMETER Experiment Name: At_100uM_ABA_Mutants__P Parameter: Timepoint (hr) Value: N/A
  misc_feature: MA Experiment 20000573 PARAMETER Experiment Name: At_100uM_ABA_Mutants__P Parameter: Tissue Value: Whole Plant
  misc_feature: MA Experiment 20000573 PARAMETER Experiment Name: At_100uM_ABA_Mutants__P Parameter: Treatment Value: None
  misc_feature: MA Experiment ID: 20000574 Result: Up-regulated in Transcription
  misc_feature: MA Experiment 20000574 PARAMETER Experiment Name: At_100uM_ABA_Mutants__P Parameter: Organism Value: A. thaliana
  misc_feature: MA Experiment 20000574 PARAMETER Experiment Name: At_100uM_ABA_Mutants__P Parameter: Plant Line Value: CS23 vs. Ler wt
  misc_feature: MA Experiment 20000574 PARAMETER Experiment Name: At_100uM_ABA_Mutants__P Parameter: Timepoint (hr) Value: N/A
  misc_feature: MA Experiment 20000574 PARAMETER Experiment Name: At_100uM_ABA_Mutants__P Parameter: Tissue Value: Whole Plant
  misc_feature: MA Experiment 20000574 PARAMETER Experiment Name: At_100uM_ABA_Mutants__P Parameter: Treatment Value: None
  misc_feature: MA Experiment ID: 20000794 Result: Up-regulated in Transcription
  misc_feature: MA Experiment 20000794 PARAMETER Experiment Name: At_Petals_P Parameter: Age (day) Value: 23-25 days
  misc_feature: MA Experiment 20000794 PARAMETER Experiment Name: At_Petals_P Parameter: Plant Line Value: WS
  misc_feature: MA Experiment 20000794 PARAMETER Experiment Name: At_Petals_P Parameter: Tissue Value: Petals vs. Whole plant
  misc_feature: MA Experiment ID: 20001248 Result: Up-regulated in Transcription
  misc_feature: MA Experiment 20001248 PARAMETER Experiment Name: At_Far-red-induction_P Parameter: Age (day) Value: 7
  misc_feature: MA Experiment 20001248 PARAMETER Experiment Name: At_Far-red-induction_P Parameter: Light Value: Far-red vs. White
  misc_feature: MA Experiment 20001248 PARAMETER Experiment Name: At_Far-red-induction_P Parameter: Organism Value: A. thaliana
  misc_feature: MA Experiment 20001248 PARAMETER Experiment Name: At_Far-red-induction_P Parameter: Plant Line Value: Columbia
  misc_feature: MA Experiment 20001248 PARAMETER Experiment Name: At_Far-red-induction_P Parameter: Timepoint (hr) Value: 4
  misc_feature: MA Experiment 20001248 PARAMETER Experiment Name: At_Far-red-induction_P Parameter: Tissue Value: Whole Plant
  misc_feature: MA Experiment ID: 20001450 Result: Up-regulated in Transcription
  misc_feature: MA Experiment 20001450 PARAMETER Experiment Name: At_Far-red-induction_P Parameter: Age (day) Value: 7
  misc_feature: MA Experiment 20001450 PARAMETER Experiment Name: At_Far-red-induction_P Parameter: Light Value: Far-red vs. White
  misc_feature: MA Experiment 20001450 PARAMETER Experiment Name: At_Far-red-induction_P Parameter: Organism Value: A. thaliana
  misc_feature: MA Experiment 20001450 PARAMETER Experiment Name: At_Far-red-induction_P Parameter: Plant Line Value: Columbia
  misc_feature: MA Experiment 20001450 PARAMETER Experiment Name: At_Far-red-induction_P Parameter: Timepoint (hr) Value: 8
  misc_feature: MA Experiment 20001450 PARAMETER Experiment Name: At_Far-red-induction_P Parameter: Tissue Value: Whole Plant
  misc_feature: MA Experiment ID: 20001451 Result: Up-regulated in Transcription
  misc_feature: MA Experiment 20001451 PARAMETER Experiment Name: At_Far-red-induction_P Parameter: Age (day) Value: 7
  misc_feature: MA Experiment 20001451 PARAMETER Experiment Name: At_Far-red-induction_P Parameter: Light Value: Far-red vs. White
  misc_feature: MA Experiment 20001451 PARAMETER Experiment Name: At_Far-red-induction_P Parameter: Organism Value: A. thaliana
  misc_feature: MA Experiment 20001451 PARAMETER Experiment Name: At_Far-red-induction_P Parameter: Plant Line Value: Columbia
  misc_feature: MA Experiment 20001451 PARAMETER Experiment Name: At_Far-red-induction_P Parameter: Timepoint (hr) Value: 24
  misc_feature: MA Experiment 20001451 PARAMETER Experiment Name: At_Far-red-induction_P Parameter: Tissue Value: Whole Plant
  misc_feature: MA Experiment ID: 20001554 Result: Down-regulated in Transcription
  misc_feature: MA Experiment 20001554 PARAMETER Experiment Name: At_Drought_Soil_Dry_P Parameter: Age (day) Value: 21
  misc_feature: MA Experiment 20001554 PARAMETER Experiment Name: At_Drought_Soil_Dry_P Parameter: Organism Value: A. thaliana
  misc_feature: MA Experiment 20001554 PARAMETER Experiment Name: At_Drought_Soil_Dry_P Parameter: Plant Line Value: WS
  misc_feature: MA Experiment 20001554 PARAMETER Experiment Name: At_Drought_Soil_Dry_P Parameter: Post Timepoint (hr) Value: None
  misc_feature: MA Experiment 20001554 PARAMETER Experiment Name: At_Drought_Soil_Dry_P Parameter: Post-Treatment Value: None
  misc_feature: MA Experiment 20001554 PARAMETER Experiment Name: At_Drought_Soil_Dry_P Parameter: Timepoint (day) Value: 7
  misc_feature: MA Experiment 20001554 PARAMETER Experiment Name: At_Drought_Soil_Dry_P Parameter: Treatment Value: Drought vs. No Drought
  misc_feature: MA Experiment ID: 20001555 Result: Down-regulated in Transcription
  misc_feature: MA Experiment 20001555 PARAMETER Experiment Name: At_Drought_Soil_Dry_P Parameter: Age (day) Value: 24
  misc_feature: MA Experiment 20001555 PARAMETER Experiment Name: At_Drought_Soil_Dry_P Parameter: Organism Value: A. thaliana
  misc_feature: MA Experiment 20001555 PARAMETER Experiment Name: At_Drought_Soil_Dry_P Parameter: Plant Line Value: WS
  misc_feature: MA Experiment 20001555 PARAMETER Experiment Name: At_Drought_Soil_Dry_P Parameter: Post Timepoint (hr) Value: None
  misc_feature: MA Experiment 20001555 PARAMETER Experiment Name: At_Drought_Soil_Dry_P Parameter: Post-Treatment Value: None
  misc_feature: MA Experiment 20001555 PARAMETER Experiment Name: At_Drought_Soil_Dry_P Parameter: Timepoint (day) Value: 10
  misc_feature: MA Experiment 20001555 PARAMETER Experiment Name: At_Drought_Soil_Dry_P Parameter: Treatment Value: Drought vs. No Drought
  misc_feature: MA Experiment ID: 20001556 Result: Down-regulated in Transcription
  misc_feature: MA Experiment 20001556 PARAMETER Experiment Name: At_Drought_Soil_Dry_P Parameter: Age (day) Value: 26
  misc_feature: MA Experiment 20001556 PARAMETER Experiment Name: At_Drought_Soil_Dry_P Parameter: Organism Value: A. thaliana
  misc_feature: MA Experiment 20001556 PARAMETER Experiment Name: At_Drought_Soil_Dry_P Parameter: Plant Line Value: WS
  misc_feature: MA Experiment 20001556 PARAMETER Experiment Name: At_Drought_Soil_Dry_P Parameter: Post Timepoint (hr) Value: None
  misc_feature: MA Experiment 20001556 PARAMETER Experiment Name: At_Drought_Soil_Dry_P Parameter: Post-Treatment Value: None
  misc_feature: MA Experiment 20001556 PARAMETER Experiment Name: At_Drought_Soil_Dry_P Parameter: Timepoint (day) Value: 12
  misc_feature: MA Experiment 20001556 PARAMETER Experiment Name: At_Drought_Soil_Dry_P Parameter: Treatment Value: Drought vs. No Drought
  misc_feature: MA Experiment ID: 20001557 Result: Down-regulated in Transcription
  misc_feature: MA Experiment 20001557 PARAMETER Experiment Name: At_Drought_Soil_Dry_P Parameter: Age (day) Value: 27
  misc_feature: MA Experiment 20001557 PARAMETER Experiment Name: At_Drought_Soil_Dry_P Parameter: Organism Value: A. thaliana
  misc_feature: MA Experiment 20001557 PARAMETER Experiment Name: At_Drought_Soil_Dry_P Parameter: Plant Line Value: WS
  misc_feature: MA Experiment 20001557 PARAMETER Experiment Name: At_Drought_Soil_Dry_P Parameter: Post Timepoint (hr) Value: 3
  misc_feature: MA Experiment 20001557 PARAMETER Experiment Name: At_Drought_Soil_Dry_P Parameter: Post-Treatment Value: Re-Water vs. No Drought
  misc_feature: MA Experiment 20001557 PARAMETER Experiment Name: At_Drought_Soil_Dry_P Parameter: Timepoint (day) Value: 13
  misc_feature: MA Experiment 20001557 PARAMETER Experiment Name: At_Drought_Soil_Dry_P Parameter: Treatment Value: Drought vs. No Drought
  misc_feature: MA Experiment ID: 20001559 Result: Down-regulated in Transcription
  misc_feature: MA Experiment 20001559 PARAMETER Experiment Name: At_Drought_Soil_Dry_P Parameter: Age (day) Value: 28
  misc_feature: MA Experiment 20001559 PARAMETER Experiment Name: At_Drought_Soil_Dry_P Parameter: Organism Value: A. thaliana
  misc_feature: MA Experiment 20001559 PARAMETER Experiment Name: At_Drought_Soil_Dry_P Parameter: Plant Line Value: WS
  misc_feature: MA Experiment 20001559 PARAMETER Experiment Name: At_Drought_Soil_Dry_P Parameter: Post Timepoint (hr) Value: 29
  misc_feature: MA Experiment 20001559 PARAMETER Experiment Name: At_Drought_Soil_Dry_P Parameter: Post-Treatment Value: Re-Water vs. No Drought
  misc_feature: MA Experiment 20001559 PARAMETER Experiment Name: At_Drought_Soil_Dry_P Parameter: Timepoint (day) Value: 14
  misc_feature: MA Experiment 20001559 PARAMETER Experiment Name: At_Drought_Soil_Dry_P Parameter: Treatment Value: Drought vs. No Drought
  misc_feature: MA Experiment ID: 20001904 Result: Down-regulated in Transcription
  misc_feature: MA Experiment 20001904 PARAMETER Experiment Name: At_Drought_Reproduction_P Parameter: Age (day) Value: 37
  misc_feature: MA Experiment 20001904 PARAMETER Experiment Name: At_Drought_Reproduction_P Parameter: Organism Value: A. thaliana
  misc_feature: MA Experiment 20001904 PARAMETER Experiment Name: At_Drought_Reproduction_P Parameter: Plant Line Value: WS
  misc_feature: MA Experiment 20001904 PARAMETER Experiment Name: At_Drought_Reproduction_P Parameter: Timepoint (day) Value: 7
  misc_feature: MA Experiment 20001904 PARAMETER Experiment Name: At_Drought_Reproduction_P Parameter: Tissue Value: Rosettes
  misc_feature: MA Experiment 20001904 PARAMETER Experiment Name: At_Drought_Reproduction_P Parameter: Treatment Value: Drought vs. No Drought
  misc_feature: MA Experiment ID: 20001905 Result: Down-regulated in Transcription
  misc_feature: MA Experiment 20001905 PARAMETER Experiment Name: At_Drought_Reproduction_P Parameter: Age (day) Value: 40
  misc_feature: MA Experiment 20001905 PARAMETER Experiment Name: At_Drought_Reproduction_P Parameter: Organism Value: A. thaliana
  misc_feature: MA Experiment 20001905 PARAMETER Experiment Name: At_Drought_Reproduction_P Parameter: Plant Line Value: WS
  misc_feature: MA Experiment 20001905 PARAMETER Experiment Name: At_Drought_Reproduction_P Parameter: Timepoint (day) Value: 10
  misc_feature: MA Experiment 20001905 PARAMETER Experiment Name: At_Drought_Reproduction_P Parameter: Tissue Value: Rosettes
  misc_feature: MA Experiment 20001905 PARAMETER Experiment Name: At_Drought_Reproduction_P Parameter: Treatment Value: Drought vs. No Drought
  misc_feature: MA Experiment ID: 20001906 Result: Down-regulated in Transcription
  misc_feature: MA Experiment 20001906 PARAMETER Experiment Name: At_Drought_Reproduction_P Parameter: Age (day) Value: 35
  misc_feature: MA Experiment 20001906 PARAMETER Experiment Name: At_Drought_Reproduction_P Parameter: Organism Value: A. thaliana
  misc_feature: MA Experiment 20001906 PARAMETER Experiment Name: At_Drought_Reproduction_P Parameter: Plant Line Value: WS
  misc_feature: MA Experiment 20001906 PARAMETER Experiment Name: At_Drought_Reproduction_P Parameter: Timepoint (day) Value: 5
  misc_feature: MA Experiment 20001906 PARAMETER Experiment Name: At_Drought_Reproduction_P Parameter: Tissue Value: Siliques
  misc_feature: MA Experiment 20001906 PARAMETER Experiment Name: At_Drought_Reproduction_P Parameter: Treatment Value: Drought vs. No Drought
  misc_feature: MA Experiment ID: 20001907 Result: Down-regulated in Transcription
  misc_feature: MA Experiment 20001907 PARAMETER Experiment Name: At_Drought_Reproduction_P Parameter: Age (day) Value: 37
  misc_feature: MA Experiment 20001907 PARAMETER Experiment Name: At_Drought_Reproduction_P Parameter: Organism Value: A. thaliana
  misc_feature: MA Experiment 20001907 PARAMETER Experiment Name: At_Drought_Reproduction_P Parameter: Plant Line Value: WS
  misc_feature: MA Experiment 20001907 PARAMETER Experiment Name: At_Drought_Reproduction_P Parameter: Timepoint (day) Value: 7
  misc_feature: MA Experiment 20001907 PARAMETER Experiment Name: At_Drought_Reproduction_P Parameter: Tissue Value: Siliques
  misc_feature: MA Experiment 20001907 PARAMETER Experiment Name: At_Drought_Reproduction_P Parameter: Treatment Value: Drought vs. No Drought
  misc_feature: MA Experiment ID: 20001908 Result: Down-regulated in Transcription
  misc_feature: MA Experiment 20001908 PARAMETER Experiment Name: At_Drought_Reproduction_P Parameter: Age (day) Value: 40
  misc_feature: MA Experiment 20001908 PARAMETER Experiment Name: At_Drought_Reproduction_P Parameter: Organism Value: A. thaliana
  misc_feature: MA Experiment 20001908 PARAMETER Experiment Name: At_Drought_Reproduction_P Parameter: Plant Line Value: WS
  misc_feature: MA Experiment 20001908 PARAMETER Experiment Name: At_Drought_Reproduction_P Parameter: Timepoint (day) Value: 10
  misc_feature: MA Experiment 20001908 PARAMETER Experiment Name: At_Drought_Reproduction_P Parameter: Tissue Value: Siliques
  misc_feature: MA Experiment 20001908 PARAMETER Experiment Name: At_Drought_Reproduction_P Parameter: Treatment Value: Drought vs. No Drought
  misc_feature: MA Experiment ID: 20001910 Result: Down-regulated in Transcription
  misc_feature: MA Experiment 20001910 PARAMETER Experiment Name: At_Drought_Reproduction_P Parameter: Age (day) Value: 37
  misc_feature: MA Experiment 20001910 PARAMETER Experiment Name: At_Drought_Reproduction_P Parameter: Organism Value: A. thaliana
  misc_feature: MA Experiment 20001910 PARAMETER Experiment Name: At_Drought_Reproduction_P Parameter: Plant Line Value: WS
  misc_feature: MA Experiment 20001910 PARAMETER Experiment Name: At_Drought_Reproduction_P Parameter: Timepoint (day) Value: 7
  misc_feature: MA Experiment 20001910 PARAMETER Experiment Name: At_Drought_Reproduction_P Parameter: Tissue Value: Flowers
  misc_feature: MA Experiment 20001910 PARAMETER Experiment Name: At_Drought_Reproduction_P Parameter: Treatment Value: Drought vs. No Drought
  misc_feature: MA Experiment ID: 20001911 Result: Down-regulated in Transcription
  misc_feature: MA Experiment 20001911 PARAMETER Experiment Name: At_Drought_Reproduction_P Parameter: Age (day) Value: 40
  misc_feature: MA Experiment 20001911 PARAMETER Experiment Name: At_Drought_Reproduction_P Parameter: Organism Value: A. thaliana
  misc_feature: MA Experiment 20001911 PARAMETER Experiment Name: At_Drought_Reproduction_P Parameter: Plant Line Value: WS
  misc_feature: MA Experiment 20001911 PARAMETER Experiment Name: At_Drought_Reproduction_P Parameter: Timepoint (day) Value: 10
  misc_feature: MA Experiment 20001911 PARAMETER Experiment Name: At_Drought_Reproduction_P Parameter: Tissue Value: Flowers
  misc_feature: MA Experiment 20001911 PARAMETER Experiment Name: At_Drought_Reproduction_P Parameter: Treatment Value: Drought vs. No Drought
aaaaatctctcccccttcttctctcttcctcacattcctcaccaaaccctctccaaaacacacccacacgtacgcacacacacaaagacaatgtctcctttcaaaatattcttcttcacgactcttctcgtggcggcgttttcagtgtcggctgctgatttcaacactgacgtcaacgtagcttggggaaatggccgtgggaagatactcaacaacggccagcttcttactctctccttagacaaatcctctggttccggttttcaatccaaaacagagtatttgtttggaaagattgatatgcagattaagcttgttcctggtaactctgcaggaacagtcacaactttttacctaaaatccgaaggatccacttgggatgagattgattttgagttcttgggtaatatgagtggagatccttatactttacacactaatgtttacactcaaggtaaaggtgacaaagagcaacaattccatctctggttcgacccaaccgccaatttccacacttactcaatcctctggaaccctcaaagaatcatattgaccgtcgatgacacacccattagagagtttaaaaactatgagtctctcggtgtcttgtttccaaagaacaagccgatgaggatgtacgcgagtttatggaacgcagacgattgggcaacaagaggcggtcttgttaaaactgattggtctaaagctccattcatggcttcttacagaaacattaagattgactcgaaaccaaactccaattggtacactcaagaaatggattcaacaagccaagctagactcaaatgggttcagaagaattacatgatctacaattattgtactgaccataggaggtttccacagggagctcctaaggaatgcacaacaagctcatagaatctcaaattatattctatttatttatctacacttcctctctttcttttatgtgaaaattgtgaatgctctgtttctagcttgtctattatgtccgagaatttctttttctgtttttgattcttttcgttgtatatctttgtccaataaaggaaatgatgtgtctttactcttatagatatgtataaaaagatgtccctgttttatttgttaaaaaaaattgtttatgataatgatagttctttctc

SEQ ID NO: 30789 - protein, 299 aa, Arabidopsis thaliana
  peptide (1)..(299): Ceres Seq. ID no. 13491549
  misc_feature (54)..(235): Pfam Name: Glycosyl hydrolases family 16 Pfam Description: Glycosyl hydrolases family 16
  misc_feature (255)..(295): Homolog of NCBI NO: 29500893 NR Description: putative xyloglucan endotransglycosylase [Cucumis
  misc_feature (32)..(244): Homolog of NCBI NO: 29500893 NR Description: putative xyloglucan endotransglycosylase [Cucumis
  misc_feature (39)..(295): Homolog of NCBI NO: 29500891 NR Description: putative xyloglucan endotransglycosylase [Cucumis
  misc_feature (233)..(295): Homolog of NCBI NO: 15242781 NR Description: xyloglucan endotransglycosylase (TCH4)
  misc_feature (39)..(254): Homolog of NCBI NO: 15242781 NR Description: xyloglucan endotransglycosylase (TCH4)
  misc_feature (31)..(299): Homolog of NCBI NO: 21553999 NR Description: xyloglucan endo-1,4-beta-D-glucanase precursor
  misc_feature (31)..(299): Homolog of NCBI NO: 15234678 NR Description: xyloglucan endotransglycosylase (meri5B)
KNLSPFFSLPHIPHQTLSKTHPHVRTHTKTMSPFKIFFFTTLLVAAFSVSAADFNTDVNVAWGNGRGKILNNGQLLTLSLDKSSGSGFQSKTEYLFGKIDMQIKLVPGNSAGTVTTFYLKSEGSTWDEIDFEFLGNMSGDPYTLHTNVYTQGKGDKEQQFHLWFDPTANFHTYSILWNPQRIILTVDDTPIREFKNYESLGVLFPKNKPMRMYASLWNADDWATRGGLVKTDWSKAPFMASYRNIKIDSKPNSNWYTQEMDSTSQARLKWVQKNYMIYNYCTDHRRFPQGAPKECTTSS

SEQ ID NO: 30790 - protein, 269 aa, Arabidopsis thaliana; identical to SEQ ID NO: 21034
  peptide (1)..(269): Ceres Seq. ID no. 13491550
  misc_feature (24)..(205): Pfam Name: Glycosyl hydrolases family 16 Pfam Description: Glycosyl hydrolases family 16
  misc_feature (225)..(265): Homolog of NCBI NO: 29500893 NR Description: putative xyloglucan endotransglycosylase [Cucumis
  misc_feature (2)..(214): Homolog of NCBI NO: 29500893 NR Description: putative xyloglucan endotransglycosylase [Cucumis
  misc_feature (9)..(265): Homolog of NCBI NO: 29500891 NR Description: putative xyloglucan endotransglycosylase [Cucumis
  misc_feature (203)..(265): Homolog of NCBI NO: 15242781 NR Description: xyloglucan endotransglycosylase (TCH4)
  misc_feature (9)..(224): Homolog of NCBI NO: 15242781 NR Description: xyloglucan endotransglycosylase (TCH4)
  misc_feature (1)..(269): Homolog of NCBI NO: 21553999 NR Description: xyloglucan endo-1,4-beta-D-glucanase precursor
  misc_feature (1)..(269): Homolog of NCBI NO: 15234678 NR Description: xyloglucan endotransglycosylase (meri5B)

SEQ ID NO: 30791 - protein, 199 aa, Arabidopsis thaliana; identical to SEQ ID NO: 21035
  peptide (1)..(199): Ceres Seq. ID no. 13491551
  misc_feature (1)..(135): Pfam Name: Glycosyl hydrolases family 16 Pfam Description: Glycosyl hydrolases family 16
  misc_feature (155)..(195): Homolog of NCBI NO: 29500893 NR Description: putative xyloglucan endotransglycosylase [Cucumis
  misc_feature (1)..(144): Homolog of NCBI NO: 29500893 NR Description: putative xyloglucan endotransglycosylase [Cucumis
  misc_feature (1)..(195): Homolog of NCBI NO: 29500891 NR Description: putative xyloglucan endotransglycosylase [Cucumis
  misc_feature (133)..(195): Homolog of NCBI NO: 15242781 NR Description: xyloglucan endotransglycosylase (TCH4)
  misc_feature (1)..(154): Homolog of NCBI NO: 15242781 NR Description: xyloglucan endotransglycosylase (TCH4)
  misc_feature (1)..(199): Homolog of NCBI NO: 21553999 NR Description: xyloglucan endo-1,4-beta-D-glucanase precursor
  misc_feature (1)..(199): Homolog of NCBI NO: 15234678 NR Description: xyloglucan endotransglycosylase (meri5B)

SEQ ID NO: 30792 - DNA, 1458 bp, Arabidopsis thaliana
  misc_feature (1)..(1458): Ceres Seq. ID no. 13487675
  misc_feature: MA Experiment ID: 108462 Result: Up-regulated in Transcription
  misc_feature: MA Experiment 108462 PARAMETER Experiment Name: At_Germinating_Seeds_cDNA_P Parameter: Age (day) Value: 2 vs. 0
  misc_feature: MA Experiment 108462 PARAMETER Experiment Name: At_Germinating_Seeds_cDNA_P Parameter: Tissue Value: Germinating Seeds
  misc_feature: MA Experiment ID: 108463 Result: Up-regulated in Transcription
  misc_feature: MA Experiment 108463 PARAMETER Experiment Name: At_Germinating_Seeds_cDNA_P Parameter: Age (day) Value: 3 vs. 0
  misc_feature: MA Experiment 108463 PARAMETER Experiment Name: At_Germinating_Seeds_cDNA_P Parameter: Tissue Value: Germinating Seeds
  misc_feature: MA Experiment ID: 108464 Result: Up-regulated in Transcription
  misc_feature: MA Experiment 108464 PARAMETER Experiment Name: At_Germinating_Seeds_cDNA_P Parameter: Age (day) Value: 4 vs. 0
  misc_feature: MA Experiment 108464 PARAMETER Experiment Name: At_Germinating_Seeds_cDNA_P Parameter: Tissue Value: Germinating Seeds
  misc_feature: MA Experiment ID: 108577 Result: Down-regulated in Transcription
  misc_feature: MA Experiment 108577 PARAMETER Experiment Name: At_42deg_Heat_cDNA_P Parameter: Temperature (deg C) Value: 42 vs. 22
  misc_feature: MA Experiment 108577 PARAMETER Experiment Name: At_42deg_Heat_cDNA_P Parameter: Timepoint (hr) Value: 6
  misc_feature: MA Experiment 108577 PARAMETER Experiment Name: At_42deg_Heat_cDNA_P Parameter: Tissue Value: Aerial
  misc_feature: MA Experiment ID: 108595 Result: Up-regulated in Transcription
  misc_feature: MA Experiment 108595 PARAMETER Experiment Name: At_Ler-pi_Ovule_cDNA_P Parameter: Plant Line Value: null
  misc_feature: MA Experiment ID: 108667 Result: Up-regulated in Transcription
  misc_feature: MA Experiment 108667 PARAMETER Experiment Name: At_2mM_SA_cDNA_P Parameter: Plant Line Value: WS
  misc_feature: MA Experiment 108667 PARAMETER Experiment Name: At_2mM_SA_cDNA_P Parameter: Timepoint (hr) Value: 1
  misc_feature: MA Experiment 108667 PARAMETER Experiment Name: At_2mM_SA_cDNA_P Parameter: Treatment Value: 2mM SA vs. No Treatment
  misc_feature: MA Experiment ID: 108668 Result: Up-regulated in Transcription
  misc_feature: MA Experiment 108668 PARAMETER Experiment Name: At_2mM_SA_cDNA_P Parameter: Plant Line Value: WS
  misc_feature: MA Experiment 108668 PARAMETER Experiment Name: At_2mM_SA_cDNA_P Parameter: Timepoint (hr) Value: 6
  misc_feature: MA Experiment 108668 PARAMETER Experiment Name: At_2mM_SA_cDNA_P Parameter: Treatment Value: 2mM SA vs. No Treatment
  misc_feature: MA Experiment ID: 20000224 Result: Down-regulated in Transcription
  misc_feature: MA Experiment ID: 20000227 Result: Down-regulated in Transcription
  misc_feature: MA Experiment 20000227 PARAMETER Experiment Name: At_Root-Tips-vs-Tops_P Parameter: Tissue Value: Root Tips vs. Root Tops
  misc_feature: MA Experiment ID: 20000234 Result: Down-regulated in Transcription
  misc_feature: MA Experiment 20000234 PARAMETER Experiment Name: At_Siliques_P Parameter: Age (day) Value: 21
  misc_feature: MA Experiment 20000234 PARAMETER Experiment Name: At_Siliques_P Parameter: Organism Value: A. thaliana
  misc_feature: MA Experiment 20000234 PARAMETER Experiment Name: At_Siliques_P Parameter: Plant Line Value: WS
  misc_feature: MA Experiment 20000234 PARAMETER Experiment Name: At_Siliques_P Parameter: Tissue Value: Less Than 5mm Siliques vs. Whole Plant
  misc_feature: MA Experiment ID: 20000235 Result: Down-regulated in Transcription
  misc_feature: MA Experiment 20000235 PARAMETER Experiment Name: At_Siliques_P Parameter: Age (day) Value: 21
  misc_feature: MA Experiment 20000235 PARAMETER Experiment Name: At_Siliques_P Parameter: Organism Value: A. thaliana
  misc_feature: MA Experiment 20000235 PARAMETER Experiment Name: At_Siliques_P Parameter: Plant Line Value: WS
  misc_feature: MA Experiment 20000235 PARAMETER Experiment Name: At_Siliques_P Parameter: Tissue Value: 5-10mm Siliques vs. Whole Plant
  misc_feature: MA Experiment ID: 20000264 Result: Down-regulated in Transcription
  misc_feature: MA Experiment 20000264 PARAMETER Experiment Name: At_Open_Flower_P Parameter: Age (day) Value: 21
  misc_feature: MA Experiment 20000264 PARAMETER Experiment Name: At_Open_Flower_P Parameter: Plant Line Value: WS
  misc_feature: MA Experiment 20000264 PARAMETER Experiment Name: At_Open_Flower_P Parameter: Tissue Value: Open Flower vs. Whole Plant
  misc_feature: MA Experiment ID: 20000265 Result: Down-regulated in Transcription
  misc_feature: MA Experiment 20000265 PARAMETER Experiment Name: At_Open_Flower_P Parameter: Age (day) Value: 21
  misc_feature: MA Experiment 20000265 PARAMETER Experiment Name: At_Open_Flower_P Parameter: Plant Line Value: WS
  misc_feature: MA Experiment 20000265 PARAMETER Experiment Name: At_Open_Flower_P Parameter: Tissue Value: Closed Flower vs. Whole Plant
  misc_feature: MA Experiment ID: 20000286 Result: Down-regulated in Transcription
  misc_feature: MA Experiment 20000286 PARAMETER Experiment Name: At_Open_Flower_P Parameter: Age (day) Value: 21
  misc_feature: MA Experiment 20000286 PARAMETER Experiment Name: At_Open_Flower_P Parameter: Plant Line Value: WS
  misc_feature: MA Experiment 20000286 PARAMETER Experiment Name: At_Open_Flower_P Parameter: Tissue Value: Half Open vs. Whole Plant
  misc_feature: MA Experiment ID: 20000438 Result: Down-regulated in Transcription
  misc_feature: MA Experiment 20000438 PARAMETER Experiment Name: At_Shoots__P Parameter: Age (day) Value: 14
  misc_feature: MA Experiment 20000438 PARAMETER Experiment Name: At_Shoots__P Parameter: Tissue Value: Shoots vs. Whole Plant
  misc_feature: MA Experiment ID: 20000460 Result: Up-regulated in Transcription
  misc_feature: MA Experiment 20000460 PARAMETER Experiment Name: At_10percent_PEG_P Parameter: Age (day) Value: 12
  misc_feature: MA Experiment 20000460 PARAMETER Experiment Name: At_10percent_PEG_P Parameter: Organism Value: A. thaliana
  misc_feature: MA Experiment 20000460 PARAMETER Experiment Name: At_10percent_PEG_P Parameter: Plant Line Value: WS
  misc_feature: MA Experiment 20000460 PARAMETER Experiment Name: At_10percent_PEG_P Parameter: Timepoint (day) Value: 12
  misc_feature: MA Experiment 20000460 PARAMETER Experiment Name: At_10percent_PEG_P Parameter: Tissue Value: Whole Plant
  misc_feature: MA Experiment 20000460 PARAMETER Experiment Name: At_10percent_PEG_P Parameter: Treatment Value: 10percent PEG vs. No Treatment
  misc_feature: MA Experiment ID: 20000527 Result: Up-regulated in Transcription
  misc_feature: MA Experiment 20000527 PARAMETER Experiment Name: At_10percent_PEG_P Parameter: Age (day) Value: 20
  misc_feature: MA Experiment 20000527 PARAMETER Experiment Name: At_10percent_PEG_P Parameter: Organism Value: A. thaliana
  misc_feature: MA Experiment 20000527 PARAMETER Experiment Name: At_10percent_PEG_P Parameter: Plant Line Value: WS
  misc_feature: MA Experiment 20000527 PARAMETER Experiment Name: At_10percent_PEG_P Parameter: Timepoint (day) Value: 20
  misc_feature: MA Experiment 20000527 PARAMETER Experiment Name: At_10percent_PEG_P Parameter: Tissue Value: Whole Plant
  misc_feature: MA Experiment 20000527 PARAMETER Experiment Name: At_10percent_PEG_P Parameter: Treatment Value: 10percent PEG vs. No Treatment
  misc_feature: MA Experiment ID: 20000794 Result: Down-regulated in Transcription
  misc_feature: MA Experiment 20000794 PARAMETER Experiment Name: At_Petals_P Parameter: Age (day) Value: 23-25 days
  misc_feature: MA Experiment 20000794 PARAMETER Experiment Name: At_Petals_P Parameter: Plant Line Value: WS
  misc_feature: MA Experiment 20000794 PARAMETER Experiment Name: At_Petals_P Parameter: Tissue Value: Petals vs. Whole plant
  misc_feature: MA Experiment ID: 20001247 Result: Up-regulated in Transcription
  misc_feature: MA Experiment 20001247 PARAMETER Experiment Name: At_Far-red-induction_P Parameter: Age (day) Value: 7
  misc_feature: MA Experiment 20001247 PARAMETER Experiment Name: At_Far-red-induction_P Parameter: Light Value: Far-red vs. White
  misc_feature: MA Experiment 20001247 PARAMETER Experiment Name: At_Far-red-induction_P Parameter: Organism Value: A. thaliana
  misc_feature: MA Experiment 20001247 PARAMETER Experiment Name: At_Far-red-induction_P Parameter: Plant Line Value: Columbia
  misc_feature: MA Experiment 20001247 PARAMETER Experiment Name: At_Far-red-induction_P Parameter: Timepoint (hr) Value: 1
  misc_feature: MA Experiment 20001247 PARAMETER Experiment Name: At_Far-red-induction_P Parameter: Tissue Value: Whole Plant
  misc_feature: MA Experiment ID: 20001905 Result: Up-regulated in Transcription
  misc_feature: MA Experiment 20001905 PARAMETER Experiment Name: At_Drought_Reproduction_P Parameter: Age (day) Value: 40
  misc_feature: MA Experiment 20001905 PARAMETER Experiment Name: At_Drought_Reproduction_P Parameter: Organism Value: A. thaliana
  misc_feature: MA Experiment 20001905 PARAMETER Experiment Name: At_Drought_Reproduction_P Parameter: Plant Line Value: WS
  misc_feature: MA Experiment 20001905 PARAMETER Experiment Name: At_Drought_Reproduction_P Parameter: Timepoint (day) Value: 10
  misc_feature: MA Experiment 20001905 PARAMETER Experiment Name: At_Drought_Reproduction_P Parameter: Tissue Value: Rosettes
  misc_feature: MA Experiment 20001905 PARAMETER Experiment Name: At_Drought_Reproduction_P Parameter: Treatment Value: Drought vs. No Drought
ttctatcaaaccgtcaagttgggaaacaaaacaaaactcgcaagtttaacaacgcgtcttctacctcctcctcatcggactatttatctatagtcttcgttagatcaattcctctgttttactcctaagtttcgagatccacatttctctttaacctcatctcatctcttagtcgagatcttcactttctgatgacaatagggtcgtttttctcttctctcttattctggcgcaattctcaggaccaggaggcgcagagagggaggatgcaggagatagatcttagtgttcacactataaagtcccatggaggaagagtcgcttctaaacacaagcacgattggatcatactcgtcatcttgattgccatcgagataggcttgaacctcatctctcctttctaccgctacgtgggaaaagacatgatgactgacctcaagtaccctttcaaggacaacaccgtacctatctggtctgtccctgtgtacgctgtgcttcttcccatcatagtgttcgtctgcttctacctgaagaggacatgtgtgtacgatctgcaccacagcatcctcgggctgctcttcgccgtcttgataactggtgtcatcactgactccatcaaggtagccaccggacgccctcgtcctaacttctactggcgctgcttccccgacggcaaagagctgtatgatgcgttgggaggtgtggtatgccacggcaaggcagctgaggtcaaggaaggccacaagagcttcccgagcggacacacttcctggtcctttgcggggcttacattcctttccctttacctctctggcaaaatcaaggccttcaacaatgaaggacatgtggcgaaactctgcctcgtgatcttccctctgcttgccgcttgtcttgtggggatatctcgtgtggatgactactggcaccactggcaagatgtcttcgcaggagctctcattggcacccttgtagccgccttctgctaccgtcagttctaccccaacccttaccacgaagaaggatggggtccctacgcctatttcaaggcagctcaagaacgaggagtccctgtgacctcctcccaaaacggagatgccttgagggctatgtctctgcagatggattcaacatctctcgaaaacatggaatctggcacttccaccgctcccagatgatcctcctctcttattatttgattcattatttggtttttcattttgatttggccgtcgtcgtgagattgtgaatggtgtagctacatactgtatgtgtattcaaaactctacttgtaccattacatttttgtaaatccactcttcatgaaattgacgtttttctggtgtccgagaggcttgggtcgctcgaataatctcgtccaatagactaatacggctctagtgaacacggtatttacatgtttgtgatctaaactgaaatcagttatttcttaattcgtag

SEQ ID NO: 30793 - protein, 327 aa, Arabidopsis thaliana
  peptide (1)..(327): Ceres Seq. ID no. 13487676
  misc_feature (133)..(273): Pfam Name: PAP2 superfamily Pfam Description: PAP2 superfamily
  misc_feature (26)..(300): Homolog of NCBI NO: 9279656 NR Description: phosphatidic acid phosphatase-like protein
  misc_feature (26)..(315): Homolog of NCBI NO: 10673973 NR Description: phosphatidic acid phosphatase beta [Vigna
  misc_feature (26)..(312): Homolog of NCBI NO: 15218051 NR Description: phosphatidic acid phosphatase (PAP2) family
  misc_feature (26)..(300): Homolog of NCBI NO: 6957723 NR Description: putative phosphatidate phosphohydrolase
  misc_feature (18)..(300): Homolog of NCBI NO: 18396250 NR Description: phosphatidic acid phosphatase (PAP2) family
  misc_feature (1)..(289): Homolog of NCBI NO: 9621903 NR Description: phosphatidic acid phosphatase alpha [Vigna
  misc_feature (26)..(327): Homolog of NCBI NO: 25353094 NR Description: probable phosphatidic acid phosphatase
  misc_feature (1)..(327): Homolog of NCBI NO: 21554001 NR Description: putative phosphatidic acid phosphatase
  misc_feature (1)..(327): Homolog of NCBI NO: 15724220 NR Description: At2g01180/F10A8.6 [Arabidopsis thaliana]
  misc_feature (1)..(327): Homolog of NCBI NO: 18379166 NR Description: phosphatidic acid phosphatase (PAP2) family
MTIGSFFSSLLFWRNSQDQEAQRGRMQEIDLSVHTIKSHGGRVASKHKHDWIILVILIAIEIGLNLISPFYRYVGKDMMTDLKYPFKDNTVPIWSVPVYAVLLPIIVFVCFYLKRTCVYDLHHSILGLLFAVLITGVITDSIKVATGRPRPNFYWRCFPDGKELYDALGGVVCHGKAAEVKEGHKSFPSGHTSWSFAGLTFLSLYLSGKIKAFNNEGHVAKLCLVIFPLLAACLVGISRVDDYWHHWQDVFAGALIGTLVAAFCYRQFYPNPYHEEGWGPYAYFKAAQERGVPVTSSQNGDALRAMSLQMDSTSLENMESGTSTAPR

SEQ ID NO: 30794 - protein, 302 aa, Arabidopsis thaliana
  peptide (1)..(302): Ceres Seq. ID no. 13487677
  misc_feature (108)..(248): Pfam Name: PAP2 superfamily Pfam Description: PAP2 superfamily
  misc_feature (1)..(275): Homolog of NCBI NO: 9279656 NR Description: phosphatidic acid phosphatase-like protein
  misc_feature (1)..(290): Homolog of NCBI NO: 10673973 NR Description: phosphatidic acid phosphatase beta [Vigna
  misc_feature (1)..(287): Homolog of NCBI NO: 15218051 NR Description: phosphatidic acid phosphatase (PAP2) family
  misc_feature (1)..(275): Homolog of NCBI NO: 6957723 NR Description: putative phosphatidate phosphohydrolase
  misc_feature (1)..(275): Homolog of NCBI NO: 18396250 NR Description: phosphatidic acid phosphatase (PAP2) family
  misc_feature (1)..(264): Homolog of NCBI NO: 9621903 NR Description: phosphatidic acid phosphatase alpha [Vigna
  misc_feature (1)..(302): Homolog of NCBI NO: 25353094 NR Description: probable phosphatidic acid phosphatase
  misc_feature (1)..(302): Homolog of NCBI NO: 21554001 NR Description: putative phosphatidic acid phosphatase
  misc_feature (1)..(302): Homolog of NCBI NO: 15724220 NR Description: At2g01180/F10A8.6 [Arabidopsis thaliana]
  misc_feature (1)..(302): Homolog of NCBI NO: 18379166 NR Description: phosphatidic acid phosphatase (PAP2) family
MQEIDLSVHTIKSHGGRVASKHKHDWIILVILIAIEIGLNLISPFYRYVGKDMMTDLKYPFKDNTVPIWSVPVYAVLLPIIVFVCFYLKRTCVYDLHHSILGLLFAVLITGVITDSIKVATGRPRPNFYWRCFPDGKELYDALGGVVCHGKAAEVKEGHKSFPSGHTSWSFAGLTFLSLYLSGKIKAFNNEGHVAKLCLVIFPLLAACLVGISRVDDYWHHWQDVFAGALIGTLVAAFCYRQFYPNPYHEEGWGPYAYFKAAQERGVPVTSSQNGDALRAMSLQMDSTSLENMESGTSTAPR

SEQ ID NO: 30795 - protein, 250 aa, Arabidopsis thaliana
  peptide (1)..(250): Ceres Seq. ID no. 13487678
  misc_feature (56)..(196): Pfam Name: PAP2 superfamily Pfam Description: PAP2 superfamily
  misc_feature (1)..(223): Homolog of NCBI NO: 9279656 NR Description: phosphatidic acid phosphatase-like protein
  misc_feature (1)..(238): Homolog of NCBI NO: 10673973 NR Description: phosphatidic acid phosphatase beta [Vigna
  misc_feature (1)..(235): Homolog of NCBI NO: 15218051 NR Description: phosphatidic acid phosphatase (PAP2) family
  misc_feature (1)..(223): Homolog of NCBI NO: 6957723 NR Description: putative phosphatidate phosphohydrolase
  misc_feature (1)..(223): Homolog of NCBI NO: 18396250 NR Description: phosphatidic acid phosphatase (PAP2) family
  misc_feature (1)..(212): Homolog of NCBI NO: 9621903 NR Description: phosphatidic acid phosphatase alpha [Vigna
  misc_feature (1)..(250): Homolog of NCBI NO: 25353094 NR Description: probable phosphatidic acid phosphatase
  misc_feature (1)..(250): Homolog of NCBI NO: 21554001 NR Description: putative phosphatidic acid phosphatase
  misc_feature (1)..(250): Homolog of NCBI NO: 15724220 NR Description: At2g01180/F10A8.6 [Arabidopsis thaliana]
  misc_feature (1)..(250): Homolog of NCBI NO: 18379166 NR Description: phosphatidic acid phosphatase (PAP2) family
MMTDLKYPFKDNTVPIWSVPVYAVLLPIIVFVCFYLKRTCVYDLHHSILGLLFAVLITGVITDSIKVATGRPRPNFYWRCFPDGKELYDALGGVVCHGKAAEVKEGHKSFPSGHTSWSFAGLTFLSLYLSGKIKAFNNEGHVAKLCLVIFPLLAACLVGISRVDDYWHHWQDVFAGALIGTLVAAFCYRQFYPNPYHEEGWGPYAYFKAAQERGVPVTSSQNGDALRAMSLQMDSTSLENMESGTSTAPR

SEQ ID NO: 30796 - DNA, 2496 bp, Arabidopsis thaliana
  misc_feature (1)..(2496): Ceres Seq. ID no. 12561218
  misc_feature: MA Experiment ID: 108434 Result: Down-regulated in Transcription
  misc_feature: MA Experiment 108434 PARAMETER Experiment Name: At_Root_Tips_cDNA_P Parameter: Tissue Value: Root Tips
  misc_feature: MA Experiment ID: 108585 Result: Up-regulated in Transcription
  misc_feature: MA Experiment 108585 PARAMETER Experiment Name: At_5mM_NaNP_cDNA_P Parameter: Timepoint (hr) Value: 6
  misc_feature: MA Experiment 108585 PARAMETER Experiment Name: At_5mM_NaNP_cDNA_P Parameter: Tissue Value: Aerial
  misc_feature: MA Experiment 108585 PARAMETER Experiment Name: At_5mM_NaNP_cDNA_P Parameter: Treatment Value: null
  misc_feature: MA Experiment ID: 108668 Result: Up-regulated in Transcription
  misc_feature: MA Experiment 108668 PARAMETER Experiment Name: At_2mM_SA_cDNA_P Parameter: Plant Line Value: WS
  misc_feature: MA Experiment 108668 PARAMETER Experiment Name: At_2mM_SA_cDNA_P Parameter: Timepoint (hr) Value: 6
  misc_feature: MA Experiment 108668 PARAMETER Experiment Name: At_2mM_SA_cDNA_P Parameter: Treatment Value: 2mM SA vs. No Treatment
  misc_feature: MA Experiment ID: 20000182 Result: Up-regulated in Transcription
  misc_feature: MA Experiment 20000182 PARAMETER Experiment Name: At_2mM_SA_P Parameter: Age (day) Value: 14
  misc_feature: MA Experiment 20000182 PARAMETER Experiment Name: At_2mM_SA_P Parameter: Organism Value: A. thaliana
  misc_feature: MA Experiment 20000182 PARAMETER Experiment Name: At_2mM_SA_P Parameter: Plant Line Value: WS
  misc_feature: MA Experiment 20000182 PARAMETER Experiment Name: At_2mM_SA_P Parameter: Timepoint (hr) Value: 6
  misc_feature: MA Experiment 20000182 PARAMETER Experiment Name: At_2mM_SA_P Parameter: Tissue Value: Aerial
  misc_feature: MA Experiment 20000182 PARAMETER Experiment Name: At_2mM_SA_P Parameter: Treatment Value: 2mM SA vs. No Treatment
  misc_feature: MA Experiment ID: 20000234 Result: Down-regulated in Transcription
  misc_feature: MA Experiment 20000234 PARAMETER Experiment Name: At_Siliques_P Parameter: Age (day) Value: 21
  misc_feature: MA Experiment 20000234 PARAMETER Experiment Name: At_Siliques_P Parameter: Organism Value: A. thaliana
  misc_feature: MA Experiment 20000234 PARAMETER Experiment Name: At_Siliques_P Parameter: Plant Line Value: WS
  misc_feature: MA Experiment 20000234 PARAMETER Experiment Name: At_Siliques_P Parameter: Tissue Value: Less Than 5mm Siliques vs. Whole Plant
  misc_feature: MA Experiment ID: 20000235 Result: Down-regulated in Transcription
  misc_feature: MA Experiment 20000235 PARAMETER Experiment Name: At_Siliques_P Parameter: Age (day) Value: 21
  misc_feature: MA Experiment 20000235 PARAMETER Experiment Name: At_Siliques_P Parameter: Organism Value: A. thaliana
  misc_feature: MA Experiment 20000235 PARAMETER Experiment Name: At_Siliques_P Parameter: Plant Line Value: WS
  misc_feature: MA Experiment 20000235 PARAMETER Experiment Name: At_Siliques_P Parameter: Tissue Value: 5-10mm Siliques vs. Whole Plant
  misc_feature: MA Experiment ID: 20000265 Result: Down-regulated in Transcription
  misc_feature: MA Experiment 20000265 PARAMETER Experiment Name: At_Open_Flower_P Parameter: Age (day) Value: 21
  misc_feature: MA Experiment 20000265 PARAMETER Experiment Name: At_Open_Flower_P Parameter: Plant Line Value: WS
  misc_feature: MA Experiment 20000265 PARAMETER Experiment Name: At_Open_Flower_P Parameter: Tissue Value: Closed Flower vs. Whole Plant
aataattaaaattcgtcttccttccttgctctcggcgataacttggtttctctcctctctctcatctctctttgtttcgacccttttttagtatatttccaggaaatatcttcttcctcctttcgttttctctatctcagttttctctcttctcagcattaagtagtcaacggtcagcgatctcggcgttccttctaatcggaaaagtctagcttcagtttcttttttttttgcttttttggtttccgcgattaatcgatttgggtattttgattttctcttcaaattaagtcaacgggtggatacgcgttgagagggcttttctcgtattctgcttctaatttcatcatcttggtattaccttgtgtgggtggtagcttaatcgaaggattcgagatcccttttatcaggggttttaacaatgatggattttctctgatgagggatagttctagggtttgtttttaatctcttgaggataaaatggaacgaagattaatgatcccttgcttcttttggttgattctcgttttggatttggttctcagagtctcgggcaacgccgaaggtgatgctctaagtgcactgaaaaacagtttagccgaccctaataaggtgcttcaaagttgggatgctactcttgttactccatgtacatggtttcatgttacttgcaatagcgacaatagtgttacacgtgttgaccttgggaatgcaaatctatctggacagctcgtaatgcaacttggtcagcttccaaacttgcagtacttggagctttatagcaataacattactgggacaatcccagaacagcttggaaatctgacggaattggtgagcttggatctttacttgaacaatttaagcgggcctattccatcaactctcggccgacttaagaaactccgtttcttgcgtcttaataacaatagcttatctggagaaattccaaggtctttgactgctgtcctgacgctacaagttctggatctctcaaacaatcctctcaccggagatattcctgttaatggttccttttcacttttcactccaatcagttttgccaacaccaagttgactccccttcctgcatctccaccgcctcctatctctcctacaccgccatcacctgcagggagtaatagaattactggagcgattgcgggaggagttgctgcaggtgctgcacttctatttgctgttccggccattgcactagcttggtggcgaaggaaaaagccgcaggaccacttctttgatgtaccagctgaagaggacccagaagttcatttaggacaactgaagaggttttcattgcgtgaactacaagttgcttcggataattttagcaacaagaacatattgggtagaggtggttttggtaaagtttataaaggacggttagctgatggtactttagtggccgttaaaaggctaaaagaggagcgcacccaaggtggcgaactgcagttccagacagaggttgagatgattagtatggcggttcacagaaacttgcttcggcttcgtggattttgcatgactccaaccgaaagattgcttgtttatccctacatggctaatggaagtgttgcctcctgtttaagagaacgtcccgagtcccagccaccacttgattggccaaagagacagcgtattgcgttgggatctgcaagagggcttgcgtatttacatgatcattgcgacccaaagattattcatcgagatgtgaaagctgcaaatattttgttggatgaagagtttgaagccgtggttggggattttggacttgcaaaactcatggactacaaagacacacatgtgacaaccgcagtgcgtgggacaattggtcatatagcccctgagtacctttccactggaaaatcatcagagaaaaccgatgtctttgggtatggagtcatgcttcttgagcttatcactggacaaagggcttttgatcttgctcgcctcgcgaatgatgatgatgtcatgttactagactgggtgaaagggttgttaaaagagaagaaattggaagcactagtagatgttgatcttcagggtaattacaaagacgaagaagtggagcagctaatccaagtggctttactctgcactcagagttcaccaatggaaagacccaaaatgtctgaagttgtaagaatgcttgaaggagatggtttagctgagagatgggaagagtggcaaaaggaggaaatgttcagacaagatttcaactacccaacccaccatccagccgtgtctggctggatcattggcgattccacttcccagatcgaaaacgaatacccctcgggtccaagataagattcgaaacacgaatgttttttctgtattttgtttttctctgtatttattgagggttttagcttctgctgctccatattattggttcttaagtgaatacatgaggatcagattgggtttgtaagtgttatatgatgaaaaaggatttgaatgttgttgaaagct

SEQ ID NO: 30797 - protein, 615 aa, Arabidopsis thaliana
  peptide (1)..(615): Ceres Seq. ID no. 12561219
  misc_feature (11)..(615): Homolog of NCBI NO: 13897310 NR Description: SERK2 protein [Zea mays]
  misc_feature (1)..(615): Homolog of NCBI NO: 15081616 NR Description: At1g71830/F14O23_24 [Arabidopsis thaliana]
  misc_feature (1)..(615): Homolog of NCBI NO: 15217584 NR Description: protein kinase, putative
  misc_feature (145)..(177): Homolog of NCBI NO: 7488244 NR Description: protein kinase homolog F17M5.190 - Arabidopsis
  misc_feature (9)..(615): Homolog of NCBI NO: 14573457 NR Description: somatic embryogenesis receptor-like kinase 2
  misc_feature (9)..(615): Homolog of NCBI NO: 24935324 NR Description: somatic embryogenesis receptor kinase 1 [Medicago
  misc_feature (9)..(615): Homolog of NCBI NO: 15218543 NR Description: somatic embryogenesis receptor-like kinase,
  misc_feature (1)..(615): Homolog of NCBI NO: 30678986 NR Description: leucine-rich repeat protein kinase family
  misc_feature (29)..(109): Homolog of NCBI NO: 7488244 NR Description: protein kinase homolog F17M5.190 - Arabidopsis
  misc_feature (171)..(615): Homolog of NCBI NO: 7488244 NR Description: protein kinase homolog F17M5.190 - Arabidopsis
  misc_feature (11)..(615): Homolog of NCBI NO: 13897310 NR Description: SERK2 protein [Zea mays]
  misc_feature (1)..(615): Homolog of NCBI NO: 15081616 NR Description: At1g71830/F14O23_24 [Arabidopsis thaliana]
  misc_feature (1)..(615): Homolog of NCBI NO: 15217584 NR Description: protein kinase, putative
  misc_feature (145)..(177): Homolog of NCBI NO: 7488244 NR Description: protein kinase homolog F17M5.190 - Arabidopsis
  misc_feature (9)..(615): Homolog of NCBI NO: 14573457 NR Description: somatic embryogenesis receptor-like kinase 2
  misc_feature (9)..(615): Homolog of NCBI NO: 24935324 NR Description: somatic embryogenesis receptor kinase 1 [Medicago
  misc_feature (9)..(615): Homolog of NCBI NO: 15218543 NR Description: somatic embryogenesis receptor-like kinase,
  misc_feature (1)..(615): Homolog of NCBI NO: 30678986 NR Description: leucine-rich repeat protein kinase family
  misc_feature (29)..(109): Homolog of NCBI NO: 7488244 NR Description: protein kinase homolog F17M5.190 - Arabidopsis
  misc_feature (171)..(615): Homolog of NCBI NO: 7488244 NR Description: protein kinase homolog F17M5.190 - Arabidopsis
MERRLMIPCFFWLILVLDLVLRVSGNAEGDALSALKNSLADPNKVLQSWDATLVTPCTWFHVTCNSDNSVTRVDLGNANLSGQLVMQLGQLPNLQYLELYSNNITGTIPEQLGNLTELVSLDLYLNNLSGPIPSTLGRLKKLRFLRLNNNSLSGEIPRSLTAVLTLQVLDLSNNPLTGDIPVNGSFSLFTPISFANTKLTPLPASPPPPISPTPPSPAGSNRITGAIAGGVAAGAALLFAVPAIALAWWRRKKPQDHFFDVPAEEDPEVHLGQLKRFSLRELQVASDNFSNKNILGRGGFGKVYKGRLADGTLVAVKRLKEERTQGGELQFQTEVEMISMAVHRNLLRLRGFCMTPTERLLVYPYMANGSVASCLRERPESQPPLDWPKRQRIALGSARGLAYLHDHCDPKIIHRDVKAANILLDEEFEAVVGDFGLAKLMDYKDTHVTTAVRGTIGHIAPEYLSTGKSSEKTDVFGYGVMLLELITGQRAFDLARLANDDDVMLLDWVKGLLKEKKLEALVDVDLQGNYKDEEVEQLIQVALLCTQSSPMERPKMSEVVRMLEGDGLAERWEEWQKEEMFRQDFNYPTHHPAVSGWIIGDSTSQIENEYPSGPR

SEQ ID NO: 30798 - protein, 610 aa, Arabidopsis thaliana
  peptide (1)..(610): Ceres Seq. ID no. 12561220
  misc_feature (6)..(610): Homolog of NCBI NO: 13897310 NR Description: SERK2 protein [Zea mays]
  misc_feature (1)..(610): Homolog of NCBI NO: 15081616 NR Description: At1g71830/F14O23_24 [Arabidopsis thaliana]
  misc_feature (1)..(610): Homolog of NCBI NO: 15217584 NR Description: protein kinase, putative
  misc_feature (140)..(172): Homolog of NCBI NO: 7488244 NR Description: protein kinase homolog F17M5.190 - Arabidopsis
  misc_feature (4)..(610): Homolog of NCBI NO: 14573457 NR Description: somatic embryogenesis receptor-like kinase 2
  misc_feature (4)..(610): Homolog of NCBI NO: 24935324 NR Description: somatic embryogenesis receptor kinase 1 [Medicago
  misc_feature (4)..(610): Homolog of NCBI NO: 15218543 NR Description: somatic embryogenesis receptor-like kinase,
  misc_feature (1)..(610): Homolog of NCBI NO: 30678986 NR Description: leucine-rich repeat protein kinase family
  misc_feature (24)..(104): Homolog of NCBI NO: 7488244 NR Description: protein kinase homolog F17M5.190 - Arabidopsis
  misc_feature (166)..(610): Homolog of NCBI NO: 7488244 NR Description: protein kinase homolog F17M5.190 - Arabidopsis
  misc_feature (6)..(610): Homolog of NCBI NO: 13897310 NR Description: SERK2 protein [Zea mays]
  misc_feature (1)..(610): Homolog of NCBI NO: 15081616 NR Description: At1g71830/F14O23_24 [Arabidopsis thaliana]
  misc_feature (1)..(610): Homolog of NCBI NO: 15217584 NR Description: protein kinase, putative
  misc_feature (140)..(172): Homolog of NCBI NO: 7488244 NR Description: protein kinase homolog F17M5.190 - Arabidopsis
  misc_feature (4)..(610): Homolog of NCBI NO: 14573457 NR Description: somatic embryogenesis receptor-like kinase 2
  misc_feature (4)..(610): Homolog of NCBI NO: 24935324 NR Description: somatic embryogenesis receptor kinase 1 [Medicago
  misc_feature (4)..(610): Homolog of NCBI NO: 15218543 NR Description: somatic embryogenesis receptor-like kinase,
  misc_feature (1)..(610): Homolog of NCBI NO: 30678986 NR Description: leucine-rich repeat protein kinase family
  misc_feature (24)..(104): Homolog of NCBI NO: 7488244 NR Description: protein kinase homolog F17M5.190 - Arabidopsis
  misc_feature (166)..(610): Homolog of NCBI NO: 7488244 NR Description: protein kinase homolog F17M5.190 - Arabidopsis
MIPCFFWLILVLDLVLRVSGNAEGDALSALKNSLADPNKVLQSWDATLVTPCTWFHVTCNSDNSVTRVDLGNANLSGQLVMQLGQLPNLQYLELYSNNITGTIPEQLGNLTELVSLDLYLNNLSGPIPSTLGRLKKLRFLRLNNNSLSGEIPRSLTAVLTLQVLDLSNNPLTGDIPVNGSFSLFTPISFANTKLTPLPASPPPPISPTPPSPAGSNRITGAIAGGVAAGAALLFAVPAIALAWWRRKKPQDHFFDVPAEEDPEVHLGQLKRFSLRELQVASDNFSNKNILGRGGFGKVYKGRLADGTLVAVKRLKEERTQGGELQFQTEVEMISMAVHRNLLRLRGFCMTPTERLLVYPYMANGSVASCLRERPESQPPLDWPKRQRIALGSARGLAYLHDHCDPKIIHRDVKAANILLDEEFEAVVGDFGLAKLMDYKDTHVTTAVRGTIGHIAPEYLSTGKSSEKTDVFGYGVMLLELITGQRAFDLARLANDDDVMLLDWVKGLLKEKKLEALVDVDLQGNYKDEEVEQLIQVALLCTQSSPMERPKMSEVVRMLEGDGLAERWEEWQKEEMFRQDFNYPTHHPAVSGWIIGDSTSQIENEYPSGPR

SEQ ID NO: 30799 - protein, 530 aa, Arabidopsis thaliana
  peptide (1)..(530): Ceres Seq. ID no. 12561221
  misc_feature (1)..(530): Homolog of NCBI NO: 13897310 NR Description: SERK2 protein [Zea mays]
  misc_feature (1)..(530): Homolog of NCBI NO: 15081616 NR Description: At1g71830/F14O23_24 [Arabidopsis thaliana]
  misc_feature (1)..(530): Homolog of NCBI NO: 15217584 NR Description: protein kinase, putative
  misc_feature (60)..(92): Homolog of NCBI NO: 7488244 NR Description: protein kinase homolog F17M5.190 - Arabidopsis
  misc_feature (1)..(530): Homolog of NCBI NO: 14573457 NR Description: somatic embryogenesis receptor-like kinase 2
  misc_feature (1)..(530): Homolog of NCBI NO: 24935324 NR Description: somatic embryogenesis receptor kinase 1 [Medicago
  misc_feature (1)..(530): Homolog of NCBI NO: 15218543 NR Description: somatic embryogenesis receptor-like kinase,
  misc_feature (1)..(530): Homolog of NCBI NO: 30678986 NR Description: leucine-rich repeat protein kinase family
  misc_feature (1)..(24): Homolog of NCBI NO: 7488244 NR Description: protein kinase homolog F17M5.190 - Arabidopsis
  misc_feature (86)..(530): Homolog of NCBI NO: 7488244 NR Description: protein kinase homolog F17M5.190 - Arabidopsis
  misc_feature (1)..(530): Homolog of NCBI NO: 13897310 NR Description: SERK2 protein [Zea mays]
  misc_feature (1)..(530): Homolog of NCBI NO: 15081616 NR Description: At1g71830/F14O23_24 [Arabidopsis thaliana]
  misc_feature (1)..(530): Homolog of NCBI NO: 15217584 NR Description: protein kinase, putative
  misc_feature (60)..(92): Homolog of NCBI NO: 7488244 NR Description: protein kinase homolog F17M5.190 - Arabidopsis
  misc_feature (1)..(530): Homolog of NCBI NO: 14573457 NR Description: somatic embryogenesis receptor-like kinase 2
  misc_feature (1)..(530): Homolog of NCBI NO: 24935324 NR Description: somatic embryogenesis receptor kinase 1 [Medicago
  misc_feature (1)..(530): Homolog of NCBI NO: 15218543 NR Description: somatic embryogenesis receptor-like kinase,
  misc_feature (1)..(530): Homolog of NCBI NO: 30678986 NR Description: leucine-rich repeat protein kinase family
  misc_feature (1)..(24): Homolog of NCBI NO: 7488244 NR Description: protein kinase homolog F17M5.190 - Arabidopsis
  misc_feature (86)..(530): Homolog of NCBI NO: 7488244 NR Description: protein kinase homolog F17M5.190 - Arabidopsis
MQLGQLPNLQYLELYSNNITGTIPEQLGNLTELVSLDLYLNNLSGPIPSTLGRLKKLRFLRLNNNSLSGEIPRSLTAVLTLQVLDLSNNPLTGDIPVNGSFSLFTPISFANTKLTPLPASPPPPISPTPPSPAGSNRITGAIAGGVAAGAALLFAVPAIALAWWRRKKPQDHFFDVPAEEDPEVHLGQLKRFSLRELQVASDNFSNKNILGRGGFGKVYKGRLADGTLVAVKRLKEERTQGGELQFQTEVEMISMAVHRNLLRLRGFCMTPTERLLVYPYMANGSVASCLRERPESQPPLDWPKRQRIALGSARGLAYLHDHCDPKIIHRDVKAANILLDEEFEAVVGDFGLAKLMDYKDTHVTTAVRGTIGHIAPEYLSTGKSSEKTDVFGYGVMLLELITGQRAFDLARLANDDDVMLLDWVKGLLKEKKLEALVDVDLQGNYKDEEVEQLIQVALLCTQSSPMERPKMSEVVRMLEGDGLAERWEEWQKEEMFRQDFNYPTHHPAVSGWIIGDSTSQIENEYPSGPR

SEQ ID NO: 30800 - DNA, 606 bp, Arabidopsis thaliana
  misc_feature (1)..(606): Ceres Seq. ID no. 12333083
  misc_feature: MA Experiment ID: 20000171 Result: Down-regulated in Transcription
  misc_feature: MA Experiment 20000171 PARAMETER Experiment Name: At_42deg_Heat_P Parameter: Age (day) Value: 14
  misc_feature: MA Experiment 20000171 PARAMETER Experiment Name: At_42deg_Heat_P Parameter: Organism Value: A. thaliana
  misc_feature: MA Experiment 20000171 PARAMETER Experiment Name: At_42deg_Heat_P Parameter: Plant Line Value: WS
  misc_feature: MA Experiment 20000171 PARAMETER Experiment Name: At_42deg_Heat_P Parameter: Temperature (deg C) Value: 42 vs. 22
  misc_feature: MA Experiment 20000171 PARAMETER Experiment Name: At_42deg_Heat_P Parameter: Timepoint (hr) Value: 1
  misc_feature: MA Experiment 20000171 PARAMETER Experiment Name: At_42deg_Heat_P Parameter: Tissue Value: Aerial
  misc_feature: MA Experiment ID: 20000173 Result: Down-regulated in Transcription
  misc_feature: MA Experiment 20000173 PARAMETER Experiment Name: At_42deg_Heat_P Parameter: Age (day) Value: 14
  misc_feature: MA Experiment 20000173 PARAMETER Experiment Name: At_42deg_Heat_P Parameter: Organism Value: A. thaliana
  misc_feature: MA Experiment 20000173 PARAMETER Experiment Name: At_42deg_Heat_P Parameter: Plant Line Value: WS
  misc_feature: MA Experiment 20000173 PARAMETER Experiment Name: At_42deg_Heat_P Parameter: Temperature (deg C) Value: 42 vs. 22
  misc_feature: MA Experiment 20000173 PARAMETER Experiment Name: At_42deg_Heat_P Parameter: Timepoint (hr) Value: 6
  misc_feature: MA Experiment 20000173 PARAMETER Experiment Name: At_42deg_Heat_P Parameter: Tissue Value: Aerial
  misc_feature: MA Experiment ID: 20000234 Result: Up-regulated in Transcription
  misc_feature: MA Experiment 20000234 PARAMETER Experiment Name: At_Siliques_P Parameter: Age (day) Value: 21
  misc_feature: MA Experiment 20000234 PARAMETER Experiment Name: At_Siliques_P Parameter: Organism Value: A. thaliana
  misc_feature: MA Experiment 20000234 PARAMETER Experiment Name: At_Siliques_P Parameter: Plant Line Value: WS
  misc_feature: MA Experiment 20000234 PARAMETER Experiment Name: At_Siliques_P Parameter: Tissue Value: Less Than 5mm Siliques vs. Whole Plant
  misc_feature: MA Experiment ID: 20000794 Result: Down-regulated in Transcription
  misc_feature: MA Experiment 20000794 PARAMETER Experiment Name: At_Petals_P Parameter: Age (day) Value: 23-25 days
  misc_feature: MA Experiment 20000794 PARAMETER Experiment Name: At_Petals_P Parameter: Plant Line Value: WS
  misc_feature: MA Experiment 20000794 PARAMETER Experiment Name: At_Petals_P Parameter: Tissue Value: Petals vs. Whole plant
  misc_feature: MA Experiment ID: 20001911 Result: Down-regulated in Transcription
  misc_feature: MA Experiment 20001911 PARAMETER Experiment Name: At_Drought_Reproduction_P Parameter: Age (day) Value: 40
  misc_feature: MA Experiment 20001911 PARAMETER Experiment Name: At_Drought_Reproduction_P Parameter: Organism Value: A. thaliana
  misc_feature: MA Experiment 20001911 PARAMETER Experiment Name: At_Drought_Reproduction_P Parameter: Plant Line Value: WS
  misc_feature: MA Experiment 20001911 PARAMETER Experiment Name: At_Drought_Reproduction_P Parameter: Timepoint (day) Value: 10
  misc_feature: MA Experiment 20001911 PARAMETER Experiment Name: At_Drought_Reproduction_P Parameter: Tissue Value: Flowers
  misc_feature: MA Experiment 20001911 PARAMETER Experiment Name: At_Drought_Reproduction_P Parameter: Treatment Value: Drought vs. No Drought
catttctgcttcttcttctgctaagagacagagaaatagagagagatcgcgtcggcacaatctgcaatttccaacatcgacatgtttaactctacagcattggtgattttcgccattcttttcctctcaatctccgccgatgcgttcccgattccgtctcccaacggagagatcgacgcaatgttgatccgaaacagtatcatcggagaagatgaagatctaatgccaactgagatcagtcggagagtactgatggcgcagaaacggtacatcggctacgaaacgctaaggagagacatggttccttgtcagaaaccaggagcttcttactacgattgtcgctctggacaagctaattattacagcagaggctgcgacaccattacaagatgcgctagagacacaaacgacatcaacacatgaaggtaagatccaagaaattgccaaaattggaagctttttggccgaggcaagtaaattatatgattaagcttttgcattgctgttgttatatatgtgtttttgacataagaattgttataatatatgtaactctgccactagttggttatcaatgttcaattattgagatctataaattatatt

SEQ ID NO: 30801 - protein, 113 aa, Arabidopsis thaliana
  peptide (1)..(113): Ceres Seq. ID no. 12333084
  misc_feature (42)..(106): Pfam Name: Rapid ALkalinization Factor (RALF) Pfam Description: Rapid ALkalinization Factor (RALF)
  misc_feature (42)..(104): Homolog of NCBI NO: 34902918 NR Description: unnamed protein product [Oryza sativa (japonica
  misc_feature (7)..(106): Homolog of NCBI NO: 15217877 NR Description: hypothetical protein; protein id: At1g28270.1
  misc_feature (41)..(104): Homolog of NCBI NO: 15218637 NR Description: hypothetical protein; protein id: At1g02900.1
  misc_feature (41)..(106): Homolog of NCBI NO: 18401177 NR Description: expressed protein
  misc_feature (41)..(106): Homolog of NCBI NO: 18397246 NR Description: expressed protein
  misc_feature (5)..(106): Homolog of NCBI NO: 18414528 NR Description: Expressed protein
  misc_feature (1)..(113): Homolog of NCBI NO: 18403901 NR Description: Expressed protein
  misc_feature (1)..(62): Homolog of NCBI NO: 7459901 NR Description: hypothetical protein DL3015C - Arabidopsis
  misc_feature (1)..(113): Homolog of NCBI NO: 18414108 NR Description: expressed protein
  misc_feature (1)..(113): Homolog of NCBI NO: 21553907 NR Description: unknown [Arabidopsis thaliana]
MFNSTALVIFAILFLSISADAFPIPSPNGEIDAMLIRNSIIGEDEDLMPTEISRRVLMAQKRYIGYETLRRDMVPCQKPGASYYDCRSGQANYYSRGCDTITRCARDTNDINT

SEQ ID NO: 30802 - protein, 80 aa, Arabidopsis thaliana
  peptide (1)..(80): Ceres Seq. ID no. 12333085
  misc_feature (9)..(73): Pfam Name: Rapid ALkalinization Factor (RALF) Pfam Description: Rapid ALkalinization Factor (RALF)
  misc_feature (9)..(71): Homolog of NCBI NO: 34902918 NR Description: unnamed protein product [Oryza sativa (japonica
  misc_feature (1)..(73): Homolog of NCBI NO: 15217877 NR Description: hypothetical protein; protein id: At1g28270.1
  misc_feature (8)..(71): Homolog of NCBI NO: 15218637 NR Description: hypothetical protein; protein id: At1g02900.1
  misc_feature (8)..(73): Homolog of NCBI NO: 18401177 NR Description: expressed protein
  misc_feature (8)..(73): Homolog of NCBI NO: 18397246 NR Description: expressed protein
  misc_feature (1)..(73): Homolog of NCBI NO: 18414528 NR Description: Expressed protein
  misc_feature (1)..(80): Homolog of NCBI NO: 18403901 NR Description: Expressed protein
  misc_feature (1)..(29): Homolog of NCBI NO: 7459901 NR Description: hypothetical protein DL3015C - Arabidopsis
  misc_feature (1)..(80): Homolog of NCBI NO: 18414108 NR Description: expressed protein
  misc_feature (1)..(80): Homolog of NCBI NO: 21553907 NR Description: unknown [Arabidopsis thaliana]
MLIRNSIIGEDEDLMPTEISRRVLMAQKRYIGYETLRRDMVPCQKPGASYYDCRSGQANYYSRGCDTITRCARDTNDINT

SEQ ID NO: 30803 - protein, 66 aa, Arabidopsis thaliana
  peptide (1)..(66): Ceres Seq. ID no. 12333086
  misc_feature (1)..(59): Pfam Name: Rapid ALkalinization Factor (RALF) Pfam Description: Rapid ALkalinization Factor (RALF)
  misc_feature (1)..(57): Homolog of NCBI NO: 34902918 NR Description: unnamed protein product [Oryza sativa (japonica
  misc_feature (1)..(59): Homolog of NCBI NO: 15217877 NR Description: hypothetical protein; protein id: At1g28270.1
  misc_feature (1)..(57): Homolog of NCBI NO: 15218637 NR Description: hypothetical protein; protein id: At1g02900.1
  misc_feature (1)..(59): Homolog of NCBI NO: 18401177 NR Description: expressed protein
  misc_feature (1)..(59): Homolog of NCBI NO: 18397246 NR Description: expressed protein
  misc_feature (1)..(59): Homolog of NCBI NO: 18414528 NR Description: Expressed protein
  misc_feature (1)..(66): Homolog of NCBI NO: 18403901 NR Description: Expressed protein
  misc_feature (1)..(15): Homolog of NCBI NO: 7459901 NR Description: hypothetical protein DL3015C - Arabidopsis
  misc_feature (1)..(66): Homolog of NCBI NO: 18414108 NR Description: expressed protein
  misc_feature (1)..(66): Homolog of NCBI NO: 21553907 NR Description: unknown [Arabidopsis thaliana]
MPTEISRRVLMAQKRYIGYETLRRDMVPCQKPGASYYDCRSGQANYYSRGCDTITRCARDTNDINT

SEQ ID NO: 30804 - DNA, 703 bp, Arabidopsis thaliana
  misc_feature (1)..(703): Ceres Seq. ID no. 13489872
  misc_feature: MA Experiment ID: 108433 Result: Up-regulated in Transcription
  misc_feature: MA Experiment 108433 PARAMETER Experiment Name: At_rhl_Mutant2_cDNA_P Parameter: Age (day) Value: 7
  misc_feature: MA Experiment 108433 PARAMETER Experiment Name: At_rhl_Mutant2_cDNA_P Parameter: Organism Value: A. thaliana
  misc_feature: MA Experiment 108433 PARAMETER Experiment Name: At_rhl_Mutant2_cDNA_P Parameter: Plant Line Value: rhl Mutant vs. wt landsburg
  misc_feature: MA Experiment 108433 PARAMETER Experiment Name: At_rhl_Mutant2_cDNA_P Parameter: Tissue Value: Roots
  misc_feature: MA Experiment ID: 108434 Result: Down-regulated in Transcription
  misc_feature: MA Experiment 108434 PARAMETER Experiment Name: At_Root_Tips_cDNA_P Parameter: Tissue Value: Root Tips
  misc_feature: MA Experiment ID: 108462 Result: Up-regulated in Transcription
  misc_feature: MA Experiment 108462 PARAMETER Experiment Name: At_Germinating_Seeds_cDNA_P Parameter: Age (day) Value: 2 vs. 0
  misc_feature: MA Experiment 108462 PARAMETER Experiment Name: At_Germinating_Seeds_cDNA_P Parameter: Tissue Value: Germinating Seeds
  misc_feature: MA Experiment ID: 108464 Result: Up-regulated in Transcription
  misc_feature: MA Experiment 108464 PARAMETER Experiment Name: At_Germinating_Seeds_cDNA_P Parameter: Age (day) Value: 4 vs. 0
  misc_feature: MA Experiment 108464 PARAMETER Experiment Name: At_Germinating_Seeds_cDNA_P Parameter: Tissue Value: Germinating Seeds
  misc_feature: MA Experiment ID: 108488 Result: Down-regulated in Transcription
  misc_feature: MA Experiment ID: 108561 Result: Up-regulated in Transcription
  misc_feature: MA Experiment 108561 PARAMETER Experiment Name: At_100uM_ABA_cDNA_P Parameter: Timepoint (hr) Value: 6
  misc_feature: MA Experiment 108561 PARAMETER Experiment Name: At_100uM_ABA_cDNA_P Parameter: Tissue Value: Aerial
  misc_feature: MA Experiment 108561 PARAMETER Experiment Name: At_100uM_ABA_cDNA_P Parameter: Treatment Value: 100uM ABA vs. No Treatment
  misc_feature: MA Experiment ID: 108579 Result: Down-regulated in Transcription
  misc_feature: MA Experiment 108579 PARAMETER Experiment Name: At_4deg_Cold_cDNA_P Parameter: Temperature (deg C) Value: 4 vs. 22
  misc_feature: MA Experiment 108579 PARAMETER Experiment Name: At_4deg_Cold_cDNA_P Parameter: Timepoint (hr) Value: 6
  misc_feature: MA Experiment 108579 PARAMETER Experiment Name: At_4deg_Cold_cDNA_P Parameter: Tissue Value: Aerial
  misc_feature: MA Experiment ID: 20000214 Result: Down-regulated in Transcription
  misc_feature: MA Experiment 20000214 PARAMETER Experiment Name: At_4deg_Cold_P Parameter: Timepoint (hr) Value: 6
  misc_feature: MA Experiment ID: 20000224 Result: Down-regulated in Transcription
  misc_feature: MA Experiment ID: 20000437 Result: Up-regulated in Transcription
  misc_feature: MA Experiment 20000437 PARAMETER Experiment Name: At_Drought_P Parameter: Age (day) Value: 8
  misc_feature: MA Experiment 20000437 PARAMETER Experiment Name: At_Drought_P Parameter: Organism Value: A. thaliana
  misc_feature: MA Experiment 20000437 PARAMETER Experiment Name: At_Drought_P Parameter: Plant Line Value: WS
  misc_feature: MA Experiment 20000437 PARAMETER Experiment Name: At_Drought_P Parameter: Timepoint (hr) Value: 24
  misc_feature: MA Experiment 20000437 PARAMETER Experiment Name: At_Drought_P Parameter: Tissue Value: Whole Plant
  misc_feature: MA Experiment 20000437 PARAMETER Experiment Name: At_Drought_P Parameter: Treatment Value: Drought vs. No Drought
  misc_feature: MA Experiment ID: 20001557 Result: Down-regulated in Transcription
  misc_feature: MA Experiment 20001557 PARAMETER Experiment Name: At_Drought_Soil_Dry_P Parameter: Age (day) Value: 27
  misc_feature: MA Experiment 20001557 PARAMETER Experiment Name: At_Drought_Soil_Dry_P Parameter: Organism Value: A. thaliana
  misc_feature: MA Experiment 20001557 PARAMETER Experiment Name: At_Drought_Soil_Dry_P Parameter: Plant Line Value: WS
  misc_feature: MA Experiment 20001557 PARAMETER Experiment Name: At_Drought_Soil_Dry_P Parameter: Post Timepoint (hr) Value: 3
  misc_feature: MA Experiment 20001557 PARAMETER Experiment Name: At_Drought_Soil_Dry_P Parameter: Post-Treatment Value: Re-Water vs. No Drought
  misc_feature: MA Experiment 20001557 PARAMETER Experiment Name: At_Drought_Soil_Dry_P Parameter: Timepoint (day) Value: 13
  misc_feature: MA Experiment 20001557 PARAMETER Experiment Name: At_Drought_Soil_Dry_P Parameter: Treatment Value: Drought vs. No Drought
  misc_feature: MA Experiment ID: 20001905 Result: Up-regulated in Transcription
  misc_feature: MA Experiment 20001905 PARAMETER Experiment Name: At_Drought_Reproduction_P Parameter: Age (day) Value: 40
  misc_feature: MA Experiment 20001905 PARAMETER Experiment Name: At_Drought_Reproduction_P Parameter: Organism Value: A. thaliana
  misc_feature: MA Experiment 20001905 PARAMETER Experiment Name: At_Drought_Reproduction_P Parameter: Plant Line Value: WS
  misc_feature: MA Experiment 20001905 PARAMETER Experiment Name: At_Drought_Reproduction_P Parameter: Timepoint (day) Value: 10
  misc_feature: MA Experiment 20001905 PARAMETER Experiment Name: At_Drought_Reproduction_P Parameter: Tissue Value: Rosettes
  misc_feature: MA Experiment 20001905 PARAMETER Experiment Name: At_Drought_Reproduction_P Parameter: Treatment Value: Drought vs. No Drought
aagtttgatcgaaagtttcagacttcaataagttttcagtttcgtgcatagattaggaatctcgaaaccctaattctgttttctacacgaaacccatcaaaatcgaattttgatcgtttctaatttctgccatttgattctcttcatcagtcacatttaggggaaacgagaagccctaatctttgattctttaatcgccatggctaatagctctttcaagttggaacacccactagagaggagacaaattgaatcttctcgcatcagggagaagtatccagacagaattccagtgatcgtagagagagctgaaagaagtgatgttcccaatatcgacaagaagaagtaccttgttccagctgatctaactgttgggcaatttgtgtatgttgtccgtaaaagaatcaagctgagtgccgaaaaggctatcttcgtctttgtgaagaacacattgcctccaactgctgcaatgatgtctgcaatctatgatgagaacaaagacgaagatgggtttctctacatgacttacagtggagagaacacctttggtttggtttaaatgtgtgccttccaatgcttttgtgctgatgtgtatattatatgctcttttataacactatgaatatgcaaaagttatatgtactactattaatgtaaatgttgctttgaatttaagttgttagtttgggttttacttttggac

SEQ ID NO: 30805 - protein, 119 aa, Arabidopsis thaliana
  peptide (1)..(119): Ceres Seq. ID no. 13489873
  misc_feature (14)..(117): Pfam Name: Microtubule associated protein 1A/1B, light chain 3 Pfam Description: Microtubule associated protein 1A/1B, light
  misc_feature (1)..(117): Homolog of NCBI NO: 21553487 NR Description: symbiosis-related like protein [Arabidopsis
  misc_feature (1)..(117): Homolog of NCBI NO: 18415813 NR Description: symbiosis-related like protein [Arabidopsis
  misc_feature (1)..(118): Homolog of NCBI NO: 15224577 NR Description: microtubule-associated protein -related
  misc_feature (1)..(118): Homolog of NCBI NO: 21592920 NR Description: putative microtubule-associated protein
  misc_feature (1)..(117): Homolog of NCBI NO: 33146967 NR Description: putative microtubule associated protein
  misc_feature (1)..(119): Homolog of NCBI NO: 38344173 NR Description: OSJNBa0053K19.12 [Oryza sativa (japonica
  misc_feature (1)..(117): Homolog of NCBI NO: 34595981 NR Description: microtubule-associated protein 1 light chain 3
  misc_feature (1)..(118): Homolog of NCBI NO: 40253647 NR Description: putative microtubial binding protein
  misc_feature (1)..(119): Homolog of NCBI NO: 15220686 NR Description: symbiosis-related protein -related [Arabidopsis
  misc_feature (1)..(118): Homolog of NCBI NO: 7446944 NR Description: hypothetical protein F8K4.23 - Arabidopsis
MANSSFKLEHPLERRQIESSRIREKYPDRIPVIVERAERSDVPNIDKKKYLVPADLTVGQFVYVVRKRIKLSAEKAIFVFVKNTLPPTAAMMSAIYDENKDEDGFLYMTYSGENTFGLV

SEQ ID NO: 30806 - DNA, 705 bp, Arabidopsis thaliana
  misc_feature (1)..(705): Ceres Seq. ID no. 12332216
  misc_feature: MA Experiment ID: 108488 Result: Down-regulated in Transcription
  misc_feature: MA Experiment ID: 20000496 Result: Down-regulated in Transcription
  misc_feature: MA Experiment 20000496 PARAMETER Experiment Name: At_Guard_Cells_P Parameter: Harvest Date Value: 7/19/2002
  misc_feature: MA Experiment 20000496 PARAMETER Experiment Name: At_Guard_Cells_P Parameter: Organism Value: Canola
  misc_feature: MA Experiment 20000496 PARAMETER Experiment Name: At_Guard_Cells_P Parameter: Tissue Value: Guard Cells vs. Leaves
aaaggttgtccaagtctacaaaccaaaagcacgctacagaagaagaggaagaagaaagatgtcgtggcaatcatacgtcgatgaccatctcatgtgcgaggtcgaaggcaaccacctcacacacgccgccatcttcggccaagacggcagtgtctgggctcagagctcagctttccctcagttgaagcctgcagagatagcaggaatcaacaaagactttgaagaagccggacatcttgccccaaccgggctattccttggcggtgagaagtacatggttgtccaaggtgaggctggagccgtcatccgagggaaaaagggacctggtggagtcactatcaagaagactactcaagctctagtctttggtatctatgatgaaccgatgaccggagggcaatgcaacttggtcgtggagaggctcggcgattaccttatcgagtctggtctctaagttcactcaaagtgcttcaaacaaatttcatttttcgggttctttcttcactagagaagcacccttctgccatgtattgtgatttgattgttgttgtgcatcaaacaaagttattatactcttaaaaagaacaaagaaacaatcatatttgttatggttttgatcctctcctatgatggctcttatgtttttctcttgtactgtatttcgtaatgtataattacgctttggaataaaaatttgagtttgtg

SEQ ID NO: 30807 - protein, 150 aa, Arabidopsis thaliana
  peptide (1)..(150): Ceres Seq. ID no. 12332217
  misc_feature (21)..(145): Pfam Name: Profilin Pfam Description: Profilin
  misc_feature (20)..(150): Homolog of NCBI NO: 16555785 NR Description: profilin [Capsicum annuum]
  misc_feature (20)..(150): Homolog of NCBI NO: 34922934 NR Description: Profilin (Allergen Pru p 4.02)
  misc_feature (20)..(150): Homolog of NCBI NO: 15809696 NR Description: profilin [Litchi chinensis]
  misc_feature (20)..(150): Homolog of NCBI NO: 12230421 NR Description: Profilin 1
  misc_feature (20)..(150): Homolog of NCBI NO: 1346802 NR Description: PROFILIN 1
  misc_feature (21)..(150): Homolog of NCBI NO: 2781152 NR Description: Profilin I From Arabidopsis Thaliana
  misc_feature (20)..(150): Homolog of NCBI NO: 15224838 NR Description: profilin 1
  misc_feature (20)..(150): Homolog of NCBI NO: 9965571 NR Description: profilin [Arabidopsis thaliana]
  misc_feature (20)..(150): Homolog of NCBI NO: 21554627 NR Description: profilin 2 [Arabidopsis thaliana]
  misc_feature (20)..(150): Homolog of NCBI NO: 15233538 NR Description: profilin 2
KVVQVYKPKARYRRRGRRKMSWQSYVDDHLMCEVEGNHLTHAAIFGQDGSVWAQSSAFPQLKPAEIAGINKDFEEAGHLAPTGLFLGGEKYMVVQGEAGAVIRGKKGPGGVTIKKTTQALVFGIYDEPMTGGQCNLVVERLGDYLIESGL

SEQ ID NO: 30808 - protein, 131 aa, Arabidopsis thaliana
  peptide (1)..(131): Ceres Seq. ID no. 12332218
  misc_feature (2)..(126): Pfam Name: Profilin Pfam Description: Profilin
  misc_feature (1)..(131): Homolog of NCBI NO: 16555785 NR Description: profilin [Capsicum annuum]
  misc_feature (1)..(131): Homolog of NCBI NO: 34922934 NR Description: Profilin (Allergen Pru p 4.02)
  misc_feature (1)..(131): Homolog of NCBI NO: 15809696 NR Description: profilin [Litchi chinensis]
  misc_feature (1)..(131): Homolog of NCBI NO: 12230421 NR Description: Profilin 1
  misc_feature (1)..(131): Homolog of NCBI NO: 1346802 NR Description: PROFILIN 1
  misc_feature (2)..(131): Homolog of NCBI NO: 2781152 NR Description: Profilin I From Arabidopsis Thaliana
  misc_feature (1)..(131): Homolog of NCBI NO: 15224838 NR Description: profilin 1
  misc_feature (1)..(131): Homolog of NCBI NO: 9965571 NR Description: profilin [Arabidopsis thaliana]
  misc_feature (1)..(131): Homolog of NCBI NO: 21554627 NR Description: profilin 2 [Arabidopsis thaliana]
  misc_feature (1)..(131): Homolog of NCBI NO: 15233538 NR Description: profilin 2
MSWQSYVDDHLMCEVEGNHLTHAAIFGQDGSVWAQSSAFPQLKPAEIAGINKDFEEAGHLAPTGLFLGGEKYMVVQGEAGAVIRGKKGPGGVTIKKTTQALVFGIYDEPMTGGQCNLVVERLGDYLIESGL

SEQ ID NO: 30809 - protein, 120 aa, Arabidopsis thaliana
  peptide (1)..(120): Ceres Seq. ID no. 12332219
  misc_feature (1)..(115): Pfam Name: Profilin Pfam Description: Profilin
  misc_feature (1)..(120): Homolog of NCBI NO: 16555785 NR Description: profilin [Capsicum annuum]
  misc_feature (1)..(120): Homolog of NCBI NO: 34922934 NR Description: Profilin (Allergen Pru p 4.02)
  misc_feature (1)..(120): Homolog of NCBI NO: 15809696 NR Description: profilin [Litchi chinensis]
  misc_feature (1)..(120): Homolog of NCBI NO: 12230421 NR Description: Profilin 1
  misc_feature (1)..(120): Homolog of NCBI NO: 1346802 NR Description: PROFILIN 1
  misc_feature (1)..(120): Homolog of NCBI NO: 2781152 NR Description: Profilin I From Arabidopsis Thaliana
  misc_feature (1)..(120): Homolog of NCBI NO: 15224838 NR Description: profilin 1
  misc_feature (1)..(120): Homolog of NCBI NO: 9965571 NR Description: profilin [Arabidopsis thaliana]
  misc_feature (1)..(120): Homolog of NCBI NO: 21554627 NR Description: profilin 2 [Arabidopsis thaliana]
  misc_feature (1)..(120): Homolog of NCBI NO: 15233538 NR Description: profilin 2
MCEVEGNHLTHAAIFGQDGSVWAQSSAFPQLKPAEIAGINKDFEEAGHLAPTGLFLGGEKYMVVQGEAGAVIRGKKGPGGVTIKKTTQALVFGIYDEPMTGGQCNLVVERLGDYLIESGL

SEQ ID NO: 30810 - DNA, 1020 bp, Arabidopsis thaliana
  misc_feature (1)..(1020): Ceres Seq. ID no. 12489584
  misc_feature: MA Experiment ID: 108434 Result: Down-regulated in Transcription
  misc_feature: MA Experiment 108434 PARAMETER Experiment Name: At_Root_Tips_cDNA_P Parameter: Tissue Value: Root Tips
  misc_feature: MA Experiment ID: 108595 Result: Up-regulated in Transcription
  misc_feature: MA Experiment 108595 PARAMETER Experiment Name: At_Ler-pi_Ovule_cDNA_P Parameter: Plant Line Value: null
  misc_feature: MA Experiment ID: 108668 Result: Up-regulated in Transcription
  misc_feature: MA Experiment 108668 PARAMETER Experiment Name: At_2mM_SA_cDNA_P Parameter: Plant Line Value: WS
  misc_feature: MA Experiment 108668 PARAMETER Experiment Name: At_2mM_SA_cDNA_P Parameter: Timepoint (hr) Value: 6
  misc_feature: MA Experiment 108668 PARAMETER Experiment Name: At_2mM_SA_cDNA_P Parameter: Treatment Value: 2mM SA vs. No Treatment
acccactagaaccgttgtaacctacgacccataataatgtaccatctccttatcattatcactacactctccttctcttcaattaacataaccttcgccgtcgatgaagctttcccttcaattcccactaccttcagcgtcgcaacgaaacaacactacgacgtaaaaccaatccaccatgaagtttatgacggagaaaggaagatatacgacatcagccaccagtacacgccggagttgccggtttgggagtcttcagaaggactagggaactttcttagacttgccgtgagtatgaagaatggatccgatgctaatatctcgaagatggaactatctgttcactctggaactcatgttgatgcaccaggccatttccatgaccattattatgagtctggttttgatactgattcacttgatcttcaaatccttaatggtcctgctttattggttgatgttccaagagataagaacatttcagctgaggttatgaaatcactacatattccaagagggatccgtcgtgttctctttaaaacattgaacactgataggaggcttatgtttaagaaagaatttgattcaagctttgtcgggtttatggtcgatggggcgaaatggttggttgaaaatacagacatcaaacttgttgggcttgattatctttcatttgctgcttatgatgaagcacctgcgacgcataggtttatacttgaacgacgggatataatccctgtcgaagcgctgaagctggatgacgtggaggtaggaatgtacacgcttcattgcttaccgttaagattggttggagcggaaggagcaccaacgagatgcattctcatcaagtgattcagttcatctttttctatctaagttgtatatgaattactgataataaacaataggctttttggcttcttgcttccaagatctcataaccatatcgaagatgttaacatatgggatgattttgttgtaaaagaagcgtctaatcttattatataaagtatggttttc

SEQ ID NO: 30811 - protein, 271 aa, Arabidopsis thaliana
  peptide (1)..(271): Ceres Seq. ID no. 12489585
  misc_feature (57)..(257): Pfam Name: Putative cyclase Pfam Description: Putative cyclase
  misc_feature (57)..(269): Homolog of NCBI NO: 23056289 NR Description: hypothetical protein [Geobacter metallireducens]
  misc_feature (56)..(269): Homolog of NCBI NO: 39998438 NR Description: cyclase, putative [Geobacter sulfurreducens PCA]
  misc_feature (57)..(269): Homolog of NCBI NO: 16330650 NR Description: hypothetical protein [Synechocystis sp. PCC 6803]
  misc_feature (58)..(271): Homolog of NCBI NO: 23016903 NR Description: hypothetical protein [Magnetospirillum
  misc_feature (4)..(149): Homolog of NCBI NO: 7486023 NR Description: hypothetical protein F23E12.220 - Arabidopsis
  misc_feature (42)..(230): Homolog of NCBI NO: 7486287 NR Description: hypothetical protein F28A23.60 - Arabidopsis
  misc_feature (1)..(271): Homolog of NCBI NO: 35215089 NR Description: hypothetical protein [Oryza sativa (japonica
  misc_feature (4)..(270): Homolog of NCBI NO: 18418598 NR Description: putative protein
  misc_feature (42)..(271): Homolog of NCBI NO: 18418393 NR Description: putative protein
  misc_feature (1)..(271): Homolog of NCBI NO: 15219416 NR Description: hypothetical protein; protein id: At1g44542.1
MYHLLIIITTLSFSSINITFAVDEAFPSIPTTFSVATKQHYDVKPIHHEVYDGERKIYDISHQYTPELPVWESSEGLGNFLRLAVSMKNGSDANISKMELSVHSGTHVDAPGHFHDHYYESGFDTDSLDLQILNGPALLVDVPRDKNISAEVMKSLHIPRGIRRVLFKTLNTDRRLMFKKEFDSSFVGFMVDGAKWLVENTDIKLVGLDYLSFAAYDEAPATHRFILERRDIIPVEALKLDDVEVGMYTLHCLPLRLVGAEGAPTRCILIK

SEQ ID NO: 30812 - protein, 185 aa, Arabidopsis thaliana
  peptide (1)..(185): Ceres Seq. ID no. 12489586
  misc_feature (1)..(171): Pfam Name: Putative cyclase Pfam Description: Putative cyclase
  misc_feature (1)..(183): Homolog of NCBI NO: 23056289 NR Description: hypothetical protein [Geobacter metallireducens]
  misc_feature (1)..(183): Homolog of NCBI NO: 39998438 NR Description: cyclase, putative [Geobacter sulfurreducens PCA]
  misc_feature (1)..(183): Homolog of NCBI NO: 16330650 NR Description: hypothetical protein [Synechocystis sp. PCC 6803]
  misc_feature (1)..(185): Homolog of NCBI NO: 23016903 NR Description: hypothetical protein [Magnetospirillum
  misc_feature (1)..(63): Homolog of NCBI NO: 7486023 NR Description: hypothetical protein F23E12.220 - Arabidopsis
  misc_feature (1)..(144): Homolog of NCBI NO: 7486287 NR Description: hypothetical protein F28A23.60 - Arabidopsis
  misc_feature (1)..(185): Homolog of NCBI NO: 35215089 NR Description: hypothetical protein [Oryza sativa (japonica
  misc_feature (1)..(184): Homolog of NCBI NO: 18418598 NR Description: putative protein
  misc_feature (1)..(185): Homolog of NCBI NO: 18418393 NR Description: putative protein
  misc_feature (1)..(185): Homolog of NCBI NO: 15219416 NR Description: hypothetical protein; protein id: At1g44542.1
MKNGSDANISKMELSVHSGTHVDAPGHFHDHYYESGFDTDSLDLQILNGPALLVDVPRDKNISAEVMKSLHIPRGIRRVLFKTLNTDRRLMFKKEFDSSFVGFMVDGAKWLVENTDIKLVGLDYLSFAAYDEAPATHRFILERRDIIPVEALKLDDVEVGMYTLHCLPLRLVGAEGAPTRCILIK

SEQ ID NO: 30813 - protein, 174 aa, Arabidopsis thaliana
  peptide (1)..(174): Ceres Seq. ID no. 12489587
  misc_feature (1)..(160): Pfam Name: Putative cyclase Pfam Description: Putative cyclase
  misc_feature (1)..(172): Homolog of NCBI NO: 23056289 NR Description: hypothetical protein [Geobacter metallireducens]
  misc_feature (1)..(172): Homolog of NCBI NO: 39998438 NR Description: cyclase, putative [Geobacter sulfurreducens PCA]
  misc_feature (1)..(172): Homolog of NCBI NO: 16330650 NR Description: hypothetical protein [Synechocystis sp. PCC 6803]
  misc_feature (1)..(174): Homolog of NCBI NO: 23016903 NR Description: hypothetical protein [Magnetospirillum
  misc_feature (1)..(52): Homolog of NCBI NO: 7486023 NR Description: hypothetical protein F23E12.220 - Arabidopsis
  misc_feature (1)..(133): Homolog of NCBI NO: 7486287 NR Description: hypothetical protein F28A23.60 - Arabidopsis
  misc_feature (1)..(174): Homolog of NCBI NO: 35215089 NR Description: hypothetical protein [Oryza sativa (japonica
  misc_feature (1)..(173): Homolog of NCBI NO: 18418598 NR Description: putative protein
  misc_feature (1)..(174): Homolog of NCBI NO: 18418393 NR Description: putative protein
  misc_feature (1)..(174): Homolog of NCBI NO: 15219416 NR Description: hypothetical protein; protein id: At1g44542.1
MELSVHSGTHVDAPGHFHDHYYESGFDTDSLDLQILNGPALLVDVPRDKNISAEVMKSLHIPRGIRRVLFKTLNTDRRLMFKKEFDSSFVGFMVDGAKWLVENTDIKLVGLDYLSFAAYDEAPATHRFILERRDIIPVEALKLDDVEVGMYTLHCLPLRLVGAEGAPTRCILIK

SEQ ID NO: 30814 - DNA, 1081 bp, Arabidopsis thaliana
  misc_feature (1)..(1081): Ceres Seq. ID no. 13489874
  misc_feature: MA Experiment ID: 108435 Result: Down-regulated in Transcription
  misc_feature: MA Experiment 108435 PARAMETER Experiment Name: At_stm_Mutants_cDNA_P Parameter: Plant Line Value: wt Landsburg vs stm
  misc_feature: MA Experiment 108435 PARAMETER Experiment Name: At_stm_Mutants_cDNA_P Parameter: Tissue Value: Shoot Apical Meristem Region
  misc_feature: MA Experiment ID: 108501 Result: Down-regulated in Transcription
  misc_feature: MA Experiment 108501 PARAMETER Experiment Name: At_ap2_floral_buds_cDNA_P Parameter: Plant Line Value: ap2 (Ler.)
  misc_feature: MA Experiment 108501 PARAMETER Experiment Name: At_ap2_floral_buds_cDNA_P Parameter: Tissue Value: Closed Flower
  misc_feature: MA Experiment ID: 108577 Result: Up-regulated in Transcription
  misc_feature: MA Experiment 108577 PARAMETER Experiment Name: At_42deg_Heat_cDNA_P Parameter: Temperature (deg C) Value: 42 vs. 22
  misc_feature: MA Experiment 108577 PARAMETER Experiment Name: At_42deg_Heat_cDNA_P Parameter: Timepoint (hr) Value: 6
  misc_feature: MA Experiment 108577 PARAMETER Experiment Name: At_42deg_Heat_cDNA_P Parameter: Tissue Value: Aerial
  misc_feature: MA Experiment ID: 20000179 Result: Up-regulated in Transcription
  misc_feature: MA Experiment 20000179 PARAMETER Experiment Name: At_Germinating_Seeds_P Parameter: Age (hr) Value: 6 vs. 0
  misc_feature: MA Experiment 20000179 PARAMETER Experiment Name: At_Germinating_Seeds_P Parameter: Tissue Value: Germinating Seeds
  misc_feature: MA Experiment ID: 20000184 Result: Down-regulated in Transcription
  misc_feature: MA Experiment 20000184 PARAMETER Experiment Name: At_Shoots__P Parameter: Age (day) Value: 7
  misc_feature: MA Experiment 20000184 PARAMETER Experiment Name: At_Shoots__P Parameter: Tissue Value: Shoots vs. Whole Plant
  misc_feature: MA Experiment ID: 20000224 Result: Up-regulated in Transcription
  misc_feature: MA Experiment ID: 20000234 Result: Down-regulated in Transcription
  misc_feature: MA Experiment 20000234 PARAMETER Experiment Name: At_Siliques_P Parameter: Age (day) Value: 21
  misc_feature: MA Experiment 20000234 PARAMETER Experiment Name: At_Siliques_P Parameter: Organism Value: A. thaliana
  misc_feature: MA Experiment 20000234 PARAMETER Experiment Name: At_Siliques_P Parameter: Plant Line Value: WS
  misc_feature: MA Experiment 20000234 PARAMETER Experiment Name: At_Siliques_P Parameter: Tissue Value: Less Than 5mm Siliques vs. Whole Plant
  misc_feature: MA Experiment ID: 20000264 Result: Down-regulated in Transcription
  misc_feature: MA Experiment 20000264 PARAMETER Experiment Name: At_Open_Flower_P Parameter: Age (day) Value: 21
  misc_feature: MA Experiment 20000264 PARAMETER Experiment Name: At_Open_Flower_P Parameter: Plant Line Value: WS
  misc_feature: MA Experiment 20000264 PARAMETER Experiment Name: At_Open_Flower_P Parameter: Tissue Value: Open Flower vs. Whole Plant
  misc_feature: MA Experiment ID: 20000265 Result: Down-regulated in Transcription
  misc_feature: MA Experiment 20000265 PARAMETER Experiment Name: At_Open_Flower_P Parameter: Age (day) Value: 21
  misc_feature: MA Experiment 20000265 PARAMETER Experiment Name: At_Open_Flower_P Parameter: Plant Line Value: WS
  misc_feature: MA Experiment 20000265 PARAMETER Experiment Name: At_Open_Flower_P Parameter: Tissue Value: Closed Flower vs. Whole Plant
  misc_feature: MA Experiment ID: 20000437 Result: Up-regulated in Transcription
  misc_feature: MA Experiment 20000437 PARAMETER Experiment Name: At_Drought_P Parameter: Age (day) Value: 8
  misc_feature: MA Experiment 20000437 PARAMETER Experiment Name: At_Drought_P Parameter: Organism Value: A. thaliana
  misc_feature: MA Experiment 20000437 PARAMETER Experiment Name: At_Drought_P Parameter: Plant Line Value: WS
  misc_feature: MA Experiment 20000437 PARAMETER Experiment Name: At_Drought_P Parameter: Timepoint (hr) Value: 24
  misc_feature: MA Experiment 20000437 PARAMETER Experiment Name: At_Drought_P Parameter: Tissue Value: Whole Plant
  misc_feature: MA Experiment 20000437 PARAMETER Experiment Name: At_Drought_P Parameter: Treatment Value: Drought vs. No Drought
  misc_feature: MA Experiment ID: 20000496 Result: Down-regulated in Transcription
  misc_feature: MA Experiment 20000496 PARAMETER Experiment Name: At_Guard_Cells_P Parameter: Harvest Date Value: 7/19/2002
  misc_feature: MA Experiment 20000496 PARAMETER Experiment Name: At_Guard_Cells_P Parameter: Organism Value: Canola
  misc_feature: MA Experiment 20000496 PARAMETER Experiment Name: At_Guard_Cells_P Parameter: Tissue Value: Guard Cells vs. Leaves
  misc_feature: MA Experiment ID: 20001557 Result: Down-regulated in Transcription
  misc_feature: MA Experiment 20001557 PARAMETER Experiment Name: At_Drought_Soil_Dry_P Parameter: Age (day) Value: 27
  misc_feature: MA Experiment 20001557 PARAMETER Experiment Name: At_Drought_Soil_Dry_P Parameter: Organism Value: A. thaliana
  misc_feature: MA Experiment 20001557 PARAMETER Experiment Name: At_Drought_Soil_Dry_P Parameter: Plant Line Value: WS
  misc_feature: MA Experiment 20001557 PARAMETER Experiment Name: At_Drought_Soil_Dry_P Parameter: Post Timepoint (hr) Value: 3
  misc_feature: MA Experiment 20001557 PARAMETER Experiment Name: At_Drought_Soil_Dry_P Parameter: Post-Treatment Value: Re-Water vs. No Drought
  misc_feature: MA Experiment 20001557 PARAMETER Experiment Name: At_Drought_Soil_Dry_P Parameter: Timepoint (day) Value: 13
  misc_feature: MA Experiment 20001557 PARAMETER Experiment Name: At_Drought_Soil_Dry_P Parameter: Treatment Value: Drought vs. No Drought
  misc_feature: MA Experiment ID: 20001558 Result: Down-regulated in Transcription
  misc_feature: MA Experiment 20001558 PARAMETER Experiment Name: At_Drought_Soil_Dry_P Parameter: Age (day) Value: 27
  misc_feature: MA Experiment 20001558 PARAMETER Experiment Name: At_Drought_Soil_Dry_P Parameter: Organism Value: A. thaliana
  misc_feature: MA Experiment 20001558 PARAMETER Experiment Name: At_Drought_Soil_Dry_P Parameter: Plant Line Value: WS
  misc_feature: MA Experiment 20001558 PARAMETER Experiment Name: At_Drought_Soil_Dry_P Parameter: Post Timepoint (hr) Value: 6
  misc_feature: MA Experiment 20001558 PARAMETER Experiment Name: At_Drought_Soil_Dry_P Parameter: Post-Treatment Value: Re-Water vs. No Drought
  misc_feature: MA Experiment 20001558 PARAMETER Experiment Name: At_Drought_Soil_Dry_P Parameter: Timepoint (day) Value: 13
  misc_feature: MA Experiment 20001558 PARAMETER Experiment Name: At_Drought_Soil_Dry_P Parameter: Treatment Value: Drought vs. No Drought
aaaacgcaccgctttgtttgattgttcctccttgtccccgaccagagaaatacaaaggaagaagaagaagagttgtttgattatctttaagcaaagaggaaactgttttgcttctagatccgatccaatccaatcaaacaaaggatccgattgatcagaaaaaatccaccaaatttctcaagatcgaaacatataattgaagatgagcgacgtatttgaagggtacgagcgtcaatactgcgagctctcaaccaatctctctagaaaatgtcactctgcatcggttctctccaacggagaggagaagaaggggaagattgctcagatcaagtctggaatagacgaagctgatgtcttgatccggaaaatggatcttgaggcaagaagtttgcagccgagtgctaaagctgtgtgtctttctaaactaagagagtataaatctgatctgaaccaattgaagaaggaattcaaacgagtctcttccgcagatgctaagccgtcttcccgtgaagagttgatggaatccggaatggcggatctgcatgcagtatctgctgatcaaagaggaagattggcaatgtccgtggagaggcttgaccaatcaagtgacagaatcagggagagtagaagactaatgctggagacagaagaggttggcatctcaattgtccaagatttgagtcagcaacgccaaaccctccttcatgcgcacaacaagcttcatggtgtggatgacgccattgacaagagcaagaaggtgttgacggctatgtcaaggagaatgactaggaacaaatggatcattacatcggtaatcgtggctctcgttctcgccatcatcttgatcatctcatacaagctttctcattaatatactcaaaaaacattattcatcgtgattgtgtatatatatatgatggttgattttctctgtaatggcccaagtggttacttgtatttttaagtacgatgtttgtattgaagtggcaacacttttaacattcataaggtttcccaagtcttttcttttttgtctttttttccaaaaaagtggtactattttatataaagcagatgtttc

SEQ ID NO: 30815 - protein, 222 aa, Arabidopsis thaliana
  peptide (1)..(222): Ceres Seq. ID no. 13489875
  misc_feature (126)..(222): Homolog of NCBI NO: 26451851 NR Description: putative v-SNARE AtVTI1b [Arabidopsis thaliana]
  misc_feature (56)..(221): Homolog of NCBI NO: 26451552 NR Description: putative vesicle transport protein [Arabidopsis
  misc_feature (1)..(222): Homolog of NCBI NO: 34914100 NR Description: similar to vesicle transport protein
  misc_feature (1)..(221): Homolog of NCBI NO: 15228600 NR Description: SNARE protein AtVTI13 [Arabidopsis thaliana]
  misc_feature (1)..(221): Homolog of NCBI NO: 6690274 NR Description: v-SNARE AtVTI1a [Arabidopsis thaliana]
  misc_feature (1)..(221): Homolog of NCBI NO: 15241780 NR Description: v-SNARE AtVTI1a (ZIG) [Arabidopsis thaliana]
  misc_feature (1)..(222): Homolog of NCBI NO: 34910406 NR Description: putative vesicle transport v-SNARE protein
  misc_feature (1)..(222): Homolog of NCBI NO: 27805772 NR Description: Vesicle transport v-SNARE 12 (AtVTI12) (Vesicle v-SNARE protein VTI1b) (Vesicle soluble NSF attachment protein
  misc_feature (1)..(222): Homolog of NCBI NO: 18396008 NR Description: v-SNARE protein AtVTI1b, putative [Arabidopsis
  misc_feature (1)..(222): Homolog of NCBI NO: 6690276 NR Description: v-SNARE AtVTI1b [Arabidopsis thaliana]
MSDVFEGYERQYCELSTNLSRKCHSASVLSNGEEKKGKIAQIKSGIDEADVLIRKMDLEARSLQPSAKAVCLSKLREYKSDLNQLKKEFKRVSSADAKPSSREELMESGMADLHAVSADQRGRLAMSVERLDQSSDRIRESRRLMLETEEVGISIVQDLSQQRQTLLHAHNKLHGVDDAIDKSKKVLTAMSRRMTRNKWIITSVIVALVLAIILIISYKLSH

SEQ ID NO: 30816 - protein, 167 aa, Arabidopsis thaliana
  peptide (1)..(167): Ceres Seq. ID no. 13489876
  misc_feature (71)..(167): Homolog of NCBI NO: 26451851 NR Description: putative v-SNARE AtVTI1b [Arabidopsis thaliana]
  misc_feature (1)..(166): Homolog of NCBI NO: 26451552 NR Description: putative vesicle transport protein [Arabidopsis
  misc_feature (1)..(167): Homolog of NCBI NO: 34914100 NR Description: similar to vesicle transport protein
  misc_feature (1)..(166): Homolog of NCBI NO: 15228600 NR Description: SNARE protein AtVTI13 [Arabidopsis thaliana]
  misc_feature (1)..(166): Homolog of NCBI NO: 6690274 NR Description: v-SNARE AtVTI1a [Arabidopsis thaliana]
  misc_feature (1)..(166): Homolog of NCBI NO: 15241780 NR Description: v-SNARE AtVTI1a (ZIG) [Arabidopsis thaliana]
  misc_feature (1)..(167): Homolog of NCBI NO: 34910406 NR Description: putative vesicle transport v-SNARE protein
  misc_feature (1)..(167): Homolog of NCBI NO: 27805772 NR Description: Vesicle transport v-SNARE 12 (AtVTI12) (Vesicle v-SNARE protein VTI1b) (Vesicle soluble NSF attachment protein
  misc_feature (1)..(167): Homolog of NCBI NO: 18396008 NR Description: v-SNARE protein AtVTI1b, putative [Arabidopsis
  misc_feature (1)..(167): Homolog of NCBI NO: 6690276 NR Description: v-SNARE AtVTI1b [Arabidopsis thaliana]
MDLEARSLQPSAKAVCLSKLREYKSDLNQLKKEFKRVSSADAKPSSREELMESGMADLHAVSADQRGRLAMSVERLDQSSDRIRESRRLMLETEEVGISIVQDLSQQRQTLLHAHNKLHGVDDAIDKSKKVLTAMSRRMTRNKWIITSVIVALVLAIILIISYKLSH

SEQ ID NO: 30817 - protein, 117 aa, Arabidopsis thaliana
  peptide (1)..(117): Ceres Seq. ID no. 13489877
  misc_feature (21)..(117): Homolog of NCBI NO: 26451851 NR Description: putative v-SNARE AtVTI1b [Arabidopsis thaliana]
  misc_feature (1)..(116): Homolog of NCBI NO: 26451552 NR Description: putative vesicle transport protein [Arabidopsis
  misc_feature (1)..(117): Homolog of NCBI NO: 34914100 NR Description: similar to vesicle transport protein
  misc_feature (1)..(116): Homolog of NCBI NO: 15228600 NR Description: SNARE protein AtVTI13 [Arabidopsis thaliana]
  misc_feature (1)..(116): Homolog of NCBI NO: 6690274 NR Description: v-SNARE AtVTI1a [Arabidopsis thaliana]
  misc_feature (1)..(116): Homolog of NCBI NO: 15241780 NR Description: v-SNARE AtVTI1a (ZIG) [Arabidopsis thaliana]
  misc_feature (1)..(117): Homolog of NCBI NO: 34910406 NR Description: putative vesicle transport v-SNARE protein
  misc_feature (1)..(117): Homolog of NCBI NO: 27805772 NR Description: Vesicle transport v-SNARE 12 (AtVTI12) (Vesicle v-SNARE protein VTI1b) (Vesicle soluble NSF attachment protein
  misc_feature (1)..(117): Homolog of NCBI NO: 18396008 NR Description: v-SNARE protein AtVTI1b, putative [Arabidopsis
  misc_feature (1)..(117): Homolog of NCBI NO: 6690276 NR Description: v-SNARE AtVTI1b [Arabidopsis thaliana]
MESGMADLHAVSADQRGRLAMSVERLDQSSDRIRESRRLMLETEEVGISIVQDLSQQRQTLLHAHNKLHGVDDAIDKSKKVLTAMSRRMTRNKWIITSVIVALVLAIILIISYKLSH

SEQ ID NO: 30818 - DNA, 782 bp, Arabidopsis thaliana
  misc_feature (1)..(782): Ceres Seq. ID no. 12323507
  misc_feature: MA Experiment ID: 108462 Result: Up-regulated in Transcription
  misc_feature: MA Experiment 108462 PARAMETER Experiment Name: At_Germinating_Seeds_cDNA_P Parameter: Age (day) Value: 2 vs. 0
  misc_feature: MA Experiment 108462 PARAMETER Experiment Name: At_Germinating_Seeds_cDNA_P Parameter: Tissue Value: Germinating Seeds
  misc_feature: MA Experiment ID: 20000113 Result: Down-regulated in Transcription
  misc_feature: MA Experiment 20000113 PARAMETER Experiment Name: At_42deg_Heat_cDNA_P Parameter: Temperature (deg C) Value: 42 vs. 22
  misc_feature: MA Experiment 20000113 PARAMETER Experiment Name: At_42deg_Heat_cDNA_P Parameter: Timepoint (hr) Value: 8
  misc_feature: MA Experiment 20000113 PARAMETER Experiment Name: At_42deg_Heat_cDNA_P Parameter: Tissue Value: Aerial
  misc_feature: MA Experiment ID: 20000179 Result: Up-regulated in Transcription
  misc_feature: MA Experiment 20000179 PARAMETER Experiment Name: At_Germinating_Seeds_P Parameter: Age (hr) Value: 6 vs. 0
  misc_feature: MA Experiment 20000179 PARAMETER Experiment Name: At_Germinating_Seeds_P Parameter: Tissue Value: Germinating Seeds
  misc_feature: MA Experiment ID: 20000185 Result: Up-regulated in Transcription
  misc_feature: MA Experiment 20000185 PARAMETER Experiment Name: At_Roots__P Parameter: Age (day) Value: 7 vs. 21
  misc_feature: MA Experiment 20000185 PARAMETER Experiment Name: At_Roots__P Parameter: Organism Value: A. thaliana
  misc_feature: MA Experiment 20000185 PARAMETER Experiment Name: At_Roots__P Parameter: Tissue Value: Roots vs. Whole Plant
  misc_feature: MA Experiment ID: 20000234 Result: Up-regulated in Transcription
  misc_feature: MA Experiment 20000234 PARAMETER Experiment Name: At_Siliques_P Parameter: Age (day) Value: 21
  misc_feature: MA Experiment 20000234 PARAMETER Experiment Name: At_Siliques_P Parameter: Organism Value: A. thaliana
  misc_feature: MA Experiment 20000234 PARAMETER Experiment Name: At_Siliques_P Parameter: Plant Line Value: WS
  misc_feature: MA Experiment 20000234 PARAMETER Experiment Name: At_Siliques_P Parameter: Tissue Value: Less Than 5mm Siliques vs. Whole Plant
  misc_feature: MA Experiment ID: 20000235 Result: Up-regulated in Transcription
  misc_feature: MA Experiment 20000235 PARAMETER Experiment Name: At_Siliques_P Parameter: Age (day) Value: 21
  misc_feature: MA Experiment 20000235 PARAMETER Experiment Name: At_Siliques_P Parameter: Organism Value: A. thaliana
  misc_feature: MA Experiment 20000235 PARAMETER Experiment Name: At_Siliques_P Parameter: Plant Line Value: WS
  misc_feature: MA Experiment 20000235 PARAMETER Experiment Name: At_Siliques_P Parameter: Tissue Value: 5-10mm Siliques vs. Whole Plant
  misc_feature: MA Experiment ID: 20000495 Result: Up-regulated in Transcription
  misc_feature: MA Experiment 20000495 PARAMETER Experiment Name: At_Guard_Cells_P Parameter: Harvest Date Value: 8/2/2002
  misc_feature: MA Experiment 20000495 PARAMETER Experiment Name: At_Guard_Cells_P Parameter: Organism Value: A. thaliana
  misc_feature: MA Experiment 20000495 PARAMETER Experiment Name: At_Guard_Cells_P Parameter: Tissue Value: Guard Cells vs. Leaves
actactctgttttcacttttcgatttgagaaaaaaaaaaacgatcacgaagatggcgaaagcaagctttattctactcggaactctcttcctcttcggagccatagcttcaattcaggcaaaagaagatctcaaggaggttactcacaaggtttacttcgatgtagagatcgacggcaaatccgctggtcgcgttgttataggactatttggcaaggcagttcctaaaactgcagaaaacttcagagctttgtgcacaggggagaaaggtgtagggaagagtgggaaacctctacactacaagggaagcaagttccatcgaatcattcccagctttatgatccagggaggtgacttcacgcatgggaacggtatgggtggagaatcaatctatggtcagaagtttgctgatgagaacttcaagctgaagcacactggaccaggtgtactttcaatggcgaactcgggagaagacacaaatggttcgcagttttttatcacaacggtgacaacaagctggttagatggaaggcatgtggtgtttgggaaagtggtgcaaggaatggatgtagtttataagattgaagctgagggcaaacaaagcggaactcctaagagcaaagtcgtaattgcagacagtggagaacttcctctctaagaatagcattttaaagttactcttacgagttagttgtaatctaaacacgtcccaaatgctacaagaacagaatggtgtcactggactctgaaatttcgttttcttgcgtaacagacttttccatg

SEQ ID NO: 30819 - protein, 218 aa, Arabidopsis thaliana
  peptide (1)..(218): Ceres Seq. ID no. 12323508
  misc_feature (51)..(216): Homolog of NCBI NO: 39582840 NR Description: Hypothetical protein CBG18578 [Caenorhabditis
  misc_feature (50)..(216): Homolog of NCBI NO: 1480465 NR Description: cyclophilin Ovcyp-2
  misc_feature (50)..(216): Homolog of NCBI NO: 863016 NR Description: cyclophilin
  misc_feature (50)..(216): Homolog of NCBI NO: 17566266 NR Description: CYcloPhilin family CYP-7 (18.4 kD) (cyp-7)
  misc_feature (20)..(216): Homolog of NCBI NO: 5731960 NR Description: cyclophilin B [Dictyostelium discoideum]
  misc_feature (39)..(218): Homolog of NCBI NO: 18410386 NR Description: cyclophilin-like protein
  misc_feature (18)..(218): Homolog of NCBI NO: 15237739 NR Description: cyclophilin ROC7
  misc_feature (18)..(218): Homolog of NCBI NO: 21554007 NR Description: cyclophilin [Arabidopsis thaliana]
  misc_feature (18)..(218): Homolog of NCBI NO: 11270326 NR Description: peptidylprolyl isomerase (EC 5.2.1.8) CYP5
  misc_feature (18)..(218): Homolog of NCBI NO: 15227674 NR Description: cyclophilin
TTLFSLFDLRKKKTITKMAKASFILLGTLFLFGAIASIQAKEDLKEVTHKVYFDVEIDGKSAGRVVIGLFGKAVPKTAENFRALCTGEKGVGKSGKPLHYKGSKFHRIIPSFMIQGGDFTHGNGMGGESIYGQKFADENFKLKHTGPGVLSMANSGEDTNGSQFFITTVTTSWLDGRHVVFGKVVQGMDVVYKIEAEGKQSGTPKSKVVIADSGELPL

SEQ ID NO: 30820 - protein, 201 aa, Arabidopsis thaliana
  peptide (1)..(201): Ceres Seq. ID no. 12323509
  misc_feature (34)..(199): Homolog of NCBI NO: 39582840 NR Description: Hypothetical protein CBG18578 [Caenorhabditis
  misc_feature (33)..(199): Homolog of NCBI NO: 1480465 NR Description: cyclophilin Ovcyp-2
  misc_feature (33)..(199): Homolog of NCBI NO: 863016 NR Description: cyclophilin
  misc_feature (33)..(199): Homolog of NCBI NO: 17566266 NR Description: CYcloPhilin family CYP-7 (18.4 kD) (cyp-7)
  misc_feature (3)..(199): Homolog of NCBI NO: 5731960 NR Description: cyclophilin B [Dictyostelium discoideum]
  misc_feature (22)..(201): Homolog of NCBI NO: 18410386 NR Description: cyclophilin-like protein
  misc_feature (1)..(201): Homolog of NCBI NO: 15237739 NR Description: cyclophilin ROC7
  misc_feature (1)..(201): Homolog of NCBI NO: 21554007 NR Description: cyclophilin [Arabidopsis thaliana]
  misc_feature (1)..(201): Homolog of NCBI NO: 11270326 NR Description: peptidylprolyl isomerase (EC 5.2.1.8) CYP5
  misc_feature (1)..(201): Homolog of NCBI NO: 15227674 NR Description: cyclophilin
MAKASFILLGTLFLFGAIASIQAKEDLKEVTHKVYFDVEIDGKSAGRVVIGLFGKAVPKTAENFRALCTGEKGVGKSGKPLHYKGSKFHRIIPSFMIQGGDFTHGNGMGGESIYGQKFADENFKLKHTGPGVLSMANSGEDTNGSQFFITTVTTSWLDGRHVVFGKVVQGMDVVYKIEAEGKQSGTPKSKVVIADSGELPL

SEQ ID NO: 30821 - DNA, 954 bp, Arabidopsis thaliana
  misc_feature (1)..(954): Ceres Seq. ID no. 12357683
  misc_feature: MA Experiment ID: 20000112 Result: Up-regulated in Transcription
  misc_feature: MA Experiment 20000112 PARAMETER Experiment Name: At_42deg_Heat_cDNA_P Parameter: Temperature (deg C) Value: 42 vs. 22
  misc_feature: MA Experiment 20000112 PARAMETER Experiment Name: At_42deg_Heat_cDNA_P Parameter: Timepoint (hr) Value: 2
  misc_feature: MA Experiment 20000112 PARAMETER Experiment Name: At_42deg_Heat_cDNA_P Parameter: Tissue Value: Aerial
  misc_feature: MA Experiment ID: 20000264 Result: Up-regulated in Transcription
  misc_feature: MA Experiment 20000264 PARAMETER Experiment Name: At_Open_Flower_P Parameter: Age (day) Value: 21
  misc_feature: MA Experiment 20000264 PARAMETER Experiment Name: At_Open_Flower_P Parameter: Plant Line Value: WS
  misc_feature: MA Experiment 20000264 PARAMETER Experiment Name: At_Open_Flower_P Parameter: Tissue Value: Open Flower vs. Whole Plant
  misc_feature: MA Experiment ID: 20000286 Result: Up-regulated in Transcription
  misc_feature: MA Experiment 20000286 PARAMETER Experiment Name: At_Open_Flower_P Parameter: Age (day) Value: 21
  misc_feature: MA Experiment 20000286 PARAMETER Experiment Name: At_Open_Flower_P Parameter: Plant Line Value: WS
  misc_feature: MA Experiment 20000286 PARAMETER Experiment Name: At_Open_Flower_P Parameter: Tissue Value: Half Open vs. Whole Plant
acattacgaaaagtactagtttattggtgttattcatcgctgctcaaggtggcaaaccaaggagaacaagaagagtccagggccaatgagcctgagggtatcaaatcagtgattgatgacatctacaattttgaagacgaccctgtggttgatagattcaatagatttggaacggagatgtctgccatggtctcggccttgacacaggtggtttctgctcgctctcagactgaagctgaaggtgctcactcttcttcctcctcggctggacataagagagaatggcttggaatcgattctgttcctattccctcatcatttgctcgtgtagactcttcacataatccgatcgaagaatccataagaaaggcatttccagaggaagcaagggagaaaaaaaggaggtacagaggagtaaggcagagaccatggggcaaatgggcagctgagatacgtgatccacatagagccgctagggtttggctcgggacgtttgatacagcggaggccgcggctagagcctacgacgaggctgcactccggttccgtggaaataaagcaaagctaaatttcccagaggatgtaaggattcttcctcctccccctcctcttcttcgttcaccagctgacacggtggcgaataaagcagaagaggatctgataaattattggagttatacaaagttgttgcaaagttcaggccaacggtcatttctcgagcgaggacaagaagagagtaataacatatttgaacattcaccaatggaacaacctctgcctccttcaagttctggtccaagttcctctaattttcctgcaccttctctacctaatacatagtttcacttttattaaagctctacaaatacaattaaatacatagctaaatgaaaatgattttcttgtctgtataccttcttaagtgctaaacaatatattgtactctttgtttcc

SEQ ID NO: 30822 - protein, 279 aa, Arabidopsis thaliana
  peptide (1)..(279): Ceres Seq. ID no. 12357684
  misc_feature (133)..(197): Pfam Name: AP2 domain Pfam Description: AP2 domain
  misc_feature (130)..(222): Homolog of NCBI NO: 10798644 NR Description: AP2 domain-containing transcription factor
  misc_feature (131)..(195): Homolog of NCBI NO: 2281637 NR Description: AP2 domain containing protein RAP2.6 [Arabidopsis
  misc_feature (67)..(197): Homolog of NCBI NO: 15240379 NR Description: putative protein; protein id: At5g61890.1
  misc_feature (102)..(209): Homolog of NCBI NO: 15226153 NR Description: putative AP2 domain transcription factor; protein
  misc_feature (63)..(196): Homolog of NCBI NO: 38347164 NR Description: OSJNBa0039C07.10 [Oryza sativa (japonica
  misc_feature (131)..(230): Homolog of NCBI NO: 15238232 NR Description: putative protein; protein id: At5g64750.1
  misc_feature (63)..(195): Homolog of NCBI NO: 15218275 NR Description: AP2 domain protein RAP2.6
  misc_feature (105)..(231): Homolog of NCBI NO: 34908616 NR Description: P0677H08.8 [Oryza sativa (japonica
  misc_feature (60)..(279): Homolog of NCBI NO: 15240610 NR Description: putative protein; protein id: At5g50080.1
  misc_feature (60)..(279): Homolog of NCBI NO: 34221731 NR Description: putative AP2 domain transcription factor
TLRKVLVYWCYSSLLKVANQGEQEESRANEPEGIKSVIDDIYNFEDDPVVDRFNRFGTEMSAMVSALTQVVSARSQTEAEGAHSSSSSAGHKREWLGIDSVPIPSSFARVDSSHNPIEESIRKAFPEEAREKKRRYRGVRQRPWGKWAAEIRDPHRAARVWLGTFDTAEAAARAYDEAALRFRGNKAKLNFPEDVRILPPPPPLLRSPADTVANKAEEDLINYWSYTKLLQSSGQRSFLERGQEESNNIFEHSPMEQPLPPSSSGPSSSNFPAPSLPNT

SEQ ID NO: 30823 - protein, 220 aa, Arabidopsis thaliana
  peptide (1)..(220): Ceres Seq. ID no. 12357685
  misc_feature (74)..(138): Pfam Name: AP2 domain Pfam Description: AP2 domain
  misc_feature (71)..(163): Homolog of NCBI NO: 10798644 NR Description: AP2 domain-containing transcription factor
  misc_feature (72)..(136): Homolog of NCBI NO: 2281637 NR Description: AP2 domain containing protein RAP2.6 [Arabidopsis
  misc_feature (8)..(138): Homolog of NCBI NO: 15240379 NR Description: putative protein; protein id: At5g61890.1
  misc_feature (43)..(150): Homolog of NCBI NO: 15226153 NR Description: putative AP2 domain transcription factor; protein
  misc_feature (4)..(137): Homolog of NCBI NO: 38347164 NR Description: OSJNBa0039C07.10 [Oryza sativa (japonica
  misc_feature (72)..(171): Homolog of NCBI NO: 15238232 NR Description: putative protein; protein id: At5g64750.1
  misc_feature (4)..(136): Homolog of NCBI NO: 15218275 NR Description: AP2 domain protein RAP2.6
  misc_feature (46)..(172): Homolog of NCBI NO: 34908616 NR Description: P0677H08.8 [Oryza sativa (japonica
  misc_feature (1)..(220): Homolog of NCBI NO: 15240610 NR Description: putative protein; protein id: At5g50080.1
  misc_feature (1)..(220): Homolog of NCBI NO: 34221731 NR Description: putative AP2 domain transcription factor
MSAMVSALTQVVSARSQTEAEGAHSSSSSAGHKREWLGIDSVPIPSSFARVDSSHNPIEESIRKAFPEEAREKKRRYRGVRQRPWGKWAAEIRDPHRAARVWLGTFDTAEAAARAYDEAALRFRGNKAKLNFPEDVRILPPPPPLLRSPADTVANKAEEDLINYWSYTKLLQSSGQRSFLERGQEESNNIFEHSPMEQPLPPSSSGPSSSNFPAPSLPNT

SEQ ID NO: 30824 - protein, 217 aa, Arabidopsis thaliana
  peptide (1)..(217): Ceres Seq. ID no. 12357686
  misc_feature (71)..(135): Pfam Name: AP2 domain Pfam Description: AP2 domain
  misc_feature (68)..(160): Homolog of NCBI NO: 10798644 NR Description: AP2 domain-containing transcription factor
  misc_feature (69)..(133): Homolog of NCBI NO: 2281637 NR Description: AP2 domain containing protein RAP2.6 [Arabidopsis
  misc_feature (5)..(135): Homolog of NCBI NO: 15240379 NR Description: putative protein; protein id: At5g61890.1
  misc_feature (40)..(147): Homolog of NCBI NO: 15226153 NR Description: putative AP2 domain transcription factor; protein
  misc_feature (1)..(134): Homolog of NCBI NO: 38347164 NR Description: OSJNBa0039C07.10 [Oryza sativa (japonica
  misc_feature (69)..(168): Homolog of NCBI NO: 15238232 NR Description: putative protein; protein id: At5g64750.1
  misc_feature (1)..(133): Homolog of NCBI NO: 15218275 NR Description: AP2 domain protein RAP2.6
  misc_feature (43)..(169): Homolog of NCBI NO: 34908616 NR Description: P0677H08.8 [Oryza sativa (japonica
  misc_feature (1)..(217): Homolog of NCBI NO: 15240610 NR Description: putative protein; protein id: At5g50080.1
  misc_feature (1)..(217): Homolog of NCBI NO: 34221731 NR Description: putative AP2 domain transcription factor
MVSALTQVVSARSQTEAEGAHSSSSSAGHKREWLGIDSVPIPSSFARVDSSHNPIEESIRKAFPEEAREKKRRYRGVRQRPWGKWAAEIRDPHRAARVWLGTFDTAEAAARAYDEAALRFRGNKAKLNFPEDVRILPPPPPLLRSPADTVANKAEEDLINYWSYTKLLQSSGQRSFLERGQEESNNIFEHSPMEQPLPPSSSGPSSSNFPAPSLPNT

SEQ ID NO: 30825 - DNA, 1157 bp, Arabidopsis thaliana
  misc_feature (1)..(1157): Ceres Seq. ID no. 12423136
  misc_feature: MA Experiment ID: 20000173 Result: Down-regulated in Transcription
  misc_feature: MA Experiment 20000173 PARAMETER Experiment Name: At_42deg_Heat_P Parameter: Age (day) Value: 14
  misc_feature: MA Experiment 20000173 PARAMETER Experiment Name: At_42deg_Heat_P Parameter: Organism Value: A. thaliana
  misc_feature: MA Experiment 20000173 PARAMETER Experiment Name: At_42deg_Heat_P Parameter: Plant Line Value: WS
  misc_feature: MA Experiment 20000173 PARAMETER Experiment Name: At_42deg_Heat_P Parameter: Temperature (deg C) Value: 42 vs. 22
  misc_feature: MA Experiment 20000173 PARAMETER Experiment Name: At_42deg_Heat_P Parameter: Timepoint (hr) Value: 6
  misc_feature: MA Experiment 20000173 PARAMETER Experiment Name: At_42deg_Heat_P Parameter: Tissue Value: Aerial
  misc_feature: MA Experiment ID: 20000179 Result: Down-regulated in Transcription
  misc_feature: MA Experiment 20000179 PARAMETER Experiment Name: At_Germinating_Seeds_P Parameter: Age (hr) Value: 6 vs. 0
  misc_feature: MA Experiment 20000179 PARAMETER Experiment Name: At_Germinating_Seeds_P Parameter: Tissue Value: Germinating Seeds
  misc_feature: MA Experiment ID: 20000185 Result: Up-regulated in Transcription
  misc_feature: MA Experiment 20000185 PARAMETER Experiment Name: At_Roots__P Parameter: Age (day) Value: 7 vs. 21
  misc_feature: MA Experiment 20000185 PARAMETER Experiment Name: At_Roots__P Parameter: Organism Value: A. thaliana
  misc_feature: MA Experiment 20000185 PARAMETER Experiment Name: At_Roots__P Parameter: Tissue Value: Roots vs. Whole Plant
  misc_feature: MA Experiment ID: 20000234 Result: Up-regulated in Transcription
  misc_feature: MA Experiment 20000234 PARAMETER Experiment Name: At_Siliques_P Parameter: Age (day) Value: 21
  misc_feature: MA Experiment 20000234 PARAMETER Experiment Name: At_Siliques_P Parameter: Organism Value: A. thaliana
  misc_feature: MA Experiment 20000234 PARAMETER Experiment Name: At_Siliques_P Parameter: Plant Line Value: WS
  misc_feature: MA Experiment 20000234 PARAMETER Experiment Name: At_Siliques_P Parameter: Tissue Value: Less Than 5mm Siliques vs. Whole Plant
  misc_feature: MA Experiment ID: 20000235 Result: Up-regulated in Transcription
  misc_feature: MA Experiment 20000235 PARAMETER Experiment Name: At_Siliques_P Parameter: Age (day) Value: 21
  misc_feature: MA Experiment 20000235 PARAMETER Experiment Name: At_Siliques_P Parameter: Organism Value: A. thaliana
  misc_feature: MA Experiment 20000235 PARAMETER Experiment Name: At_Siliques_P Parameter: Plant Line Value: WS
  misc_feature: MA Experiment 20000235 PARAMETER Experiment Name: At_Siliques_P Parameter: Tissue Value: 5-10mm Siliques vs. Whole Plant
  misc_feature: MA Experiment ID: 20000264 Result: Up-regulated in Transcription
  misc_feature: MA Experiment 20000264 PARAMETER Experiment Name: At_Open_Flower_P Parameter: Age (day) Value: 21
  misc_feature: MA Experiment 20000264 PARAMETER Experiment Name: At_Open_Flower_P Parameter: Plant Line Value: WS
  misc_feature: MA Experiment 20000264 PARAMETER Experiment Name: At_Open_Flower_P Parameter: Tissue Value: Open Flower vs. Whole Plant
  misc_feature: MA Experiment ID: 20000794 Result: Up-regulated in Transcription
  misc_feature: MA Experiment 20000794 PARAMETER Experiment Name: At_Petals_P Parameter: Age (day) Value: 23-25 days
  misc_feature: MA Experiment 20000794 PARAMETER Experiment Name: At_Petals_P Parameter: Plant Line Value: WS
  misc_feature: MA Experiment 20000794 PARAMETER Experiment Name: At_Petals_P Parameter: Tissue Value: Petals vs. Whole plant
cgagatatatcgactccgcgaccctccactactctgctgatctacacacacacacacaaacacaatcgccggcaacaatggcgaagctcacacttctcttcttcctttcctttctcatcttctcctcatccatcgctttccaatcagacgagctcctcgttgacgacgacgaatttggtctagaaggagcaaagccccgctgccaccgatcttcacacatcttcttcttcttcgccacagcagcagcaacagactccaactattcggagaagatactcagatcctaccgatttggattcaaaagtccaatttactctcgaacatgccttcggtgactctgatttctcccccgccggtactttctccgctcgtctcaaaacctggagtcatggcggaaagacattaacgaagctgcgattctctagaaatgatttttctgctgaagagaaagatgcattcaagaatctgctgaaaggagatggcttttatcggattcggcttccatctaatgtggttagtccaccagggagagagtttgtgattgcatcagtgagagctagatgtctaccacgggatggcttggatgagcatttcattatacacatggaaggtgctaacatcttggcagttagttatggttctcctggggcgtgtcaatatcctcgacaattgaaacttccagcaaaatggtcgtttaactctcacacaattctgaaaagcagtgagcaggcgccaagaactccaatattcactgaggagattctaggcagtgagaatgtagagggagaagttgaaccaccaccagagagatcattttgggcgaaatattggatgtatttgataccgctgggactcgtagtgatgaatgccgtgacacaagcatcaaacatggctgaagaacctgcgggtggacaggcaggaggtgcacaagtgcaaccagctgccaggagaagatgattccacttttacttctcccaaagcaatgaaagctgcagctggttagagatgatgattcaacagatcttcatgtaaaccatcttgccatcatttggttttatgtaacctttaattttaatcctcgatcggtgtgttttagtactcaccaatcgggaaatcaaaaatcttgtcttcatgacatatcaagaacaaagacattt

SEQ ID NO: 30826 - protein, 117 aa, Arabidopsis thaliana
  peptide (1)..(117): Ceres Seq. ID no. 12423137
  misc_feature (1)..(107): Homolog of NCBI NO: 34856025 NR Description: similar to 2310044H10Rik protein [Rattus
  misc_feature (1)..(107): Homolog of NCBI NO: 13543832 NR Description: Unknown (protein for IMAGE:3591916) [Mus musculus]
  misc_feature (1)..(107): Homolog of NCBI NO: 37574074 NR Description: RIKEN cDNA 2310044H10 [Mus musculus]
  misc_feature (1)..(108): Homolog of NCBI NO: 21432049 NR Description: LOC284361 protein [Homo sapiens]
  misc_feature (1)..(107): Homolog of NCBI NO: 38181935 NR Description: Unknown (protein for MGC:76288) [Silurana
  misc_feature (1)..(109): Homolog of NCBI NO: 27503262 NR Description: Unknown (protein for IMAGE:5570892) [Xenopus
  misc_feature (1)..(117): Homolog of NCBI NO: 21594383 NR Description: unknown [Arabidopsis thaliana]
  misc_feature (1)..(117): Homolog of NCBI NO: 18408239 NR Description: expressed protein
MEGANILAVSYGSPGACQYPRQLKLPAKWSFNSHTILKSSEQAPRTPIFTEEILGSENVEGEVEPPPERSFWAKYWMYLIPLGLVVMNAVTQASNMAEEPAGGQAGGAQVQPAARRR

SEQ ID NO: 30827 - protein, 110 aa, Arabidopsis thaliana
  peptide (1)..(110): Ceres Seq. ID no. 12423138
  misc_feature (26)..(66): Homolog of NCBI NO: 21594383 NR Description: unknown [Arabidopsis thaliana]
  misc_feature (26)..(66): Homolog of NCBI NO: 18408239 NR Description: expressed protein
RYIDSATLHYSADLHTHTQTQSPATMAKLTLLFFLSFLIFSSSIAFQSDELLVDDDEFGLEGAKPRCHRSSHIFFFFATAAATDSNYSEKILRSYRFGFKSPIYSRTCLR

SEQ ID NO: 30828 - protein, 85 aa, Arabidopsis thaliana
  peptide (1)..(85): Ceres Seq. ID no. 12423139
  misc_feature (1)..(41): Homolog of NCBI NO: 21594383 NR Description: unknown [Arabidopsis thaliana]
  misc_feature (1)..(41): Homolog of NCBI NO: 18408239 NR Description: expressed protein
MAKLTLLFFLSFLIFSSSIAFQSDELLVDDDEFGLEGAKPRCHRSSHIFFFFATAAATDSNYSEKILRSYRFGFKSPIYSRTCLR

SEQ ID NO: 30829 - DNA, 636 bp, Arabidopsis thaliana
  misc_feature (1)..(636): Ceres Seq. ID no. 12325146
  misc_feature: MA Experiment ID: 108434 Result: Down-regulated in Transcription
  misc_feature: MA Experiment 108434 PARAMETER Experiment Name: At_Root_Tips_cDNA_P Parameter: Tissue Value: Root Tips
  misc_feature: MA Experiment ID: 108462 Result: Up-regulated in Transcription
  misc_feature: MA Experiment 108462 PARAMETER Experiment Name: At_Germinating_Seeds_cDNA_P Parameter: Age (day) Value: 2 vs. 0
  misc_feature: MA Experiment 108462 PARAMETER Experiment Name: At_Germinating_Seeds_cDNA_P Parameter: Tissue Value: Germinating Seeds
  misc_feature: MA Experiment ID: 108463 Result: Up-regulated in Transcription
  misc_feature: MA Experiment 108463 PARAMETER Experiment Name: At_Germinating_Seeds_cDNA_P Parameter: Age (day) Value: 3 vs. 0
  misc_feature: MA Experiment 108463 PARAMETER Experiment Name: At_Germinating_Seeds_cDNA_P Parameter: Tissue Value: Germinating Seeds
  misc_feature: MA Experiment ID: 108464 Result: Up-regulated in Transcription
  misc_feature: MA Experiment 108464 PARAMETER Experiment Name: At_Germinating_Seeds_cDNA_P Parameter: Age (day) Value: 4 vs. 0
  misc_feature: MA Experiment 108464 PARAMETER Experiment Name: At_Germinating_Seeds_cDNA_P Parameter: Tissue Value: Germinating Seeds
  misc_feature: MA Experiment ID: 108488 Result: Down-regulated in Transcription
  misc_feature: MA Experiment ID: 108501 Result: Down-regulated in Transcription
  misc_feature: MA Experiment 108501 PARAMETER Experiment Name: At_ap2_floral_buds_cDNA_P Parameter: Plant Line Value: ap2 (Ler.)
  misc_feature: MA Experiment 108501 PARAMETER Experiment Name: At_ap2_floral_buds_cDNA_P Parameter: Tissue Value: Closed Flower
  misc_feature: MA Experiment ID: 108561 Result: Up-regulated in Transcription
  misc_feature: MA Experiment 108561 PARAMETER Experiment Name: At_100uM_ABA_cDNA_P Parameter: Timepoint (hr) Value: 6
  misc_feature: MA Experiment 108561 PARAMETER Experiment Name: At_100uM_ABA_cDNA_P Parameter: Tissue Value: Aerial
  misc_feature: MA Experiment 108561 PARAMETER Experiment Name: At_100uM_ABA_cDNA_P Parameter: Treatment Value: 100uM ABA vs. No Treatment
  misc_feature: MA Experiment ID: 108572 Result: Up-regulated in Transcription
  misc_feature: MA Experiment 108572 PARAMETER Experiment Name: At_Drought_cDNA_P Parameter: Timepoint (hr) Value: 1
  misc_feature: MA Experiment 108572 PARAMETER Experiment Name: At_Drought_cDNA_P Parameter: Tissue Value: Aerial
  misc_feature: MA Experiment 108572 PARAMETER Experiment Name: At_Drought_cDNA_P Parameter: Treatment Value: Drought vs. No Drought
  misc_feature: MA Experiment ID: 108573 Result: Up-regulated in Transcription
  misc_feature: MA Experiment 108573 PARAMETER Experiment Name: At_Drought_cDNA_P Parameter: Timepoint (hr) Value: 6
  misc_feature: MA Experiment 108573 PARAMETER Experiment Name: At_Drought_cDNA_P Parameter: Tissue Value: Aerial
  misc_feature: MA Experiment 108573 PARAMETER Experiment Name: At_Drought_cDNA_P Parameter: Treatment Value: Drought vs. No Drought
  misc_feature: MA Experiment ID: 108579 Result: Down-regulated in Transcription
  misc_feature: MA Experiment 108579 PARAMETER Experiment Name: At_4deg_Cold_cDNA_P Parameter: Temperature (deg C) Value: 4 vs. 22
  misc_feature: MA Experiment 108579 PARAMETER Experiment Name: At_4deg_Cold_cDNA_P Parameter: Timepoint (hr) Value: 6
  misc_feature: MA Experiment 108579 PARAMETER Experiment Name: At_4deg_Cold_cDNA_P Parameter: Tissue Value: Aerial
  misc_feature: MA Experiment ID: 108605 Result: Up-regulated in Transcription
  misc_feature: MA Experiment 108605 PARAMETER Experiment Name: At_100uM_ABA_cDNA_P Parameter: Timepoint (hr) Value: 6
  misc_feature: MA Experiment 108605 PARAMETER Experiment Name: At_100uM_ABA_cDNA_P Parameter: Tissue Value: Aerial
  misc_feature: MA Experiment 108605 PARAMETER Experiment Name: At_100uM_ABA_cDNA_P Parameter: Treatment Value: 100uM ABA vs. No Treatment
  misc_feature: MA Experiment ID: 108607 Result: Up-regulated in Transcription
  misc_feature: MA Experiment 108607 PARAMETER Experiment Name: At_100uM_ABA_cDNA_P Parameter: Timepoint (hr) Value: 4
  misc_feature: MA Experiment 108607 PARAMETER Experiment Name: At_100uM_ABA_cDNA_P Parameter: Tissue Value: Aerial
  misc_feature: MA Experiment 108607 PARAMETER Experiment Name: At_100uM_ABA_cDNA_P Parameter: Treatment Value: 100uM ABA vs. No Treatment
  misc_feature: MA Experiment ID: 108609 Result: Up-regulated in Transcription
  misc_feature: MA Experiment 108609 PARAMETER Experiment Name: At_100uM_ABA_cDNA_P Parameter: Timepoint (hr) Value: 24
  misc_feature: MA Experiment 108609 PARAMETER Experiment Name: At_100uM_ABA_cDNA_P Parameter: Tissue Value: Aerial
  misc_feature: MA Experiment 108609 PARAMETER Experiment Name: At_100uM_ABA_cDNA_P Parameter: Treatment Value: 100uM ABA vs. No Treatment
  misc_feature: MA Experiment ID: 20000069 Result: Up-regulated in Transcription
  misc_feature: MA Experiment 20000069 PARAMETER Experiment Name: At_100uM_ABA_Mutants_cDNA_P Parameter: Plant Line Value: CS23
  misc_feature: MA Experiment 20000069 PARAMETER Experiment Name: At_100uM_ABA_Mutants_cDNA_P Parameter: Timepoint (hr) Value: 6
  misc_feature: MA Experiment 20000069 PARAMETER Experiment Name: At_100uM_ABA_Mutants_cDNA_P Parameter: Tissue Value: Aerial
  misc_feature: MA Experiment 20000069 PARAMETER Experiment Name: At_100uM_ABA_Mutants_cDNA_P Parameter: Treatment Value: 100uM ABA vs. No Treatment
  misc_feature: MA Experiment ID: 20000070 Result: Up-regulated in Transcription
  misc_feature: MA Experiment 20000070 PARAMETER Experiment Name: At_100uM_ABA_Mutants_cDNA_P Parameter: Plant Line Value: CS24
  misc_feature: MA Experiment 20000070 PARAMETER Experiment Name: At_100uM_ABA_Mutants_cDNA_P Parameter: Timepoint (hr) Value: 6
  misc_feature: MA Experiment 20000070 PARAMETER Experiment Name: At_100uM_ABA_Mutants_cDNA_P Parameter: Tissue Value: Aerial
  misc_feature: MA Experiment 20000070 PARAMETER Experiment Name: At_100uM_ABA_Mutants_cDNA_P Parameter: Treatment Value: 100uM ABA vs. No Treatment
  misc_feature: MA Experiment ID: 20000072 Result: Up-regulated in Transcription
  misc_feature: MA Experiment 20000072 PARAMETER Experiment Name: At_100uM_ABA_Mutants_cDNA_P Parameter: Plant Line Value: CS8105
  misc_feature: MA Experiment 20000072 PARAMETER Experiment Name: At_100uM_ABA_Mutants_cDNA_P Parameter: Timepoint (hr) Value: 6
  misc_feature: MA Experiment 20000072 PARAMETER Experiment Name: At_100uM_ABA_Mutants_cDNA_P Parameter: Tissue Value: Aerial
  misc_feature: MA Experiment 20000072 PARAMETER Experiment Name: At_100uM_ABA_Mutants_cDNA_P Parameter: Treatment Value: 100uM ABA vs. No Treatment
  misc_feature: MA Experiment ID: 20000087 Result: Up-regulated in Transcription
  misc_feature: MA Experiment 20000087 PARAMETER Experiment Name: At_100uM_ABA_Mutants_cDNA_P Parameter: Plant Line Value: WS
  misc_feature: MA Experiment 20000087 PARAMETER Experiment Name: At_100uM_ABA_Mutants_cDNA_P Parameter: Timepoint (hr) Value: 6
  misc_feature: MA Experiment 20000087 PARAMETER Experiment Name: At_100uM_ABA_Mutants_cDNA_P Parameter: Tissue Value: Aerial
  misc_feature: MA Experiment 20000087 PARAMETER Experiment Name: At_100uM_ABA_Mutants_cDNA_P Parameter: Treatment Value: 100uM ABA vs. No Treatment
  misc_feature: MA Experiment ID: 20000117 Result: Up-regulated in Transcription
  misc_feature: MA Experiment 20000117 PARAMETER Experiment Name: At_100uM_ABA_Mutants_cDNA_P Parameter: Plant Line Value: Columbia
  misc_feature: MA Experiment 20000117 PARAMETER Experiment Name: At_100uM_ABA_Mutants_cDNA_P Parameter: Timepoint (hr) Value: 6
  misc_feature: MA Experiment 20000117 PARAMETER Experiment Name: At_100uM_ABA_Mutants_cDNA_P Parameter: Tissue Value: Aerial
  misc_feature: MA Experiment 20000117 PARAMETER Experiment Name: At_100uM_ABA_Mutants_cDNA_P Parameter: Treatment Value: 100uM ABA vs. No Treatment
  misc_feature: MA Experiment ID: 20000169 Result: Up-regulated in Transcription
  misc_feature: MA Experiment 20000169 PARAMETER Experiment Name: At_100uM_ABA_P Parameter: Age (day) Value: 14
  misc_feature: MA Experiment 20000169 PARAMETER Experiment Name: At_100uM_ABA_P Parameter: Organism Value: A. thaliana
  misc_feature: MA Experiment 20000169 PARAMETER Experiment Name: At_100uM_ABA_P Parameter: Plant Line Value: WS
  misc_feature: MA Experiment 20000169 PARAMETER Experiment Name: At_100uM_ABA_P Parameter: Timepoint (hr) Value: 6
  misc_feature: MA Experiment 20000169 PARAMETER Experiment Name: At_100uM_ABA_P Parameter: Tissue Value: Aerial
  misc_feature: MA Experiment 20000169 PARAMETER Experiment Name: At_100uM_ABA_P Parameter: Treatment Value: 100uM ABA vs. No Treatment
  misc_feature: MA Experiment ID: 20000437 Result: Up-regulated in Transcription
  misc_feature: MA Experiment 20000437 PARAMETER Experiment Name: At_Drought_P Parameter: Age (day) Value: 8
  misc_feature: MA Experiment 20000437 PARAMETER Experiment Name: At_Drought_P Parameter: Organism Value: A. thaliana
  misc_feature: MA Experiment 20000437 PARAMETER Experiment Name: At_Drought_P Parameter: Plant Line Value: WS
  misc_feature: MA Experiment 20000437 PARAMETER Experiment Name: At_Drought_P Parameter: Timepoint (hr) Value: 24
  misc_feature: MA Experiment 20000437 PARAMETER Experiment Name: At_Drought_P Parameter: Tissue Value: Whole Plant
  misc_feature: MA Experiment 20000437 PARAMETER Experiment Name: At_Drought_P Parameter: Treatment Value: Drought vs. No Drought
  misc_feature: MA Experiment ID: 20000439 Result: Down-regulated in Transcription
  misc_feature: MA Experiment 20000439 PARAMETER Experiment Name: At_Roots__P Parameter: Age (day) Value: 14 vs. 21
  misc_feature: MA Experiment 20000439 PARAMETER Experiment Name: At_Roots__P Parameter: Organism Value: A. thaliana
  misc_feature: MA Experiment 20000439 PARAMETER Experiment Name: At_Roots__P Parameter: Tissue Value: Roots vs. Whole Plant
  misc_feature: MA Experiment ID: 20000794 Result: Up-regulated in Transcription
  misc_feature: MA Experiment 20000794 PARAMETER Experiment Name: At_Petals_P Parameter: Age (day) Value: 23-25 days
  misc_feature: MA Experiment 20000794 PARAMETER Experiment Name: At_Petals_P Parameter: Plant Line Value: WS
  misc_feature: MA Experiment 20000794 PARAMETER Experiment Name: At_Petals_P Parameter: Tissue Value: Petals vs. Whole plant
  misc_feature: MA Experiment ID: 20001557 Result: Down-regulated in Transcription
  misc_feature: MA Experiment 20001557 PARAMETER Experiment Name: At_Drought_Soil_Dry_P Parameter: Age (day) Value: 27
  misc_feature: MA Experiment 20001557 PARAMETER Experiment Name: At_Drought_Soil_Dry_P Parameter: Organism Value: A. thaliana
  misc_feature: MA Experiment 20001557 PARAMETER Experiment Name: At_Drought_Soil_Dry_P Parameter: Plant Line Value: WS
  misc_feature: MA Experiment 20001557 PARAMETER Experiment Name: At_Drought_Soil_Dry_P Parameter: Post Timepoint (hr) Value: 3
  misc_feature: MA Experiment 20001557 PARAMETER Experiment Name: At_Drought_Soil_Dry_P Parameter: Post-Treatment Value: Re-Water vs. No Drought
  misc_feature: MA Experiment 20001557 PARAMETER Experiment Name: At_Drought_Soil_Dry_P Parameter: Timepoint (day) Value: 13
  misc_feature: MA Experiment 20001557 PARAMETER Experiment Name: At_Drought_Soil_Dry_P Parameter: Treatment Value: Drought vs. No Drought
  misc_feature: MA Experiment ID: 20001558 Result: Down-regulated in Transcription
  misc_feature: MA Experiment 20001558 PARAMETER Experiment Name: At_Drought_Soil_Dry_P Parameter: Age (day) Value: 27
  misc_feature: MA Experiment 20001558 PARAMETER Experiment Name: At_Drought_Soil_Dry_P Parameter: Organism Value: A. thaliana
  misc_feature: MA Experiment 20001558 PARAMETER Experiment Name: At_Drought_Soil_Dry_P Parameter: Plant Line Value: WS
  misc_feature: MA Experiment 20001558 PARAMETER Experiment Name: At_Drought_Soil_Dry_P Parameter: Post Timepoint (hr) Value: 6
  misc_feature: MA Experiment 20001558 PARAMETER Experiment Name: At_Drought_Soil_Dry_P Parameter: Post-Treatment Value: Re-Water vs. No Drought
  misc_feature: MA Experiment 20001558 PARAMETER Experiment Name: At_Drought_Soil_Dry_P Parameter: Timepoint (day) Value: 13
  misc_feature: MA Experiment 20001558 PARAMETER Experiment Name: At_Drought_Soil_Dry_P Parameter: Treatment Value: Drought vs. No Drought
agagagatagagagagagataatgggcaaagaaaaagacaaaaacagaggagcttctccttcatcttacggcacgtttcaaggtgtccctacttatcctccaccgtcctatcctcatcctccgtcgcatcatccagtcatcggaattcctcagccgtctccacctcccggatcacctcatcacgacatttccgttcatcaatacattcaagaacatcaaaccgttgctggttaccctgtttctcaaggaagacctgcaagacaaaaccgtcttccttgttgtggtcttggcctcggttggttcttgttcatcattggtttcctccttggtgcaattccatggtatgtaggcgtattcattctagtatgtgctaggatcgatccacgagagaaaccaggatacgtagcttgtaccattgcagctgttgttgctacaattaccatagtttttggtgtcatgggaggaagaggagtttggtcgtgaagtgtgcaaataaatacattgttcatcaagtatcttgaacttgtataggagaaacctttttggtgtttttaatggggatgatttaagtgtgggagtgcttgttgatttaagtgtgcaaataaatacattcttcatcaagtatcttgagctagt

SEQ ID NO: 30830 - protein, 160 aa, Arabidopsis thaliana
  peptide (1)..(160): Ceres Seq. ID no. 12325147
  misc_feature (40)..(160): Homolog of NCBI NO: 21554784 NR Description: unknown [Arabidopsis thaliana]
  misc_feature (40)..(160): Homolog of NCBI NO: 18400450 NR Description: Expressed protein
  misc_feature (23)..(140): Homolog of NCBI NO: 25518134 NR Description: probable 60S ribosomal protein L18A - Arabidopsis
  misc_feature (23)..(159): Homolog of NCBI NO: 21593837 NR Description: 60S ribosomal protein L18A, putative [Arabidopsis
  misc_feature (23)..(159): Homolog of NCBI NO: 18397305 NR Description: 60S ribosomal protein L18A, putative
  misc_feature (8)..(159): Homolog of NCBI NO: 18394436 NR Description: expressed protein
  misc_feature (8)..(160): Homolog of NCBI NO: 21554011 NR Description: unknown [Arabidopsis thaliana]
  misc_feature (8)..(160): Homolog of NCBI NO: 18404524 NR Description: expressed protein
REIEREIMGKEKDKNRGASPSSYGTFQGVPTYPPPSYPHPPSHHPVIGIPQPSPPPGSPHHDISVHQYIQEHQTVAGYPVSQGRPARQNRLPCCGLGLGWFLFIIGFLLGAIPWYVGVFILVCARIDPREKPGYVACTIAAVVATITIVFGVMGGRGVWS

SEQ ID NO: 30831 - protein, 153 aa, Arabidopsis thaliana
  peptide (1)..(153): Ceres Seq. ID no. 12325148
  misc_feature (33)..(153): Homolog of NCBI NO: 21554784 NR Description: unknown [Arabidopsis thaliana]
  misc_feature (33)..(153): Homolog of NCBI NO: 18400450 NR Description: Expressed protein
  misc_feature (16)..(133): Homolog of NCBI NO: 25518134 NR Description: probable 60S ribosomal protein L18A - Arabidopsis
  misc_feature (16)..(152): Homolog of NCBI NO: 21593837 NR Description: 60S ribosomal protein L18A, putative [Arabidopsis
  misc_feature (16)..(152): Homolog of NCBI NO: 18397305 NR Description: 60S ribosomal protein L18A, putative
  misc_feature (1)..(152): Homolog of NCBI NO: 18394436 NR Description: expressed protein
  misc_feature (1)..(153): Homolog of NCBI NO: 21554011 NR Description: unknown [Arabidopsis thaliana]
  misc_feature (1)..(153): Homolog of NCBI NO: 18404524 NR Description: expressed protein
MGKEKDKNRGASPSSYGTFQGVPTYPPPSYPHPPSHHPVIGIPQPSPPPGSPHHDISVHQYIQEHQTVAGYPVSQGRPARQNRLPCCGLGLGWFLFIIGFLLGAIPWYVGVFILVCARIDPREKPGYVACTIAAVVATITIVFGVMGGRGVWS

SEQ ID NO: 30832 - protein, 123 aa, Arabidopsis thaliana
  peptide (1)..(123): Ceres Seq. ID no. 12325149
RDRERDNGQRKRQKQRSFSFILRHVSRCPYLSSTVLSSSSVASSSHRNSSAVSTSRITSSRHFRSSIHSRTSNRCWLPCFSRKTCKTKPSSLLWSWPRLVLVHHWFPPWCNSMVCRRIHSSMC

SEQ ID NO: 30833 - DNA, 818 bp, Arabidopsis thaliana
  misc_feature (1)..(818): Ceres Seq. ID no. 12466495
  misc_feature: MA Experiment ID: 108464 Result: Up-regulated in Transcription
  misc_feature: MA Experiment 108464 PARAMETER Experiment Name: At_Germinating_Seeds_cDNA_P Parameter: Age (day) Value: 4 vs. 0
  misc_feature: MA Experiment 108464 PARAMETER Experiment Name: At_Germinating_Seeds_cDNA_P Parameter: Tissue Value: Germinating Seeds
  misc_feature: MA Experiment ID: 108576 Result: Down-regulated in Transcription
  misc_feature: MA Experiment 108576 PARAMETER Experiment Name: At_42deg_Heat_cDNA_P Parameter: Temperature (deg C) Value: 42 vs. 22
  misc_feature: MA Experiment 108576 PARAMETER Experiment Name: At_42deg_Heat_cDNA_P Parameter: Timepoint (hr) Value: 1
  misc_feature: MA Experiment 108576 PARAMETER Experiment Name: At_42deg_Heat_cDNA_P Parameter: Tissue Value: Aerial
  misc_feature: MA Experiment ID: 108595 Result: Up-regulated in Transcription
  misc_feature: MA Experiment 108595 PARAMETER Experiment Name: At_Ler-pi_Ovule_cDNA_P Parameter: Plant Line Value: null
  misc_feature: MA Experiment ID: 20000112 Result: Down-regulated in Transcription
  misc_feature: MA Experiment 20000112 PARAMETER Experiment Name: At_42deg_Heat_cDNA_P Parameter: Temperature (deg C) Value: 42 vs. 22
  misc_feature: MA Experiment 20000112 PARAMETER Experiment Name: At_42deg_Heat_cDNA_P Parameter: Timepoint (hr) Value: 2
  misc_feature: MA Experiment 20000112 PARAMETER Experiment Name: At_42deg_Heat_cDNA_P Parameter: Tissue Value: Aerial
  misc_feature: MA Experiment ID: 20000113 Result: Down-regulated in Transcription
  misc_feature: MA Experiment 20000113 PARAMETER Experiment Name: At_42deg_Heat_cDNA_P Parameter: Temperature (deg C) Value: 42 vs. 22
  misc_feature: MA Experiment 20000113 PARAMETER Experiment Name: At_42deg_Heat_cDNA_P Parameter: Timepoint (hr) Value: 8
  misc_feature: MA Experiment 20000113 PARAMETER Experiment Name: At_42deg_Heat_cDNA_P Parameter: Tissue Value: Aerial
  misc_feature: MA Experiment ID: 20000144 Result: Down-regulated in Transcription
  misc_feature: MA Experiment 20000144 PARAMETER Experiment Name: At_42deg_Heat_cDNA_P Parameter: Temperature (deg C) Value: 42 vs. 22
  misc_feature: MA Experiment 20000144 PARAMETER Experiment Name: At_42deg_Heat_cDNA_P Parameter: Timepoint (hr) Value: 1
  misc_feature: MA Experiment 20000144 PARAMETER Experiment Name: At_42deg_Heat_cDNA_P Parameter: Tissue Value: Aerial
  misc_feature: MA Experiment ID: 20000171 Result: Down-regulated in Transcription
  misc_feature: MA Experiment 20000171 PARAMETER Experiment Name: At_42deg_Heat_P Parameter: Age (day) Value: 14
  misc_feature: MA Experiment 20000171 PARAMETER Experiment Name: At_42deg_Heat_P Parameter: Organism Value: A. thaliana
  misc_feature: MA Experiment 20000171 PARAMETER Experiment Name: At_42deg_Heat_P Parameter: Plant Line Value: WS
  misc_feature: MA Experiment 20000171 PARAMETER Experiment Name: At_42deg_Heat_P Parameter: Temperature (deg C) Value: 42 vs. 22
  misc_feature: MA Experiment 20000171 PARAMETER Experiment Name: At_42deg_Heat_P Parameter: Timepoint (hr) Value: 1
  misc_feature: MA Experiment 20000171 PARAMETER Experiment Name: At_42deg_Heat_P Parameter: Tissue Value: Aerial
  misc_feature: MA Experiment ID: 20000173 Result: Down-regulated in Transcription
  misc_feature: MA Experiment 20000173 PARAMETER Experiment Name: At_42deg_Heat_P Parameter: Age (day) Value: 14
  misc_feature: MA Experiment 20000173 PARAMETER Experiment Name: At_42deg_Heat_P Parameter: Organism Value: A. thaliana
  misc_feature: MA Experiment 20000173 PARAMETER Experiment Name: At_42deg_Heat_P Parameter: Plant Line Value: WS
  misc_feature: MA Experiment 20000173 PARAMETER Experiment Name: At_42deg_Heat_P Parameter: Temperature (deg C) Value: 42 vs. 22
  misc_feature: MA Experiment 20000173 PARAMETER Experiment Name: At_42deg_Heat_P Parameter: Timepoint (hr) Value: 6
  misc_feature: MA Experiment 20000173 PARAMETER Experiment Name: At_42deg_Heat_P Parameter: Tissue Value: Aerial
  misc_feature: MA Experiment ID: 20000180 Result: Up-regulated in Transcription
  misc_feature: MA Experiment 20000180 PARAMETER Experiment Name: At_Germinating_Seeds_P Parameter: Age (hr) Value: 24 vs. 0
  misc_feature: MA Experiment 20000180 PARAMETER Experiment Name: At_Germinating_Seeds_P Parameter: Tissue Value: Germinating Seeds
  misc_feature: MA Experiment ID: 20000184 Result: Up-regulated in Transcription
  misc_feature: MA Experiment 20000184 PARAMETER Experiment Name: At_Shoots__P Parameter: Age (day) Value: 7
  misc_feature: MA Experiment 20000184 PARAMETER Experiment Name: At_Shoots__P Parameter: Tissue Value: Shoots vs. Whole Plant
  misc_feature: MA Experiment ID: 20000437 Result: Down-regulated in Transcription
  misc_feature: MA Experiment 20000437 PARAMETER Experiment Name: At_Drought_P Parameter: Age (day) Value: 8
  misc_feature: MA Experiment 20000437 PARAMETER Experiment Name: At_Drought_P Parameter: Organism Value: A. thaliana
  misc_feature: MA Experiment 20000437 PARAMETER Experiment Name: At_Drought_P Parameter: Plant Line Value: WS
  misc_feature: MA Experiment 20000437 PARAMETER Experiment Name: At_Drought_P Parameter: Timepoint (hr) Value: 24
  misc_feature: MA Experiment 20000437 PARAMETER Experiment Name: At_Drought_P Parameter: Tissue Value: Whole Plant
  misc_feature: MA Experiment 20000437 PARAMETER Experiment Name: At_Drought_P Parameter: Treatment Value: Drought vs. No Drought
  misc_feature: MA Experiment ID: 20000495 Result: Up-regulated in Transcription
  misc_feature: MA Experiment 20000495 PARAMETER Experiment Name: At_Guard_Cells_P Parameter: Harvest Date Value: 8/2/2002
  misc_feature: MA Experiment 20000495 PARAMETER Experiment Name: At_Guard_Cells_P Parameter: Organism Value: A. thaliana
  misc_feature: MA Experiment 20000495 PARAMETER Experiment Name: At_Guard_Cells_P Parameter: Tissue Value: Guard Cells vs. Leaves
  misc_feature: MA Experiment ID: 20000496 Result: Up-regulated in Transcription
  misc_feature: MA Experiment 20000496 PARAMETER Experiment Name: At_Guard_Cells_P Parameter: Harvest Date Value: 7/19/2002
  misc_feature: MA Experiment 20000496 PARAMETER Experiment Name: At_Guard_Cells_P Parameter: Organism Value: Canola
  misc_feature: MA Experiment 20000496 PARAMETER Experiment Name: At_Guard_Cells_P Parameter: Tissue Value: Guard Cells vs. Leaves
  misc_feature: MA Experiment ID: 20000794 Result: Down-regulated in Transcription
  misc_feature: MA Experiment 20000794 PARAMETER Experiment Name: At_Petals_P Parameter: Age (day) Value: 23-25 days
  misc_feature: MA Experiment 20000794 PARAMETER Experiment Name: At_Petals_P Parameter: Plant Line Value: WS
  misc_feature: MA Experiment 20000794 PARAMETER Experiment Name: At_Petals_P Parameter: Tissue Value: Petals vs. Whole plant
  misc_feature: MA Experiment ID: 20001248 Result: Down-regulated in Transcription
  misc_feature: MA Experiment 20001248 PARAMETER Experiment Name: At_Far-red-induction_P Parameter: Age (day) Value: 7
  misc_feature: MA Experiment 20001248 PARAMETER Experiment Name: At_Far-red-induction_P Parameter: Light Value: Far-red vs. White
  misc_feature: MA Experiment 20001248 PARAMETER Experiment Name: At_Far-red-induction_P Parameter: Organism Value: A. thaliana
  misc_feature: MA Experiment 20001248 PARAMETER Experiment Name: At_Far-red-induction_P Parameter: Plant Line Value: Columbia
  misc_feature: MA Experiment 20001248 PARAMETER Experiment Name: At_Far-red-induction_P Parameter: Timepoint (hr) Value: 4
  misc_feature: MA Experiment 20001248 PARAMETER Experiment Name: At_Far-red-induction_P Parameter: Tissue Value: Whole Plant
  misc_feature: MA Experiment ID: 20001555 Result: Down-regulated in Transcription
  misc_feature: MA Experiment 20001555 PARAMETER Experiment Name: At_Drought_Soil_Dry_P Parameter: Age (day) Value: 24
  misc_feature: MA Experiment 20001555 PARAMETER Experiment Name: At_Drought_Soil_Dry_P Parameter: Organism Value: A. thaliana
  misc_feature: MA Experiment 20001555 PARAMETER Experiment Name: At_Drought_Soil_Dry_P Parameter: Plant Line Value: WS
  misc_feature: MA Experiment 20001555 PARAMETER Experiment Name: At_Drought_Soil_Dry_P Parameter: Post Timepoint (hr) Value: None
  misc_feature: MA Experiment 20001555 PARAMETER Experiment Name: At_Drought_Soil_Dry_P Parameter: Post-Treatment Value: None
  misc_feature: MA Experiment 20001555 PARAMETER Experiment Name: At_Drought_Soil_Dry_P Parameter: Timepoint (day) Value: 10
  misc_feature: MA Experiment 20001555 PARAMETER Experiment Name: At_Drought_Soil_Dry_P Parameter: Treatment Value: Drought vs. No Drought
  misc_feature: MA Experiment ID: 20001556 Result: Down-regulated in Transcription
  misc_feature: MA Experiment 20001556 PARAMETER Experiment Name: At_Drought_Soil_Dry_P Parameter: Age (day) Value: 26
  misc_feature: MA Experiment 20001556 PARAMETER Experiment Name: At_Drought_Soil_Dry_P Parameter: Organism Value: A. thaliana
  misc_feature: MA Experiment 20001556 PARAMETER Experiment Name: At_Drought_Soil_Dry_P Parameter: Plant Line Value: WS
  misc_feature: MA Experiment 20001556 PARAMETER Experiment Name: At_Drought_Soil_Dry_P Parameter: Post Timepoint (hr) Value: None
  misc_feature: MA Experiment 20001556 PARAMETER Experiment Name: At_Drought_Soil_Dry_P Parameter: Post-Treatment Value: None
  misc_feature: MA Experiment 20001556 PARAMETER Experiment Name: At_Drought_Soil_Dry_P Parameter: Timepoint (day) Value: 12
  misc_feature: MA Experiment 20001556 PARAMETER Experiment Name: At_Drought_Soil_Dry_P Parameter: Treatment Value: Drought vs. No Drought
  misc_feature: MA Experiment ID: 20001557 Result: Down-regulated in Transcription
  misc_feature: MA Experiment 20001557 PARAMETER Experiment Name: At_Drought_Soil_Dry_P Parameter: Age (day) Value: 27
  misc_feature: MA Experiment 20001557 PARAMETER Experiment Name: At_Drought_Soil_Dry_P Parameter: Organism Value: A. thaliana
  misc_feature: MA Experiment 20001557 PARAMETER Experiment Name: At_Drought_Soil_Dry_P Parameter: Plant Line Value: WS
  misc_feature: MA Experiment 20001557 PARAMETER Experiment Name: At_Drought_Soil_Dry_P Parameter: Post Timepoint (hr) Value: 3
  misc_feature: MA Experiment 20001557 PARAMETER Experiment Name: At_Drought_Soil_Dry_P Parameter: Post-Treatment Value: Re-Water vs. No Drought
  misc_feature: MA Experiment 20001557 PARAMETER Experiment Name: At_Drought_Soil_Dry_P Parameter: Timepoint (day) Value: 13
  misc_feature: MA Experiment 20001557 PARAMETER Experiment Name: At_Drought_Soil_Dry_P Parameter: Treatment Value: Drought vs. No Drought
  misc_feature: MA Experiment ID: 20001558 Result: Down-regulated in Transcription
  misc_feature: MA Experiment 20001558 PARAMETER Experiment Name: At_Drought_Soil_Dry_P Parameter: Age (day) Value: 27
  misc_feature: MA Experiment 20001558 PARAMETER Experiment Name: At_Drought_Soil_Dry_P Parameter: Organism Value: A. thaliana
  misc_feature: MA Experiment 20001558 PARAMETER Experiment Name: At_Drought_Soil_Dry_P Parameter: Plant Line Value: WS
  misc_feature: MA Experiment 20001558 PARAMETER Experiment Name: At_Drought_Soil_Dry_P Parameter: Post Timepoint (hr) Value: 6
  misc_feature: MA Experiment 20001558 PARAMETER Experiment Name: At_Drought_Soil_Dry_P Parameter: Post-Treatment Value: Re-Water vs. No Drought
  misc_feature: MA Experiment 20001558 PARAMETER Experiment Name: At_Drought_Soil_Dry_P Parameter: Timepoint (day) Value: 13
  misc_feature: MA Experiment 20001558 PARAMETER Experiment Name: At_Drought_Soil_Dry_P Parameter: Treatment Value: Drought vs. No Drought
  misc_feature: MA Experiment ID: 20001906 Result: Down-regulated in Transcription
  misc_feature: MA Experiment 20001906 PARAMETER Experiment Name: At_Drought_Reproduction_P Parameter: Age (day) Value: 35
  misc_feature: MA Experiment 20001906 PARAMETER Experiment Name: At_Drought_Reproduction_P Parameter: Organism Value: A. thaliana
  misc_feature: MA Experiment 20001906 PARAMETER Experiment Name: At_Drought_Reproduction_P Parameter: Plant Line Value: WS
  misc_feature: MA Experiment 20001906 PARAMETER Experiment Name: At_Drought_Reproduction_P Parameter: Timepoint (day) Value: 5
  misc_feature: MA Experiment 20001906 PARAMETER Experiment Name: At_Drought_Reproduction_P Parameter: Tissue Value: Siliques
  misc_feature: MA Experiment 20001906 PARAMETER Experiment Name: At_Drought_Reproduction_P Parameter: Treatment Value: Drought vs. No Drought
acatggacctcaagtaaaatggaagcaaacactttgtttcttctaaaagctctttgtcttctttgttttaatgtatgcttcacattagcttccgaccctgatcccatccaagacttctgcataccaaaacctgtgacatctccttaccatgaccatcacttctccaccaatctcccttgcaaaaactcctccgaagtaaccaccgaagattttgtcttttccggtctaaaaactgccggaaacttcacggagacggggttcgccaccgtcccagtaggcccagaaaacttccccggccttaatacattaggcatctcgtttgtccgggctgatctcaaacccggatccattaacccaccacattaccatccgcgggcgacggaagtagcccacttggttaaaggacgggtttactctggttttgtggactcgaacaataaggtttacgctaaagtgatggaagaaggagaaatgatggtttacccaaaagggcttgtacattttcagatgaacgtcggagatgttacggccacgattgtcggcggacttaatagccaaaaccctggtattcagaagataccgtccgtggtttttgggtcagggatcaatgaggagttgcttatgaaagcttttgggttgagtcttaagcagattggtacgttgaagaaaagatttgatcctgtcatgtctaatgaacattgatgttttctcttaaagtcttatcgagattattacatcgaagttatcttttatgtgatggtagttcttgatcataatgttatttatatattttgacccaaacaatggtcatctttagc

SEQ ID NO: 30834 - protein, 233 aa, Arabidopsis thaliana
  peptide (1)..(233): Ceres Seq. ID no. 12466496
  misc_feature (74)..(219): Pfam Name: Cupin Pfam Description: Cupin
  misc_feature (7)..(225): Homolog of NCBI NO: 18202910 NR Description: Germin-like protein subfamily 1 member 11
  misc_feature (9)..(225): Homolog of NCBI NO: 7447333 NR Description: germin protein type 1 - rice
  misc_feature (7)..(225): Homolog of NCBI NO: 38175449 NR Description: putative germin protein type 1
  misc_feature (5)..(225): Homolog of NCBI NO: 25044823 NR Description: germin-like protein [Ananas comosus]
  misc_feature (35)..(218): Homolog of NCBI NO: 29836437 NR Description: putative germin E protein precursor [Gossypium
  misc_feature (7)..(225): Homolog of NCBI NO: 15230587 NR Description: germin-like protein; protein id: At3g05950.1
  misc_feature (7)..(225): Homolog of NCBI NO: 27529869 NR Description: germin-like protein [Barbula unguiculata]
  misc_feature (7)..(233): Homolog of NCBI NO: 7447338 NR Description: probable germin protein type 2 - rice
  misc_feature (18)..(225): Homolog of NCBI NO: 15221902 NR Description: germin, putative
  misc_feature (7)..(233): Homolog of NCBI NO: 15232830 NR Description: germin-like protein
TWTSSKMEANTLFLLKALCLLCFNVCFTLASDPDPIQDFCIPKPVTSPYHDHHFSTNLPCKNSSEVTTEDFVFSGLKTAGNFTETGFATVPVGPENFPGLNTLGISFVRADLKPGSINPPHYHPRATEVAHLVKGRVYSGFVDSNNKVYAKVMEEGEMMVYPKGLVHFQMNVGDVTATIVGGLNSQNPGIQKIPSVVFGSGINEELLMKAFGLSLKQIGTLKKRFDPVMSNEH

SEQ ID NO: 30835 - protein, 227 aa, Arabidopsis thaliana
  peptide (1)..(227): Ceres Seq. ID no. 12466497
  misc_feature (68)..(213): Pfam Name: Cupin Pfam Description: Cupin
  misc_feature (1)..(219): Homolog of NCBI NO: 18202910 NR Description: Germin-like protein subfamily 1 member 11
  misc_feature (3)..(219): Homolog of NCBI NO: 7447333 NR Description: germin protein type 1 - rice
  misc_feature (1)..(219): Homolog of NCBI NO: 38175449 NR Description: putative germin protein type 1
  misc_feature (1)..(219): Homolog of NCBI NO: 25044823 NR Description: germin-like protein [Ananas comosus]
  misc_feature (29)..(212): Homolog of NCBI NO: 29836437 NR Description: putative germin E protein precursor [Gossypium
  misc_feature (1)..(219): Homolog of NCBI NO: 15230587 NR Description: germin-like protein; protein id: At3g05950.1
  misc_feature (1)..(219): Homolog of NCBI NO: 27529869 NR Description: germin-like protein [Barbula unguiculata]
  misc_feature (1)..(227): Homolog of NCBI NO: 7447338 NR Description: probable germin protein type 2 - rice
  misc_feature (12)..(219): Homolog of NCBI NO: 15221902 NR Description: germin, putative
  misc_feature (1)..(227): Homolog of NCBI NO: 15232830 NR Description: germin-like protein
MEANTLFLLKALCLLCFNVCFTLASDPDPIQDFCIPKPVTSPYHDHHFSTNLPCKNSSEVTTEDFVFSGLKTAGNFTETGFATVPVGPENFPGLNTLGISFVRADLKPGSINPPHYHPRATEVAHLVKGRVYSGFVDSNNKVYAKVMEEGEMMVYPKGLVHFQMNVGDVTATIVGGLNSQNPGIQKIPSVVFGSGINEELLMKAFGLSLKQIGTLKKRFDPVMSNEH

SEQ ID NO: 30836 - DNA, 1041 bp, Arabidopsis thaliana
  misc_feature (1)..(1041): Ceres Seq. ID no. 13490044
  misc_feature: MA Experiment ID: 108434 Result: Up-regulated in Transcription
  misc_feature: MA Experiment 108434 PARAMETER Experiment Name: At_Root_Tips_cDNA_P Parameter: Tissue Value: Root Tips
  misc_feature: MA Experiment ID: 108595 Result: Up-regulated in Transcription
  misc_feature: MA Experiment 108595 PARAMETER Experiment Name: At_Ler-pi_Ovule_cDNA_P Parameter: Plant Line Value: null
  misc_feature: MA Experiment ID: 20000184 Result: Down-regulated in Transcription
  misc_feature: MA Experiment 20000184 PARAMETER Experiment Name: At_Shoots__P Parameter: Age (day) Value: 7
  misc_feature: MA Experiment 20000184 PARAMETER Experiment Name: At_Shoots__P Parameter: Tissue Value: Shoots vs. Whole Plant
  misc_feature: MA Experiment ID: 20001451 Result: Up-regulated in Transcription
  misc_feature: MA Experiment 20001451 PARAMETER Experiment Name: At_Far-red-induction_P Parameter: Age (day) Value: 7
  misc_feature: MA Experiment 20001451 PARAMETER Experiment Name: At_Far-red-induction_P Parameter: Light Value: Far-red vs. White
  misc_feature: MA Experiment 20001451 PARAMETER Experiment Name: At_Far-red-induction_P Parameter: Organism Value: A. thaliana
  misc_feature: MA Experiment 20001451 PARAMETER Experiment Name: At_Far-red-induction_P Parameter: Plant Line Value: Columbia
  misc_feature: MA Experiment 20001451 PARAMETER Experiment Name: At_Far-red-induction_P Parameter: Timepoint (hr) Value: 24
  misc_feature: MA Experiment 20001451 PARAMETER Experiment Name: At_Far-red-induction_P Parameter: Tissue Value: Whole Plant
ctattttataaaattttagtaaaaagaagaaaaaaaaggaagaagaagaccaagaaattgaggtgcatgtgaggatgagtagtaaaaattaggaagactctagtctgggagagactttcagcagctatttctttgtcttctttctctttaaagaacctcactctctctctctttagtcaaaaatccccaattcgtgaacaaattagggtttttgaagtttgaagaaggagagaaagatgagtgcttcaaggtttatcaagtgtgtcactgtcggcgacggtgctgttggaaagacttgtcttctcatctcctacactagcaacactttccccacggattatgtgccaactgtgttcgataatttcagtgccaatgtgattgttgatggcaacactatcaacttgggattgtgggatactgcagggcaagaggactacaatagactaagacctttgagctatcgcggtgcagatgtcttcttacttgcattctcacttgtcagcaaagctagctatgaaaatgtttctaaaaagtgggttcctgaactgagacattatgctcctggtgttcccatcatcctcgttggaacaaagcttgatcttcgagatgataagcaattctttgccgagcaccctggtgctgtgcctatctctaccgctcagggtgaagaactaaagaagctgattggggcgcctgcttatatcgaatgcagtgcaaaaactcaacagaatgtgaaagcagtgtttgatgcggctatcaaggtcgttctccagccaccaaaaaacaagaagaagaagaagagaaaatctcagaaaggttgttctatactctgattcaacaagaagaaaggaatcaacaggagaattagagctataagtatttgttttctcctttttcataacttgtttacccaaggaatcaaaaatctgttgtttgtagtctgaaaatgacaaaagttgaagaactagtaacaagtatttgtattcttgtttgcattttgatctgtaaatataccacgaatccttgatttctctgtttcct

SEQ ID NO: 30837 - protein, 198 aa, Arabidopsis thaliana
  peptide (1)..(198): Ceres Seq. ID no. 13490045
  misc_feature (8)..(179): Pfam Name: Ras family Pfam Description: Ras family
  misc_feature (1)..(198): Homolog of NCBI NO: 2117168 NR Description: RAC1 [Lotus japonicus]
  misc_feature (1)..(198): Homolog of NCBI NO: 4097565 NR Description: ATGP3 [Arabidopsis thaliana]
  misc_feature (1)..(198): Homolog of NCBI NO: 4097583 NR Description: NTGP3 [Nicotiana tabacum]
  misc_feature (1)..(198): Homolog of NCBI NO: 6822324 NR Description: small GTP binding protein RACDP [Oryza sativa
  misc_feature (1)..(198): Homolog of NCBI NO: 34421680 NR Description: RAC-like G-protein Rac1 [Gossypium hirsutum]
  misc_feature (1)..(198): Homolog of NCBI NO: 38524283 NR Description: putative RACD protein [Hordeum vulgare subsp.
  misc_feature (1)..(198): Homolog of NCBI NO: 7438393 NR Description: small GTP binding protein, rac-type - turnip
  misc_feature (1)..(198): Homolog of NCBI NO: 1732519 NR Description: Rho1Ps homolog [Arabidopsis thaliana]
  misc_feature (1)..(198): Homolog of NCBI NO: 28393687 NR Description: putative Rho1Ps homolog Rac protein [Arabidopsis
  misc_feature (1)..(198): Homolog of NCBI NO: 15236247 NR Description: Rho1Ps homolog Rac-like protein [Arabidopsis
MSASRFIKCVTVGDGAVGKTCLLISYTSNTFPTDYVPTVFDNFSANVIVDGNTINLGLWDTAGQEDYNRLRPLSYRGADVFLLAFSLVSKASYENVSKKWVPELRHYAPGVPIILVGTKLDLRDDKQFFAEHPGAVPISTAQGEELKKLIGAPAYIECSAKTQQNVKAVFDAAIKVVLQPPKNKKKKKRKSQKGCSIL

SEQ ID NO: 30838 - DNA, 784 bp, Arabidopsis thaliana
  misc_feature (1)..(784): Ceres Seq. ID no. 12332255
  misc_feature: MA Experiment ID: 108434 Result: Down-regulated in Transcription
  misc_feature: MA Experiment 108434 PARAMETER Experiment Name: At_Root_Tips_cDNA_P Parameter: Tissue Value: Root Tips
  misc_feature: MA Experiment ID: 108462 Result: Up-regulated in Transcription
  misc_feature: MA Experiment 108462 PARAMETER Experiment Name: At_Germinating_Seeds_cDNA_P Parameter: Age (day) Value: 2 vs. 0
  misc_feature: MA Experiment 108462 PARAMETER Experiment Name: At_Germinating_Seeds_cDNA_P Parameter: Tissue Value: Germinating Seeds
  misc_feature: MA Experiment ID: 108463 Result: Up-regulated in Transcription
  misc_feature: MA Experiment 108463 PARAMETER Experiment Name: At_Germinating_Seeds_cDNA_P Parameter: Age (day) Value: 3 vs. 0
  misc_feature: MA Experiment 108463 PARAMETER Experiment Name: At_Germinating_Seeds_cDNA_P Parameter: Tissue Value: Germinating Seeds
  misc_feature: MA Experiment ID: 108464 Result: Up-regulated in Transcription
  misc_feature: MA Experiment 108464 PARAMETER Experiment Name: At_Germinating_Seeds_cDNA_P Parameter: Age (day) Value: 4 vs. 0
  misc_feature: MA Experiment 108464 PARAMETER Experiment Name: At_Germinating_Seeds_cDNA_P Parameter: Tissue Value: Germinating Seeds
  misc_feature: MA Experiment ID: 108469 Result: Up-regulated in Transcription
  misc_feature: MA Experiment ID: 108501 Result: Down-regulated in Transcription
  misc_feature: MA Experiment 108501 PARAMETER Experiment Name: At_ap2_floral_buds_cDNA_P Parameter: Plant Line Value: ap2 (Ler.)
  misc_feature: MA Experiment 108501 PARAMETER Experiment Name: At_ap2_floral_buds_cDNA_P Parameter: Tissue Value: Closed Flower
  misc_feature: MA Experiment ID: 108561 Result: Up-regulated in Transcription
  misc_feature: MA Experiment 108561 PARAMETER Experiment Name: At_100uM_ABA_cDNA_P Parameter: Timepoint (hr) Value: 6
  misc_feature: MA Experiment 108561 PARAMETER Experiment Name: At_100uM_ABA_cDNA_P Parameter: Tissue Value: Aerial
  misc_feature: MA Experiment 108561 PARAMETER Experiment Name: At_100uM_ABA_cDNA_P Parameter: Treatment Value: 100uM ABA vs. No Treatment
  misc_feature: MA Experiment ID: 108573 Result: Up-regulated in Transcription
  misc_feature: MA Experiment 108573 PARAMETER Experiment Name: At_Drought_cDNA_P Parameter: Timepoint (hr) Value: 6
  misc_feature: MA Experiment 108573 PARAMETER Experiment Name: At_Drought_cDNA_P Parameter: Tissue Value: Aerial
  misc_feature: MA Experiment 108573 PARAMETER Experiment Name: At_Drought_cDNA_P Parameter: Treatment Value: Drought vs. No Drought
  misc_feature: MA Experiment ID: 108585 Result: Up-regulated in Transcription
  misc_feature: MA Experiment 108585 PARAMETER Experiment Name: At_5mM_NaNP_cDNA_P Parameter: Timepoint (hr) Value: 6
  misc_feature: MA Experiment 108585 PARAMETER Experiment Name: At_5mM_NaNP_cDNA_P Parameter: Tissue Value: Aerial
  misc_feature: MA Experiment 108585 PARAMETER Experiment Name: At_5mM_NaNP_cDNA_P Parameter: Treatment Value: null
  misc_feature: MA Experiment ID: 108605 Result: Up-regulated in Transcription
  misc_feature: MA Experiment 108605 PARAMETER Experiment Name: At_100uM_ABA_cDNA_P Parameter: Timepoint (hr) Value: 6
  misc_feature: MA Experiment 108605 PARAMETER Experiment Name: At_100uM_ABA_cDNA_P Parameter: Tissue Value: Aerial
  misc_feature: MA Experiment 108605 PARAMETER Experiment Name: At_100uM_ABA_cDNA_P Parameter: Treatment Value: 100uM ABA vs. No Treatment
  misc_feature: MA Experiment ID: 108607 Result: Up-regulated in Transcription
  misc_feature: MA Experiment 108607 PARAMETER Experiment Name: At_100uM_ABA_cDNA_P Parameter: Timepoint (hr) Value: 4
  misc_feature: MA Experiment 108607 PARAMETER Experiment Name: At_100uM_ABA_cDNA_P Parameter: Tissue Value: Aerial
  misc_feature: MA Experiment 108607 PARAMETER Experiment Name: At_100uM_ABA_cDNA_P Parameter: Treatment Value: 100uM ABA vs. No Treatment
  misc_feature: MA Experiment ID: 108608 Result: Up-regulated in Transcription
  misc_feature: MA Experiment 108608 PARAMETER Experiment Name: At_100uM_ABA_cDNA_P Parameter: Timepoint (hr) Value: 1
  misc_feature: MA Experiment 108608 PARAMETER Experiment Name: At_100uM_ABA_cDNA_P Parameter: Tissue Value: Aerial
  misc_feature: MA Experiment 108608 PARAMETER Experiment Name: At_100uM_ABA_cDNA_P Parameter: Treatment Value: 100uM ABA vs. No Treatment
  misc_feature: MA Experiment ID: 108668 Result: Up-regulated in Transcription
  misc_feature: MA Experiment 108668 PARAMETER Experiment Name: At_2mM_SA_cDNA_P Parameter: Plant Line Value: WS
  misc_feature: MA Experiment 108668 PARAMETER Experiment Name: At_2mM_SA_cDNA_P Parameter: Timepoint (hr) Value: 6
  misc_feature: MA Experiment 108668 PARAMETER Experiment Name: At_2mM_SA_cDNA_P Parameter: Treatment Value: 2mM SA vs. No Treatment
  misc_feature: MA Experiment ID: 20000069 Result: Up-regulated in Transcription
  misc_feature: MA Experiment 20000069 PARAMETER Experiment Name: At_100uM_ABA_Mutants_cDNA_P Parameter: Plant Line Value: CS23
  misc_feature: MA Experiment 20000069 PARAMETER Experiment Name: At_100uM_ABA_Mutants_cDNA_P Parameter: Timepoint (hr) Value: 6
  misc_feature: MA Experiment 20000069 PARAMETER Experiment Name: At_100uM_ABA_Mutants_cDNA_P Parameter: Tissue Value: Aerial
  misc_feature: MA Experiment 20000069 PARAMETER Experiment Name: At_100uM_ABA_Mutants_cDNA_P Parameter: Treatment Value: 100uM ABA vs. No Treatment
  misc_feature: MA Experiment ID: 20000070 Result: Up-regulated in Transcription
  misc_feature: MA Experiment 20000070 PARAMETER Experiment Name: At_100uM_ABA_Mutants_cDNA_P Parameter: Plant Line Value: CS24
  misc_feature: MA Experiment 20000070 PARAMETER Experiment Name: At_100uM_ABA_Mutants_cDNA_P Parameter: Timepoint (hr) Value: 6
  misc_feature: MA Experiment 20000070 PARAMETER Experiment Name: At_100uM_ABA_Mutants_cDNA_P Parameter: Tissue Value: Aerial
  misc_feature: MA Experiment 20000070 PARAMETER Experiment Name: At_100uM_ABA_Mutants_cDNA_P Parameter: Treatment Value: 100uM ABA vs. No Treatment
  misc_feature: MA Experiment ID: 20000071 Result: Up-regulated in Transcription
  misc_feature: MA Experiment 20000071 PARAMETER Experiment Name: At_100uM_ABA_Mutants_cDNA_P Parameter: Plant Line Value: CS8104
  misc_feature: MA Experiment 20000071 PARAMETER Experiment Name: At_100uM_ABA_Mutants_cDNA_P Parameter: Timepoint (hr) Value: 6
  misc_feature: MA Experiment 20000071 PARAMETER Experiment Name: At_100uM_ABA_Mutants_cDNA_P Parameter: Tissue Value: Aerial
  misc_feature: MA Experiment 20000071 PARAMETER Experiment Name: At_100uM_ABA_Mutants_cDNA_P Parameter: Treatment Value: 100uM ABA vs. No Treatment
  misc_feature: MA Experiment ID: 20000072 Result: Up-regulated in Transcription
  misc_feature: MA Experiment 20000072 PARAMETER Experiment Name: At_100uM_ABA_Mutants_cDNA_P Parameter: Plant Line Value: CS8105
  misc_feature: MA Experiment 20000072 PARAMETER Experiment Name: At_100uM_ABA_Mutants_cDNA_P Parameter: Timepoint (hr) Value: 6
  misc_feature: MA Experiment 20000072 PARAMETER Experiment Name: At_100uM_ABA_Mutants_cDNA_P Parameter: Tissue Value: Aerial
  misc_feature: MA Experiment 20000072 PARAMETER Experiment Name: At_100uM_ABA_Mutants_cDNA_P Parameter: Treatment Value: 100uM ABA vs. No Treatment
  misc_feature: MA Experiment ID: 20000086 Result: Up-regulated in Transcription
  misc_feature: MA Experiment 20000086 PARAMETER Experiment Name: At_100uM_ABA_Mutants_cDNA_P Parameter: Plant Line Value: CS22
  misc_feature: MA Experiment 20000086 PARAMETER Experiment Name: At_100uM_ABA_Mutants_cDNA_P Parameter: Timepoint (hr) Value: 6
  misc_feature: MA Experiment 20000086 PARAMETER Experiment Name: At_100uM_ABA_Mutants_cDNA_P Parameter: Tissue Value: Aerial
  misc_feature: MA Experiment 20000086 PARAMETER Experiment Name: At_100uM_ABA_Mutants_cDNA_P Parameter: Treatment Value: 100uM ABA vs. No Treatment
  misc_feature: MA Experiment ID: 20000087 Result: Up-regulated in Transcription
  misc_feature: MA Experiment 20000087 PARAMETER Experiment Name: At_100uM_ABA_Mutants_cDNA_P Parameter: Plant Line Value: WS
  misc_feature: MA Experiment 20000087 PARAMETER Experiment Name: At_100uM_ABA_Mutants_cDNA_P Parameter: Timepoint (hr) Value: 6
  misc_feature: MA Experiment 20000087 PARAMETER Experiment Name: At_100uM_ABA_Mutants_cDNA_P Parameter: Tissue Value: Aerial
  misc_feature: MA Experiment 20000087 PARAMETER Experiment Name: At_100uM_ABA_Mutants_cDNA_P Parameter: Treatment Value: 100uM ABA vs. No Treatment
  misc_feature: MA Experiment ID: 20000088 Result: Up-regulated in Transcription
  misc_feature: MA Experiment 20000088 PARAMETER Experiment Name: At_100uM_ABA_Mutants_cDNA_P Parameter: Plant Line Value: Landsberg
  misc_feature: MA Experiment 20000088 PARAMETER Experiment Name: At_100uM_ABA_Mutants_cDNA_P Parameter: Timepoint (hr) Value: 6
  misc_feature: MA Experiment 20000088 PARAMETER Experiment Name: At_100uM_ABA_Mutants_cDNA_P Parameter: Tissue Value: Aerial
  misc_feature: MA Experiment 20000088 PARAMETER Experiment Name: At_100uM_ABA_Mutants_cDNA_P Parameter: Treatment Value: 100uM ABA vs. No Treatment
  misc_feature: MA Experiment ID: 20000090 Result: Up-regulated in Transcription
  misc_feature: MA Experiment ID: 20000111 Result: Down-regulated in Transcription
  misc_feature: MA Experiment 20000111 PARAMETER Experiment Name: At_42deg_Heat_cDNA_P Parameter: Temperature (deg C) Value: 42 vs. 22
  misc_feature: MA Experiment 20000111 PARAMETER Experiment Name: At_42deg_Heat_cDNA_P Parameter: Timepoint (hr) Value: 6
  misc_feature: MA Experiment 20000111 PARAMETER Experiment Name: At_42deg_Heat_cDNA_P Parameter: Tissue Value: Aerial
  misc_feature: MA Experiment ID: 20000113 Result: Down-regulated in Transcription
  misc_feature: MA Experiment 20000113 PARAMETER Experiment Name: At_42deg_Heat_cDNA_P Parameter: Temperature (deg C) Value: 42 vs. 22
  misc_feature: MA Experiment 20000113 PARAMETER Experiment Name: At_42deg_Heat_cDNA_P Parameter: Timepoint (hr) Value: 8
  misc_feature: MA Experiment 20000113 PARAMETER Experiment Name: At_42deg_Heat_cDNA_P Parameter: Tissue Value: Aerial
  misc_feature: MA Experiment ID: 20000117 Result: Up-regulated in Transcription
  misc_feature: MA Experiment 20000117 PARAMETER Experiment Name: At_100uM_ABA_Mutants_cDNA_P Parameter: Plant Line Value: Columbia
  misc_feature: MA Experiment 20000117 PARAMETER Experiment Name: At_100uM_ABA_Mutants_cDNA_P Parameter: Timepoint (hr) Value: 6
  misc_feature: MA Experiment 20000117 PARAMETER Experiment Name: At_100uM_ABA_Mutants_cDNA_P Parameter: Tissue Value: Aerial
  misc_feature: MA Experiment 20000117 PARAMETER Experiment Name: At_100uM_ABA_Mutants_cDNA_P Parameter: Treatment Value: 100uM ABA vs. No Treatment
  misc_feature: MA Experiment ID: 20000144 Result: Down-regulated in Transcription
  misc_feature: MA Experiment 20000144 PARAMETER Experiment Name: At_42deg_Heat_cDNA_P Parameter: Temperature (deg C) Value: 42 vs. 22
  misc_feature: MA Experiment 20000144 PARAMETER Experiment Name: At_42deg_Heat_cDNA_P Parameter: Timepoint (hr) Value: 1
  misc_feature: MA Experiment 20000144 PARAMETER Experiment Name: At_42deg_Heat_cDNA_P Parameter: Tissue Value: Aerial
  misc_feature: MA Experiment ID: 20000166 Result: Up-regulated in Transcription
  misc_feature: MA Experiment 20000166 PARAMETER Experiment Name: At_100uM_ABA_P Parameter: Age (day) Value: 14
  misc_feature: MA Experiment 20000166 PARAMETER Experiment Name: At_100uM_ABA_P Parameter: Organism Value: A. thaliana
  misc_feature: MA Experiment 20000166 PARAMETER Experiment Name: At_100uM_ABA_P Parameter: Plant Line Value: WS
  misc_feature: MA Experiment 20000166 PARAMETER Experiment Name: At_100uM_ABA_P Parameter: Timepoint (hr) Value: 1
  misc_feature: MA Experiment 20000166 PARAMETER Experiment Name: At_100uM_ABA_P Parameter: Tissue Value: Aerial
  misc_feature: MA Experiment 20000166 PARAMETER Experiment Name: At_100uM_ABA_P Parameter: Treatment Value: 100uM ABA vs. No Treatment
  misc_feature: MA Experiment ID: 20000169 Result: Up-regulated in Transcription
  misc_feature: MA Experiment 20000169 PARAMETER Experiment Name: At_100uM_ABA_P Parameter: Age (day) Value: 14
  misc_feature: MA Experiment 20000169 PARAMETER Experiment Name: At_100uM_ABA_P Parameter: Organism Value: A. thaliana
  misc_feature: MA Experiment 20000169 PARAMETER Experiment Name: At_100uM_ABA_P Parameter: Plant Line Value: WS
  misc_feature: MA Experiment 20000169 PARAMETER Experiment Name: At_100uM_ABA_P Parameter: Timepoint (hr) Value: 6
  misc_feature: MA Experiment 20000169 PARAMETER Experiment Name: At_100uM_ABA_P Parameter: Tissue Value: Aerial
  misc_feature: MA Experiment 20000169 PARAMETER Experiment Name: At_100uM_ABA_P Parameter: Treatment Value: 100uM ABA vs. No Treatment
  misc_feature: MA Experiment ID: 20000171 Result: Down-regulated in Transcription
  misc_feature: MA Experiment 20000171 PARAMETER Experiment Name: At_42deg_Heat_P Parameter: Age (day) Value: 14
  misc_feature: MA Experiment 20000171 PARAMETER Experiment Name: At_42deg_Heat_P Parameter: Organism Value: A. thaliana
  misc_feature: MA Experiment 20000171 PARAMETER Experiment Name: At_42deg_Heat_P Parameter: Plant Line Value: WS
  misc_feature: MA Experiment 20000171 PARAMETER Experiment Name: At_42deg_Heat_P Parameter: Temperature (deg C) Value: 42 vs. 22
  misc_feature: MA Experiment 20000171 PARAMETER Experiment Name: At_42deg_Heat_P Parameter: Timepoint (hr) Value: 1
  misc_feature: MA Experiment 20000171 PARAMETER Experiment Name: At_42deg_Heat_P Parameter: Tissue Value: Aerial
  misc_feature: MA Experiment ID: 20000173 Result: Down-regulated in Transcription
  misc_feature: MA Experiment 20000173 PARAMETER Experiment Name: At_42deg_Heat_P Parameter: Age (day) Value: 14
  misc_feature: MA Experiment 20000173 PARAMETER Experiment Name: At_42deg_Heat_P Parameter: Organism Value: A. thaliana
  misc_feature: MA Experiment 20000173 PARAMETER Experiment Name: At_42deg_Heat_P Parameter: Plant Line Value: WS
  misc_feature: MA Experiment 20000173 PARAMETER Experiment Name: At_42deg_Heat_P Parameter: Temperature (deg C) Value: 42 vs. 22
  misc_feature: MA Experiment 20000173 PARAMETER Experiment Name: At_42deg_Heat_P Parameter: Timepoint (hr) Value: 6
  misc_feature: MA Experiment 20000173 PARAMETER Experiment Name: At_42deg_Heat_P Parameter: Tissue Value: Aerial
  misc_feature: MA Experiment ID: 20000182 Result: Up-regulated in Transcription
  misc_feature: MA Experiment 20000182 PARAMETER Experiment Name: At_2mM_SA_P Parameter: Age (day) Value: 14
  misc_feature: MA Experiment 20000182 PARAMETER Experiment Name: At_2mM_SA_P Parameter: Organism Value: A. thaliana
  misc_feature: MA Experiment 20000182 PARAMETER Experiment Name: At_2mM_SA_P Parameter: Plant Line Value: WS
  misc_feature: MA Experiment 20000182 PARAMETER Experiment Name: At_2mM_SA_P Parameter: Timepoint (hr) Value: 6
  misc_feature: MA Experiment 20000182 PARAMETER Experiment Name: At_2mM_SA_P Parameter: Tissue Value: Aerial
  misc_feature: MA Experiment 20000182 PARAMETER Experiment Name: At_2mM_SA_P Parameter: Treatment Value: 2mM SA vs. No Treatment
  misc_feature: MA Experiment ID: 20000185 Result: Up-regulated in Transcription
  misc_feature: MA Experiment 20000185 PARAMETER Experiment Name: At_Roots__P Parameter: Age (day) Value: 7 vs. 21
  misc_feature: MA Experiment 20000185 PARAMETER Experiment Name: At_Roots__P Parameter: Organism Value: A. thaliana
  misc_feature: MA Experiment 20000185 PARAMETER Experiment Name: At_Roots__P Parameter: Tissue Value: Roots vs. Whole Plant
  misc_feature: MA Experiment ID: 20000234 Result: Down-regulated in Transcription
  misc_feature: MA Experiment 20000234 PARAMETER Experiment Name: At_Siliques_P Parameter: Age (day) Value: 21
  misc_feature: MA Experiment 20000234 PARAMETER Experiment Name: At_Siliques_P Parameter: Organism Value: A. thaliana
  misc_feature: MA Experiment 20000234 PARAMETER Experiment Name: At_Siliques_P Parameter: Plant Line Value: WS
  misc_feature: MA Experiment 20000234 PARAMETER Experiment Name: At_Siliques_P Parameter: Tissue Value: Less Than 5mm Siliques vs. Whole Plant
  misc_feature: MA Experiment ID: 20000235 Result: Down-regulated in Transcription
  misc_feature: MA Experiment 20000235 PARAMETER Experiment Name: At_Siliques_P Parameter: Age (day) Value: 21
  misc_feature: MA Experiment 20000235 PARAMETER Experiment Name: At_Siliques_P Parameter: Organism Value: A. thaliana
  misc_feature: MA Experiment 20000235 PARAMETER Experiment Name: At_Siliques_P Parameter: Plant Line Value: WS
  misc_feature: MA Experiment 20000235 PARAMETER Experiment Name: At_Siliques_P Parameter: Tissue Value: 5-10mm Siliques vs. Whole Plant
  misc_feature: MA Experiment ID: 20000264 Result: Down-regulated in Transcription
  misc_feature: MA Experiment 20000264 PARAMETER Experiment Name: At_Open_Flower_P Parameter: Age (day) Value: 21
  misc_feature: MA Experiment 20000264 PARAMETER Experiment Name: At_Open_Flower_P Parameter: Plant Line Value: WS
  misc_feature: MA Experiment 20000264 PARAMETER Experiment Name: At_Open_Flower_P Parameter: Tissue Value: Open Flower vs. Whole Plant
  misc_feature: MA Experiment ID: 20000265 Result: Down-regulated in Transcription
  misc_feature: MA Experiment 20000265 PARAMETER Experiment Name: At_Open_Flower_P Parameter: Age (day) Value: 21
  misc_feature: MA Experiment 20000265 PARAMETER Experiment Name: At_Open_Flower_P Parameter: Plant Line Value: WS
  misc_feature: MA Experiment 20000265 PARAMETER Experiment Name: At_Open_Flower_P Parameter: Tissue Value: Closed Flower vs. Whole Plant
  misc_feature: MA Experiment ID: 20000267 Result: Up-regulated in Transcription
  misc_feature: MA Experiment 20000267 PARAMETER Experiment Name: At_Drought_P Parameter: Age (day) Value: 7
  misc_feature: MA Experiment 20000267 PARAMETER Experiment Name: At_Drought_P Parameter: Organism Value: A. thaliana
  misc_feature: MA Experiment 20000267 PARAMETER Experiment Name: At_Drought_P Parameter: Plant Line Value: WS
  misc_feature: MA Experiment 20000267 PARAMETER Experiment Name: At_Drought_P Parameter: Timepoint (hr) Value: 6
  misc_feature: MA Experiment 20000267 PARAMETER Experiment Name: At_Drought_P Parameter: Tissue Value: Whole Plant
  misc_feature: MA Experiment 20000267 PARAMETER Experiment Name: At_Drought_P Parameter: Treatment Value: Drought vs. No Drought
  misc_feature: MA Experiment ID: 20000286 Result: Down-regulated in Transcription
  misc_feature: MA Experiment 20000286 PARAMETER Experiment Name: At_Open_Flower_P Parameter: Age (day) Value: 21
  misc_feature: MA Experiment 20000286 PARAMETER Experiment Name: At_Open_Flower_P Parameter: Plant Line Value: WS
  misc_feature: MA Experiment 20000286 PARAMETER Experiment Name: At_Open_Flower_P Parameter: Tissue Value: Half Open vs. Whole Plant
  misc_feature: MA Experiment ID: 20000436 Result: Up-regulated in Transcription
  misc_feature: MA Experiment 20000436 PARAMETER Experiment Name: At_Drought_P Parameter: Age (day) Value: 7
  misc_feature: MA Experiment 20000436 PARAMETER Experiment Name: At_Drought_P Parameter: Organism Value: A. thaliana
  misc_feature: MA Experiment 20000436 PARAMETER Experiment Name: At_Drought_P Parameter: Plant Line Value: WS
  misc_feature: MA Experiment 20000436 PARAMETER Experiment Name: At_Drought_P Parameter: Timepoint (hr) Value: 12
  misc_feature: MA Experiment 20000436 PARAMETER Experiment Name: At_Drought_P Parameter: Tissue Value: Whole Plant
  misc_feature: MA Experiment 20000436 PARAMETER Experiment Name: At_Drought_P Parameter: Treatment Value: Drought vs. No Drought
  misc_feature: MA Experiment ID: 20000438 Result: Down-regulated in Transcription
  misc_feature: MA Experiment 20000438 PARAMETER Experiment Name: At_Shoots__P Parameter: Age (day) Value: 14
  misc_feature: MA Experiment 20000438 PARAMETER Experiment Name: At_Shoots__P Parameter: Tissue Value: Shoots vs. Whole Plant
  misc_feature: MA Experiment ID: 20000439 Result: Up-regulated in Transcription
  misc_feature: MA Experiment 20000439 PARAMETER Experiment Name: At_Roots__P Parameter: Age (day) Value: 14 vs. 21
  misc_feature: MA Experiment 20000439 PARAMETER Experiment Name: At_Roots__P Parameter: Organism Value: A. thaliana
  misc_feature: MA Experiment 20000439 PARAMETER Experiment Name: At_Roots__P Parameter: Tissue Value: Roots vs. Whole Plant
  misc_feature: MA Experiment ID: 20000453 Result: Up-regulated in Transcription
  misc_feature: MA Experiment 20000453 PARAMETER Experiment Name: At_100uM_ABA_P Parameter: Age (day) Value: 15
  misc_feature: MA Experiment 20000453 PARAMETER Experiment Name: At_100uM_ABA_P Parameter: Organism Value: A. thaliana
  misc_feature: MA Experiment 20000453 PARAMETER Experiment Name: At_100uM_ABA_P Parameter: Plant Line Value: WS
  misc_feature: MA Experiment 20000453 PARAMETER Experiment Name: At_100uM_ABA_P Parameter: Timepoint (hr) Value: 24
  misc_feature: MA Experiment 20000453 PARAMETER Experiment Name: At_100uM_ABA_P Parameter: Tissue Value: Aerial
  misc_feature: MA Experiment 20000453 PARAMETER Experiment Name: At_100uM_ABA_P Parameter: Treatment Value: 100uM ABA vs. No Treatment
  misc_feature: MA Experiment ID: 20000455 Result: Up-regulated in Transcription
  misc_feature: MA Experiment 20000455 PARAMETER Experiment Name: At_100uM_ABA_P Parameter: Age (day) Value: 16
  misc_feature: MA Experiment 20000455 PARAMETER Experiment Name: At_100uM_ABA_P Parameter: Organism Value: A. thaliana
  misc_feature: MA Experiment 20000455 PARAMETER Experiment Name: At_100uM_ABA_P Parameter: Plant Line Value: WS
  misc_feature: MA Experiment 20000455 PARAMETER Experiment Name: At_100uM_ABA_P Parameter: Timepoint (hr) Value: 48
  misc_feature: MA Experiment 20000455 PARAMETER Experiment Name: At_100uM_ABA_P Parameter: Tissue Value: Aerial
  misc_feature: MA Experiment 20000455 PARAMETER Experiment Name: At_100uM_ABA_P Parameter: Treatment Value: 100uM ABA vs. No Treatment
  misc_feature: MA Experiment ID: 20000506 Result: Up-regulated in Transcription
  misc_feature: MA Experiment 20000506 PARAMETER Experiment Name: At_Wounding_P Parameter: Organism Value: A. thaliana
  misc_feature: MA Experiment 20000506 PARAMETER Experiment Name: At_Wounding_P Parameter: Plant Line Value: WS
  misc_feature: MA Experiment 20000506 PARAMETER Experiment Name: At_Wounding_P Parameter: Timepoint (hr) Value: 6
  misc_feature: MA Experiment 20000506 PARAMETER Experiment Name: At_Wounding_P Parameter: Tissue Value: Aerial
  misc_feature: MA Experiment 20000506 PARAMETER Experiment Name: At_Wounding_P Parameter: Treatment Value: Wounding vs. No Wounding
  misc_feature: MA Experiment ID: 20000527 Result: Down-regulated in Transcription
  misc_feature: MA Experiment 20000527 PARAMETER Experiment Name: At_10percent_PEG_P Parameter: Age (day) Value: 20
  misc_feature: MA Experiment 20000527 PARAMETER Experiment Name: At_10percent_PEG_P Parameter: Organism Value: A. thaliana
  misc_feature: MA Experiment 20000527 PARAMETER Experiment Name: At_10percent_PEG_P Parameter: Plant Line Value: WS
  misc_feature: MA Experiment 20000527 PARAMETER Experiment Name: At_10percent_PEG_P Parameter: Timepoint (day) Value: 20
  misc_feature: MA Experiment 20000527 PARAMETER Experiment Name: At_10percent_PEG_P Parameter: Tissue Value: Whole Plant
  misc_feature: MA Experiment 20000527 PARAMETER Experiment Name: At_10percent_PEG_P Parameter: Treatment Value: 10percent PEG vs. No Treatment
  misc_feature: MA Experiment ID: 20000709 Result: Down-regulated in Transcription
  misc_feature: MA Experiment 20000709 PARAMETER Experiment Name: At_15mM_NH4NO3_L-to-H_P Parameter: Age (hr) Value: 14
  misc_feature: MA Experiment 20000709 PARAMETER Experiment Name: At_15mM_NH4NO3_L-to-H_P Parameter: Organism Value: A. thaliana
  misc_feature: MA Experiment 20000709 PARAMETER Experiment Name: At_15mM_NH4NO3_L-to-H_P Parameter: Plant Line Value: WS
  misc_feature: MA Experiment 20000709 PARAMETER Experiment Name: At_15mM_NH4NO3_L-to-H_P Parameter: Timepoint (hr) Value: 4
  misc_feature: MA Experiment 20000709 PARAMETER Experiment Name: At_15mM_NH4NO3_L-to-H_P Parameter: Tissue Value: Aerial
  misc_feature: MA Experiment 20000709 PARAMETER Experiment Name: At_15mM_NH4NO3_L-to-H_P Parameter: Treatment Value: 15mM NH4NO3 vs. 30mM Mannitol
  misc_feature: MA Experiment ID: 20000794 Result: Down-regulated in Transcription
  misc_feature: MA Experiment 20000794 PARAMETER Experiment Name: At_Petals_P Parameter: Age (day) Value: 23-25 days
  misc_feature: MA Experiment 20000794 PARAMETER Experiment Name: At_Petals_P Parameter: Plant Line Value: WS
  misc_feature: MA Experiment 20000794 PARAMETER Experiment Name: At_Petals_P Parameter: Tissue Value: Petals vs. Whole plant
  misc_feature: MA Experiment ID: 20001450 Result: Down-regulated in Transcription
  misc_feature: MA Experiment 20001450 PARAMETER Experiment Name: At_Far-red-induction_P Parameter: Age (day) Value: 7
  misc_feature: MA Experiment 20001450 PARAMETER Experiment Name: At_Far-red-induction_P Parameter: Light Value: Far-red vs. White
  misc_feature: MA Experiment 20001450 PARAMETER Experiment Name: At_Far-red-induction_P Parameter: Organism Value: A. thaliana
  misc_feature: MA Experiment 20001450 PARAMETER Experiment Name: At_Far-red-induction_P Parameter: Plant Line Value: Columbia
  misc_feature: MA Experiment 20001450 PARAMETER Experiment Name: At_Far-red-induction_P Parameter: Timepoint (hr) Value: 8
  misc_feature: MA Experiment 20001450 PARAMETER Experiment Name: At_Far-red-induction_P Parameter: Tissue Value: Whole Plant
  misc_feature: MA Experiment ID: 20001554 Result: Up-regulated in Transcription
  misc_feature: MA Experiment 20001554 PARAMETER Experiment Name: At_Drought_Soil_Dry_P Parameter: Age (day) Value: 21
  misc_feature: MA Experiment 20001554 PARAMETER Experiment Name: At_Drought_Soil_Dry_P Parameter: Organism Value: A. thaliana
  misc_feature: MA Experiment 20001554 PARAMETER Experiment Name: At_Drought_Soil_Dry_P Parameter: Plant Line Value: WS
  misc_feature: MA Experiment 20001554 PARAMETER Experiment Name: At_Drought_Soil_Dry_P Parameter: Post Timepoint (hr) Value: None
  misc_feature: MA Experiment 20001554 PARAMETER Experiment Name: At_Drought_Soil_Dry_P Parameter: Post-Treatment Value: None
  misc_feature: MA Experiment 20001554 PARAMETER Experiment Name: At_Drought_Soil_Dry_P Parameter: Timepoint (day) Value: 7
  misc_feature: MA Experiment 20001554 PARAMETER Experiment Name: At_Drought_Soil_Dry_P Parameter: Treatment Value: Drought vs. No Drought
  misc_feature: MA Experiment ID: 20001761 Result: Down-regulated in Transcription
  misc_feature: MA Experiment 20001761 PARAMETER Experiment Name: At_50mM_NH4NO3_L-to-H_P Parameter: Timepoint (hr) Value: 4
  misc_feature: MA Experiment 20001761 PARAMETER Experiment Name: At_50mM_NH4NO3_L-to-H_P Parameter: Tissue Value: Siliques
  misc_feature: MA Experiment 20001761 PARAMETER Experiment Name: At_50mM_NH4NO3_L-to-H_P Parameter: Treatment Value: 50mM NH4NO3 vs 100mM Mannitol
  misc_feature: MA Experiment ID: 20001773 Result: Down-regulated in Transcription
  misc_feature: MA Experiment 20001773 PARAMETER Experiment Name: At_Far-red-enriched-adult_P Parameter: Age (day) Value: 30
  misc_feature: MA Experiment 20001773 PARAMETER Experiment Name: At_Far-red-enriched-adult_P Parameter: Light Value: Far-red enriched vs. White
  misc_feature: MA Experiment 20001773 PARAMETER Experiment Name: At_Far-red-enriched-adult_P Parameter: Organism Value: A. thaliana
  misc_feature: MA Experiment 20001773 PARAMETER Experiment Name: At_Far-red-enriched-adult_P Parameter: Plant Line Value: Columbia
  misc_feature: MA Experiment 20001773 PARAMETER Experiment Name: At_Far-red-enriched-adult_P Parameter: Timepoint (hr) Value: 48
  misc_feature: MA Experiment 20001773 PARAMETER Experiment Name: At_Far-red-enriched-adult_P Parameter: Tissue Value: Aerial
  misc_feature: MA Experiment ID: 20001904 Result: Up-regulated in Transcription
  misc_feature: MA Experiment 20001904 PARAMETER Experiment Name: At_Drought_Reproduction_P Parameter: Age (day) Value: 37
  misc_feature: MA Experiment 20001904 PARAMETER Experiment Name: At_Drought_Reproduction_P Parameter: Organism Value: A. thaliana
  misc_feature: MA Experiment 20001904 PARAMETER Experiment Name: At_Drought_Reproduction_P Parameter: Plant Line Value: WS
  misc_feature: MA Experiment 20001904 PARAMETER Experiment Name: At_Drought_Reproduction_P Parameter: Timepoint (day) Value: 7
  misc_feature: MA Experiment 20001904 PARAMETER Experiment Name: At_Drought_Reproduction_P Parameter: Tissue Value: Rosettes
  misc_feature: MA Experiment 20001904 PARAMETER Experiment Name: At_Drought_Reproduction_P Parameter: Treatment Value: Drought vs. No Drought
  misc_feature: MA Experiment ID: 20001905 Result: Up-regulated in Transcription
  misc_feature: MA Experiment 20001905 PARAMETER Experiment Name: At_Drought_Reproduction_P Parameter: Age (day) Value: 40
  misc_feature: MA Experiment 20001905 PARAMETER Experiment Name: At_Drought_Reproduction_P Parameter: Organism Value: A. thaliana
  misc_feature: MA Experiment 20001905 PARAMETER Experiment Name: At_Drought_Reproduction_P Parameter: Plant Line Value: WS
  misc_feature: MA Experiment 20001905 PARAMETER Experiment Name: At_Drought_Reproduction_P Parameter: Timepoint (day) Value: 10
  misc_feature: MA Experiment 20001905 PARAMETER Experiment Name: At_Drought_Reproduction_P Parameter: Tissue Value: Rosettes
  misc_feature: MA Experiment 20001905 PARAMETER Experiment Name: At_Drought_Reproduction_P Parameter: Treatment Value: Drought vs. No Drought
  misc_feature: MA Experiment ID: 20001906 Result: Up-regulated in Transcription
  misc_feature: MA Experiment 20001906 PARAMETER Experiment Name: At_Drought_Reproduction_P Parameter: Age (day) Value: 35
  misc_feature: MA Experiment 20001906 PARAMETER Experiment Name: At_Drought_Reproduction_P Parameter: Organism Value: A. thaliana
  misc_feature: MA Experiment 20001906 PARAMETER Experiment Name: At_Drought_Reproduction_P Parameter: Plant Line Value: WS
  misc_feature: MA Experiment 20001906 PARAMETER Experiment Name: At_Drought_Reproduction_P Parameter: Timepoint (day) Value: 5
  misc_feature: MA Experiment 20001906 PARAMETER Experiment Name: At_Drought_Reproduction_P Parameter: Tissue Value: Siliques
  misc_feature: MA Experiment 20001906 PARAMETER Experiment Name: At_Drought_Reproduction_P Parameter: Treatment Value: Drought vs. No Drought
  misc_feature: MA Experiment ID: 20001908 Result: Up-regulated in Transcription
  misc_feature: MA Experiment 20001908 PARAMETER Experiment Name: At_Drought_Reproduction_P Parameter: Age (day) Value: 40
  misc_feature: MA Experiment 20001908 PARAMETER Experiment Name: At_Drought_Reproduction_P Parameter: Organism Value: A. thaliana
  misc_feature: MA Experiment 20001908 PARAMETER Experiment Name: At_Drought_Reproduction_P Parameter: Plant Line Value: WS
  misc_feature: MA Experiment 20001908 PARAMETER Experiment Name: At_Drought_Reproduction_P Parameter: Timepoint (day) Value: 10
  misc_feature: MA Experiment 20001908 PARAMETER Experiment Name: At_Drought_Reproduction_P Parameter: Tissue Value: Siliques
  misc_feature: MA Experiment 20001908 PARAMETER Experiment Name: At_Drought_Reproduction_P Parameter: Treatment Value: Drought vs. No Drought
  misc_feature: MA Experiment ID: 20001910 Result: Up-regulated in Transcription
  misc_feature: MA Experiment 20001910 PARAMETER Experiment Name: At_Drought_Reproduction_P Parameter: Age (day) Value: 37
  misc_feature: MA Experiment 20001910 PARAMETER Experiment Name: At_Drought_Reproduction_P Parameter: Organism Value: A. thaliana
  misc_feature: MA Experiment 20001910 PARAMETER Experiment Name: At_Drought_Reproduction_P Parameter: Plant Line Value: WS
  misc_feature: MA Experiment 20001910 PARAMETER Experiment Name: At_Drought_Reproduction_P Parameter: Timepoint (day) Value: 7
  misc_feature: MA Experiment 20001910 PARAMETER Experiment Name: At_Drought_Reproduction_P Parameter: Tissue Value: Flowers
  misc_feature: MA Experiment 20001910 PARAMETER Experiment Name: At_Drought_Reproduction_P Parameter: Treatment Value: Drought vs. No Drought
  misc_feature: MA Experiment ID: 20001911 Result: Up-regulated in Transcription
  misc_feature: MA Experiment 20001911 PARAMETER Experiment Name: At_Drought_Reproduction_P Parameter: Age (day) Value: 40
  misc_feature: MA Experiment 20001911 PARAMETER Experiment Name: At_Drought_Reproduction_P Parameter: Organism Value: A. thaliana
  misc_feature: MA Experiment 20001911 PARAMETER Experiment Name: At_Drought_Reproduction_P Parameter: Plant Line Value: WS
  misc_feature: MA Experiment 20001911 PARAMETER Experiment Name: At_Drought_Reproduction_P Parameter: Timepoint (day) Value: 10
  misc_feature: MA Experiment 20001911 PARAMETER Experiment Name: At_Drought_Reproduction_P Parameter: Tissue Value: Flowers
  misc_feature: MA Experiment 20001911 PARAMETER Experiment Name: At_Drought_Reproduction_P Parameter: Treatment Value: Drought vs. No Drought
aaatcaaacataacaaaaaccaacaaaacaaactcaaaaggattcttcttcaaacacaacatcttcaagaaaacatgaaaatggaaatgggtttagtgttccttacagtttttatggctgtgatgtcttctacaatggtctctgctcagtcaagctgcacaaacgcgttgattagcatgtcgccgtgtctcaactacataactggaaactctacctctcctaatcagcaatgctgtaatcagttgagtagagtagtccagtcttctcctgactgtttgtgtcaagtccttaacggtggaggctctcagcttgggatcaatgttaaccaaacacaagctcttggtctgcctagggcttgtaatgttcagactcctcctgtcagtcgctgtaataccggtggtggtggtggtggttctacttctgactctcctgcagaatcaccaaactcttcaggaccaggtaatggatcgaaaaccgtaccagtaggagaaggagacggacccccatcgtctgatggaagctctatcaagttctcatttcctcttattgccttcttctccgcggtttcctacatggcaatcttctgagttactattttcccatacgcttttgtgccactcagattgcattctttatttgtccctatttattcacatttcgttgtgattttgtgtgatgtattttatgctctgtaaatccctactctccgggtgatattgctttgttgtaccaacggagagcattttggatctctttaccttttataataaacattactttcccg

SEQ ID NO: 30839 - protein, 194 aa, Arabidopsis thaliana
  peptide (1)..(194): Ceres Seq. ID no. 12332256
  misc_feature (52)..(129): Pfam Name: Protease inhibitor/seed storage/LTP family Pfam Description: Protease inhibitor/seed storage/LTP family
  misc_feature (25)..(190): Homolog of NCBI NO: 25553595 NR Description: OJ1656_E11.26 [Oryza sativa (japonica
  misc_feature (47)..(167): Homolog of NCBI NO: 25553602 NR Description: OJ1656_E11.34 [Oryza sativa (japonica
  misc_feature (31)..(177): Homolog of NCBI NO: 18407534 NR Description: expressed protein
  misc_feature (31)..(177): Homolog of NCBI NO: 21592774 NR Description: unknown [Arabidopsis thaliana]
  misc_feature (47)..(193): Homolog of NCBI NO: 28269454 NR Description: putative protease inhibitor
  misc_feature (25)..(193): Homolog of NCBI NO: 18414320 NR Description: Expressed protein
  misc_feature (25)..(193): Homolog of NCBI NO: 21592722 NR Description: unknown [Arabidopsis thaliana]
  misc_feature (29)..(194): Homolog of NCBI NO: 21554014 NR Description: unknown [Arabidopsis thaliana]
  misc_feature (27)..(194): Homolog of NCBI NO: 24417478 NR Description: unknown [Arabidopsis thaliana]
  misc_feature (25)..(194): Homolog of NCBI NO: 18403453 NR Description: expressed protein
IKHNKNQQNKLKRILLQTQHLQENMKMEMGLVFLTVFMAVMSSTMVSAQSSCTNALISMSPCLNYITGNSTSPNQQCCNQLSRVVQSSPDCLCQVLNGGGSQLGINVNQTQALGLPRACNVQTPPVSRCNTGGGGGGSTSDSPAESPNSSGPGNGSKTVPVGEGDGPPSSDGSSIKFSFPLIAFFSAVSYMAIF

SEQ ID NO: 30840 - protein, 170 aa, Arabidopsis thaliana
  peptide (1)..(170): Ceres Seq. ID no. 12332257
  misc_feature (28)..(105): Pfam Name: Protease inhibitor/seed storage/LTP family Pfam Description: Protease inhibitor/seed storage/LTP family
  misc_feature (1)..(166): Homolog of NCBI NO: 25553595 NR Description: OJ1656_E11.26 [Oryza sativa (japonica
  misc_feature (23)..(143): Homolog of NCBI NO: 25553602 NR Description: OJ1656_E11.34 [Oryza sativa (japonica
  misc_feature (7)..(153): Homolog of NCBI NO: 18407534 NR Description: expressed protein
  misc_feature (7)..(153): Homolog of NCBI NO: 21592774 NR Description: unknown [Arabidopsis thaliana]
  misc_feature (23)..(169): Homolog of NCBI NO: 28269454 NR Description: putative protease inhibitor
  misc_feature (1)..(169): Homolog of NCBI NO: 18414320 NR Description: Expressed protein
  misc_feature (1)..(169): Homolog of NCBI NO: 21592722 NR Description: unknown [Arabidopsis thaliana]
  misc_feature (5)..(170): Homolog of NCBI NO: 21554014 NR Description: unknown [Arabidopsis thaliana]
  misc_feature (3)..(170): Homolog of NCBI NO: 24417478 NR Description: unknown [Arabidopsis thaliana]
  misc_feature (1)..(170): Homolog of NCBI NO: 18403453 NR Description: expressed protein
MKMEMGLVFLTVFMAVMSSTMVSAQSSCTNALISMSPCLNYITGNSTSPNQQCCNQLSRVVQSSPDCLCQVLNGGGSQLGINVNQTQALGLPRACNVQTPPVSRCNTGGGGGGSTSDSPAESPNSSGPGNGSKTVPVGEGDGPPSSDGSSIKFSFPLIAFFSAVSYMAIF

SEQ ID NO: 30841 - protein, 168 aa, Arabidopsis thaliana
  peptide (1)..(168): Ceres Seq. ID no. 12332258
  misc_feature (26)..(103): Pfam Name: Protease inhibitor/seed storage/LTP family Pfam Description: Protease inhibitor/seed storage/LTP family
  misc_feature (1)..(164): Homolog of NCBI NO: 25553595 NR Description: OJ1656_E11.26 [Oryza sativa (japonica
  misc_feature (21)..(141): Homolog of NCBI NO: 25553602 NR Description: OJ1656_E11.34 [Oryza sativa (japonica
  misc_feature (5)..(151): Homolog of NCBI NO: 18407534 NR Description: expressed protein
  misc_feature (5)..(151): Homolog of NCBI NO: 21592774 NR Description: unknown [Arabidopsis thaliana]
  misc_feature (21)..(167): Homolog of NCBI NO: 28269454 NR Description: putative protease inhibitor
  misc_feature (1)..(167): Homolog of NCBI NO: 18414320 NR Description: Expressed protein
  misc_feature (1)..(167): Homolog of NCBI NO: 21592722 NR Description: unknown [Arabidopsis thaliana]
  misc_feature (3)..(168): Homolog of NCBI NO: 21554014 NR Description: unknown [Arabidopsis thaliana]
  misc_feature (1)..(168): Homolog of NCBI NO: 24417478 NR Description: unknown [Arabidopsis thaliana]
  misc_feature (1)..(168): Homolog of NCBI NO: 18403453 NR Description: expressed protein
MEMGLVFLTVFMAVMSSTMVSAQSSCTNALISMSPCLNYITGNSTSPNQQCCNQLSRVVQSSPDCLCQVLNGGGSQLGINVNQTQALGLPRACNVQTPPVSRCNTGGGGGGSTSDSPAESPNSSGPGNGSKTVPVGEGDGPPSSDGSSIKFSFPLIAFFSAVSYMAIF

SEQ ID NO: 30842 - DNA, 965 bp, Arabidopsis thaliana
  misc_feature (1)..(965): Ceres Seq. ID no. 13491928
  misc_feature: MA Experiment ID: 108434 Result: Up-regulated in Transcription
  misc_feature: MA Experiment 108434 PARAMETER Experiment Name: At_Root_Tips_cDNA_P Parameter: Tissue Value: Root Tips
  misc_feature: MA Experiment ID: 108461 Result: Up-regulated in Transcription
  misc_feature: MA Experiment 108461 PARAMETER Experiment Name: At_Germinating_Seeds_cDNA_P Parameter: Age (day) Value: 1 vs. 0
  misc_feature: MA Experiment 108461 PARAMETER Experiment Name: At_Germinating_Seeds_cDNA_P Parameter: Tissue Value: Germinating Seeds
  misc_feature: MA Experiment ID: 108462 Result: Up-regulated in Transcription
  misc_feature: MA Experiment 108462 PARAMETER Experiment Name: At_Germinating_Seeds_cDNA_P Parameter: Age (day) Value: 2 vs. 0
  misc_feature: MA Experiment 108462 PARAMETER Experiment Name: At_Germinating_Seeds_cDNA_P Parameter: Tissue Value: Germinating Seeds
  misc_feature: MA Experiment ID: 20000179 Result: Up-regulated in Transcription
  misc_feature: MA Experiment 20000179 PARAMETER Experiment Name: At_Germinating_Seeds_P Parameter: Age (hr) Value: 6 vs. 0
  misc_feature: MA Experiment 20000179 PARAMETER Experiment Name: At_Germinating_Seeds_P Parameter: Tissue Value: Germinating Seeds
  misc_feature: MA Experiment ID: 20000180 Result: Up-regulated in Transcription
  misc_feature: MA Experiment 20000180 PARAMETER Experiment Name: At_Germinating_Seeds_P Parameter: Age (hr) Value: 24 vs. 0
  misc_feature: MA Experiment 20000180 PARAMETER Experiment Name: At_Germinating_Seeds_P Parameter: Tissue Value: Germinating Seeds
  misc_feature: MA Experiment ID: 20000794 Result: Up-regulated in Transcription
  misc_feature: MA Experiment 20000794 PARAMETER Experiment Name: At_Petals_P Parameter: Age (day) Value: 23-25 days
  misc_feature: MA Experiment 20000794 PARAMETER Experiment Name: At_Petals_P Parameter: Plant Line Value: WS
  misc_feature: MA Experiment 20000794 PARAMETER Experiment Name: At_Petals_P Parameter: Tissue Value: Petals vs. Whole plant
cgttacgttttaggcgtttaacacaattattattttctaaaacgagagccgtttaacgagaaagagaaatttctaactccagagagcgaagaacacaatcccagagtagcagaatctgatccatcccacctttttcaattctcaggcaaagtgtttgatctcatattcggataagtcaaacttgaaaaaatggaagggactgtgttcacgccttgtttggaaggaatgaagcatgtcaaatctgatcaaggcgagatgcttactaagccatttttagagctttgcaagaccatcttgcctgttatagataaatttggagctgctatgactctcgtgaaatctgacattggtggcaacataacgaggttggagaagaactacttatctgatcccgacaagttcaagtacttgtacacctttgttcaagtcgaaattgagtctaagatagcaaaaggatcgtctagctgtacaaacggtcttctctggttaaccagagcaatggatttcttagtggagctgttccgaaacttggtagcacatcaagactggtcaatgccacaagcttgtgctgactcataccaaaaaacactcaagaaatggcacggatggctcgccagctctaccttctctatggctttaaagctagctccggacaggaagaagttcatggatgtcatatctggttctggtaacatccaagccgacatggaaaggttttgtgctgagtttggtccgtttcttcatgataatcataagtttctggctagcgtcggtatggatgacatgaaagcttcttaagtcatcatatgattatcgccggtatcaaatcttctttgccggaatctttgtctgttttaacttttctccttccaattatagaacctccaaaaagaaacagaataatgtgttggtttctatctgaatgttcactttatattacaagttataacatacgaatcaatctt

SEQ ID NO: 30843 - protein, 202 aa, Arabidopsis thaliana; identical to SEQ ID NO: 24242
  peptide (1)..(202): Ceres Seq. ID no. 13491929
  misc_feature (19)..(164): Homolog of NCBI NO: 7705684 NR Description: putative glycolipid transfer protein [Homo
  misc_feature (19)..(164): Homolog of NCBI NO: 30481662 NR Description: Unknown (protein for MGC:58573) [Mus musculus]
  misc_feature (66)..(201): Homolog of NCBI NO: 21554671 NR Description: unknown [Arabidopsis thaliana]
  misc_feature (66)..(201): Homolog of NCBI NO: 18402939 NR Description: expressed protein [Arabidopsis thaliana]
  misc_feature (59)..(201): Homolog of NCBI NO: 30686173 NR Description: expressed protein [Arabidopsis thaliana]
  misc_feature (25)..(191): Homolog of NCBI NO: 39545646 NR Description: OJ000114_01.1 [Oryza sativa (japonica
  misc_feature (26)..(201): Homolog of NCBI NO: 9280228 NR Description: gene_id:MXL8.12~unknown protein [Arabidopsis
  misc_feature (25)..(202): Homolog of NCBI NO: 38344077 NR Description: OSJNBa0006B20.21 [Oryza sativa (japonica
  misc_feature (1)..(202): Homolog of NCBI NO: 34901156 NR Description: hypothetical protein~similar to Arabidopsis
  misc_feature (1)..(202): Homolog of NCBI NO: 18403285 NR Description: expressed protein [Arabidopsis thaliana]

SEQ ID NO: 30844 - protein, 190 aa, Arabidopsis thaliana; identical to SEQ ID NO: 24243
  peptide (1)..(190): Ceres Seq. ID no. 13491930
  misc_feature (7)..(152): Homolog of NCBI NO: 7705684 NR Description: putative glycolipid transfer protein [Homo
  misc_feature (7)..(152): Homolog of NCBI NO: 30481662 NR Description: Unknown (protein for MGC:58573) [Mus musculus]
  misc_feature (54)..(189): Homolog of NCBI NO: 21554671 NR Description: unknown [Arabidopsis thaliana]
  misc_feature (54)..(189): Homolog of NCBI NO: 18402939 NR Description: expressed protein [Arabidopsis thaliana]
  misc_feature (47)..(189): Homolog of NCBI NO: 30686173 NR Description: expressed protein [Arabidopsis thaliana]
  misc_feature (13)..(179): Homolog of NCBI NO: 39545646 NR Description: OJ000114_01.1 [Oryza sativa (japonica
  misc_feature (14)..(189): Homolog of NCBI NO: 9280228 NR Description: gene_id:MXL8.12~unknown protein [Arabidopsis
  misc_feature (13)..(190): Homolog of NCBI NO: 38344077 NR Description: OSJNBa0006B20.21 [Oryza sativa (japonica
  misc_feature (1)..(190): Homolog of NCBI NO: 34901156 NR Description: hypothetical protein~similar to Arabidopsis
  misc_feature (1)..(190): Homolog of NCBI NO: 18403285 NR Description: expressed protein [Arabidopsis thaliana]

SEQ ID NO: 30845 - protein, 180 aa, Arabidopsis thaliana; identical to SEQ ID NO: 24244
  peptide (1)..(180): Ceres Seq. ID no. 13491931
  misc_feature (1)..(142): Homolog of NCBI NO: 7705684 NR Description: putative glycolipid transfer protein [Homo
  misc_feature (1)..(142): Homolog of NCBI NO: 30481662 NR Description: Unknown (protein for MGC:58573) [Mus musculus]
  misc_feature (44)..(179): Homolog of NCBI NO: 21554671 NR Description: unknown [Arabidopsis thaliana]
  misc_feature (44)..(179): Homolog of NCBI NO: 18402939 NR Description: expressed protein [Arabidopsis thaliana]
  misc_feature (37)..(179): Homolog of NCBI NO: 30686173 NR Description: expressed protein [Arabidopsis thaliana]
  misc_feature (3)..(169): Homolog of NCBI NO: 39545646 NR Description: OJ000114_01.1 [Oryza sativa (japonica
  misc_feature (4)..(179): Homolog of NCBI NO: 9280228 NR Description: gene_id:MXL8.12~unknown protein [Arabidopsis
  misc_feature (3)..(180): Homolog of NCBI NO: 38344077 NR Description: OSJNBa0006B20.21 [Oryza sativa (japonica
  misc_feature (1)..(180): Homolog of NCBI NO: 34901156 NR Description: hypothetical protein~similar to Arabidopsis
  misc_feature (1)..(180): Homolog of NCBI NO: 18403285 NR Description: expressed protein [Arabidopsis thaliana]

SEQ ID NO: 30846 - DNA, 673 bp, Arabidopsis thaliana
  misc_feature (1)..(673): Ceres Seq. ID no. 12322661
  misc_feature: MA Experiment ID: 108474 Result: Down-regulated in Transcription
  misc_feature: MA Experiment 108474 PARAMETER Experiment Name: At_Drought_Flowers_cDNA_P Parameter: Timepoint (hr) Value: null
  misc_feature: MA Experiment 108474 PARAMETER Experiment Name: At_Drought_Flowers_cDNA_P Parameter: Treatment Value: Drought vs. No Drought
  misc_feature: MA Experiment ID: 108595 Result: Up-regulated in Transcription
  misc_feature: MA Experiment 108595 PARAMETER Experiment Name: At_Ler-pi_Ovule_cDNA_P Parameter: Plant Line Value: null
  misc_feature: MA Experiment ID: 20000234 Result: Up-regulated in Transcription
  misc_feature: MA Experiment 20000234 PARAMETER Experiment Name: At_Siliques_P Parameter: Age (day) Value: 21
  misc_feature: MA Experiment 20000234 PARAMETER Experiment Name: At_Siliques_P Parameter: Organism Value: A. thaliana
  misc_feature: MA Experiment 20000234 PARAMETER Experiment Name: At_Siliques_P Parameter: Plant Line Value: WS
  misc_feature: MA Experiment 20000234 PARAMETER Experiment Name: At_Siliques_P Parameter: Tissue Value: Less Than 5mm Siliques vs. Whole Plant
  misc_feature: MA Experiment ID: 20000235 Result: Up-regulated in Transcription
  misc_feature: MA Experiment 20000235 PARAMETER Experiment Name: At_Siliques_P Parameter: Age (day) Value: 21
  misc_feature: MA Experiment 20000235 PARAMETER Experiment Name: At_Siliques_P Parameter: Organism Value: A. thaliana
  misc_feature: MA Experiment 20000235 PARAMETER Experiment Name: At_Siliques_P Parameter: Plant Line Value: WS
  misc_feature: MA Experiment 20000235 PARAMETER Experiment Name: At_Siliques_P Parameter: Tissue Value: 5-10mm Siliques vs. Whole Plant
  misc_feature: MA Experiment ID: 20000286 Result: Up-regulated in Transcription
  misc_feature: MA Experiment 20000286 PARAMETER Experiment Name: At_Open_Flower_P Parameter: Age (day) Value: 21
  misc_feature: MA Experiment 20000286 PARAMETER Experiment Name: At_Open_Flower_P Parameter: Plant Line Value: WS
  misc_feature: MA Experiment 20000286 PARAMETER Experiment Name: At_Open_Flower_P Parameter: Tissue Value: Half Open vs. Whole Plant
  misc_feature: MA Experiment ID: 20000441 Result: Down-regulated in Transcription
  misc_feature: MA Experiment 20000441 PARAMETER Experiment Name: At_1uM_BR-BRZ__P Parameter: Tissue Value: Shoot Apices
  misc_feature: MA Experiment 20000441 PARAMETER Experiment Name: At_1uM_BR-BRZ__P Parameter: Treatment Value: 1uM BR vs. No Treatment
aaaaaatttactcggattttaaagcagattccttcgatctaaagaaagagagaaaatggagaatatgttaggtcttctaagacttcatgtgattagaggtgttaatcttgccatcagagattctcaaagcagtgatccttatgtcattgtcctatgggaaaacagaagctacgaacccgtgtgatgaaaaagaatttgaatccagaatggaacgaagacttgacactttctgttactgatccaactcttcctgtcaagatcatggtgtacgatagggacaggttctcaagagatgataagatgggagatgcgatttttcacattgatccgttccttgaagccatcagaatccaaaaccaactaggaggactacctgaggggactgtaataatgaagatacaggcaagcagacaaaactgcttgtcagaagagagcaagattgtatggcacaaaggaaagattgtccagaacatgttccttaagcttcagaatgttgaacgaggggagatagagctgcagcttgagtggatcgatgtctccggcgccttgactgatgatgcggaggatgttgctttctagatcgactctatactacaagaaattcctgtgatgatacggcgaaaacaataacacaaactgatgtagtgatttactcaattaataatcttaatgc

SEQ ID NO: 30847 - protein, 141 aa, Arabidopsis thaliana
  peptide (1)..(141): Ceres Seq. ID no. 12322662
  misc_feature (1)..(54): Pfam Name: C2 domain Pfam Description: C2 domain
  misc_feature (1)..(130): Homolog of NCBI NO: 15223248 NR Description: unknown protein; protein id: At1g70800.1
  misc_feature (1)..(130): Homolog of NCBI NO: 18409675 NR Description: zinc finger and C2 domain protein, putative
  misc_feature (1)..(131): Homolog of NCBI NO: 18409682 NR Description: expressed protein
  misc_feature (4)..(130): Homolog of NCBI NO: 15226306 NR Description: hypothetical protein
  misc_feature (1)..(131): Homolog of NCBI NO: 15219500 NR Description: hypothetical protein; protein id: At1g73580.1
  misc_feature (1)..(130): Homolog of NCBI NO: 25405940 NR Description: protein T1N15.21 [imported] - Arabidopsis
  misc_feature (1)..(130): Homolog of NCBI NO: 15221907 NR Description: unknown protein; protein id: At1g48590.1
  misc_feature (1)..(131): Homolog of NCBI NO: 30684739 NR Description: C2 domain-containing protein [Arabidopsis
  misc_feature (1)..(131): Homolog of NCBI NO: 15240322 NR Description: putative protein
  misc_feature (1)..(141): Homolog of NCBI NO: 18408493 NR Description: expressed protein
MGKQKLRTRVMKKNLNPEWNEDLTLSVTDPTLPVKIMVYDRDRFSRDDKMGDAIFHIDPFLEAIRIQNQLGGLPEGTVIMKIQASRQNCLSEESKIVWHKGKIVQNMFLKLQNVERGEIELQLEWIDVSGALTDDAEDVAF

SEQ ID NO: 30848 - protein, 131 aa, Arabidopsis thaliana
  peptide (1)..(131): Ceres Seq. ID no. 12322663
  misc_feature (1)..(120): Homolog of NCBI NO: 15223248 NR Description: unknown protein; protein id: At1g70800.1
  misc_feature (1)..(120): Homolog of NCBI NO: 18409675 NR Description: zinc finger and C2 domain protein, putative
  misc_feature (1)..(121): Homolog of NCBI NO: 18409682 NR Description: expressed protein
  misc_feature (1)..(120): Homolog of NCBI NO: 15226306 NR Description: hypothetical protein
  misc_feature (1)..(121): Homolog of NCBI NO: 15219500 NR Description: hypothetical protein; protein id: At1g73580.1
  misc_feature (1)..(120): Homolog of NCBI NO: 25405940 NR Description: protein T1N15.21 [imported] - Arabidopsis
  misc_feature (1)..(120): Homolog of NCBI NO: 15221907 NR Description: unknown protein; protein id: At1g48590.1
  misc_feature (1)..(121): Homolog of NCBI NO: 30684739 NR Description: C2 domain-containing protein [Arabidopsis
  misc_feature (1)..(121): Homolog of NCBI NO: 15240322 NR Description: putative protein
  misc_feature (1)..(131): Homolog of NCBI NO: 18408493 NR Description: expressed protein
MKKNLNPEWNEDLTLSVTDPTLPVKIMVYDRDRFSRDDKMGDAIFHIDPFLEAIRIQNQLGGLPEGTVIMKIQASRQNCLSEESKIVWHKGKIVQNMFLKLQNVERGEIELQLEWIDVSGALTDDAEDVAF

SEQ ID NO: 30849 - protein, 105 aa, Arabidopsis thaliana
  peptide (1)..(105): Ceres Seq. ID no. 12322664
  misc_feature (1)..(94): Homolog of NCBI NO: 15223248 NR Description: unknown protein; protein id: At1g70800.1
  misc_feature (1)..(94): Homolog of NCBI NO: 18409675 NR Description: zinc finger and C2 domain protein, putative
  misc_feature (1)..(95): Homolog of NCBI NO: 18409682 NR Description: expressed protein
  misc_feature (1)..(94): Homolog of NCBI NO: 15226306 NR Description: hypothetical protein
  misc_feature (1)..(95): Homolog of NCBI NO: 15219500 NR Description: hypothetical protein; protein id: At1g73580.1
  misc_feature (1)..(94): Homolog of NCBI NO: 25405940 NR Description: protein T1N15.21 [imported] - Arabidopsis
  misc_feature (1)..(94): Homolog of NCBI NO: 15221907 NR Description: unknown protein; protein id: At1g48590.1
  misc_feature (1)..(95): Homolog of NCBI NO: 30684739 NR Description: C2 domain-containing protein [Arabidopsis
  misc_feature (1)..(95): Homolog of NCBI NO: 15240322 NR Description: putative protein
  misc_feature (1)..(105): Homolog of NCBI NO: 18408493 NR Description: expressed protein
MVYDRDRFSRDDKMGDAIFHIDPFLEAIRIQNQLGGLPEGTVIMKIQASRQNCLSEESKIVWHKGKIVQNMFLKLQNVERGEIELQLEWIDVSGALTDDAEDVAF

SEQ ID NO: 30850 - DNA, 1333 bp, Arabidopsis thaliana
  misc_feature (1)..(1333): Ceres Seq. ID no. 13504694
  misc_feature: MA Experiment ID: 108434 Result: Down-regulated in Transcription
  misc_feature: MA Experiment 108434 PARAMETER Experiment Name: At_Root_Tips_cDNA_P Parameter: Tissue Value: Root Tips
  misc_feature: MA Experiment ID: 108462 Result: Up-regulated in Transcription
  misc_feature: MA Experiment 108462 PARAMETER Experiment Name: At_Germinating_Seeds_cDNA_P Parameter: Age (day) Value: 2 vs. 0
  misc_feature: MA Experiment 108462 PARAMETER Experiment Name: At_Germinating_Seeds_cDNA_P Parameter: Tissue Value: Germinating Seeds
  misc_feature: MA Experiment ID: 108463 Result: Up-regulated in Transcription
  misc_feature: MA Experiment 108463 PARAMETER Experiment Name: At_Germinating_Seeds_cDNA_P Parameter: Age (day) Value: 3 vs. 0
  misc_feature: MA Experiment 108463 PARAMETER Experiment Name: At_Germinating_Seeds_cDNA_P Parameter: Tissue Value: Germinating Seeds
  misc_feature: MA Experiment ID: 108464 Result: Up-regulated in Transcription
  misc_feature: MA Experiment 108464 PARAMETER Experiment Name: At_Germinating_Seeds_cDNA_P Parameter: Age (day) Value: 4 vs. 0
  misc_feature: MA Experiment 108464 PARAMETER Experiment Name: At_Germinating_Seeds_cDNA_P Parameter: Tissue Value: Germinating Seeds
  misc_feature: MA Experiment ID: 108561 Result: Down-regulated in Transcription
  misc_feature: MA Experiment 108561 PARAMETER Experiment Name: At_100uM_ABA_cDNA_P Parameter: Timepoint (hr) Value: 6
  misc_feature: MA Experiment 108561 PARAMETER Experiment Name: At_100uM_ABA_cDNA_P Parameter: Tissue Value: Aerial
  misc_feature: MA Experiment 108561 PARAMETER Experiment Name: At_100uM_ABA_cDNA_P Parameter: Treatment Value: 100uM ABA vs. No Treatment
  misc_feature: MA Experiment ID: 20000171 Result: Up-regulated in Transcription
  misc_feature: MA Experiment 20000171 PARAMETER Experiment Name: At_42deg_Heat_P Parameter: Age (day) Value: 14
  misc_feature: MA Experiment 20000171 PARAMETER Experiment Name: At_42deg_Heat_P Parameter: Organism Value: A. thaliana
  misc_feature: MA Experiment 20000171 PARAMETER Experiment Name: At_42deg_Heat_P Parameter: Plant Line Value: WS
  misc_feature: MA Experiment 20000171 PARAMETER Experiment Name: At_42deg_Heat_P Parameter: Temperature (deg C) Value: 42 vs. 22
  misc_feature: MA Experiment 20000171 PARAMETER Experiment Name: At_42deg_Heat_P Parameter: Timepoint (hr) Value: 1
  misc_feature: MA Experiment 20000171 PARAMETER Experiment Name: At_42deg_Heat_P Parameter: Tissue Value: Aerial
  misc_feature: MA Experiment ID: 20000173 Result: Up-regulated in Transcription
  misc_feature: MA Experiment 20000173 PARAMETER Experiment Name: At_42deg_Heat_P Parameter: Age (day) Value: 14
  misc_feature: MA Experiment 20000173 PARAMETER Experiment Name: At_42deg_Heat_P Parameter: Organism Value: A. thaliana
  misc_feature: MA Experiment 20000173 PARAMETER Experiment Name: At_42deg_Heat_P Parameter: Plant Line Value: WS
  misc_feature: MA Experiment 20000173 PARAMETER Experiment Name: At_42deg_Heat_P Parameter: Temperature (deg C) Value: 42 vs. 22
  misc_feature: MA Experiment 20000173 PARAMETER Experiment Name: At_42deg_Heat_P Parameter: Timepoint (hr) Value: 6
  misc_feature: MA Experiment 20000173 PARAMETER Experiment Name: At_42deg_Heat_P Parameter: Tissue Value: Aerial
  misc_feature: MA Experiment ID: 20000439 Result: Up-regulated in Transcription
  misc_feature: MA Experiment 20000439 PARAMETER Experiment Name: At_Roots__P Parameter: Age (day) Value: 14 vs. 21
  misc_feature: MA Experiment 20000439 PARAMETER Experiment Name: At_Roots__P Parameter: Organism Value: A. thaliana
  misc_feature: MA Experiment 20000439 PARAMETER Experiment Name: At_Roots__P Parameter: Tissue Value: Roots vs. Whole Plant
  misc_feature: MA Experiment ID: 20000451 Result: Up-regulated in Transcription
  misc_feature: MA Experiment 20000451 PARAMETER Experiment Name: At_CS6879_Shoots-Roots_P Parameter: Age (day) Value: 14
  misc_feature: MA Experiment 20000451 PARAMETER Experiment Name: At_CS6879_Shoots-Roots_P Parameter: Organism Value: A. thaliana
  misc_feature: MA Experiment 20000451 PARAMETER Experiment Name: At_CS6879_Shoots-Roots_P Parameter: Plant Line Value: CS6879 vs. WS
  misc_feature: MA Experiment 20000451 PARAMETER Experiment Name: At_CS6879_Shoots-Roots_P Parameter: Tissue Value: Roots
  misc_feature: MA Experiment ID: 20000527 Result: Down-regulated in Transcription
  misc_feature: MA Experiment 20000527 PARAMETER Experiment Name: At_10percent_PEG_P Parameter: Age (day) Value: 20
  misc_feature: MA Experiment 20000527 PARAMETER Experiment Name: At_10percent_PEG_P Parameter: Organism Value: A. thaliana
  misc_feature: MA Experiment 20000527 PARAMETER Experiment Name: At_10percent_PEG_P Parameter: Plant Line Value: WS
  misc_feature: MA Experiment 20000527 PARAMETER Experiment Name: At_10percent_PEG_P Parameter: Timepoint (day) Value: 20
  misc_feature: MA Experiment 20000527 PARAMETER Experiment Name: At_10percent_PEG_P Parameter: Tissue Value: Whole Plant
  misc_feature: MA Experiment 20000527 PARAMETER Experiment Name: At_10percent_PEG_P Parameter: Treatment Value: 10percent PEG vs. No Treatment
acactatcaatctacgatcatatatctttcatttcatcatcatggaccacaaaatgtcaatgtatttgtttgtgtcttacctagcaatctttactcttttcttcaaaggctttgtctcctcgtttccttcgggatataacaatggttacaacaatggtcacggacatggactaactagcaatctcaactatcgattctatgaccggtcttgtccgcgtcttcaaacgattgttaagtccggagtttggagagcttttaaagatgattctcgaatcgctgcatctcttcttcgactccatttccacgattgttttgtcaatggatgtgatggatctatacttctgaacgattcagaggatttcaaaggagagaagaacgctcagccaaaccgaaactcagtccgtggattcgaagtcattgaagacattaaatctgatatcgaaagttcttgtcccttaacagtttcatgcgctgacatagttgctctcgcggctagagaagctgtcgtcctcactggaggaccgttttggcccgtgcctttgggacgaagggactcattaacggcgagtgagcaagcggcgaatacaaatctgccatctccgtttgaggcgttggagaatataacagccaagttcgtgacccttggactcgacctcaaggacgttgttgtcctctcaggagcacatactataggatttgctcaatgtttcgtgatcaagcatagactcttcaacttcaagggctcaggccagcctgacccaaacctagccgcttcctcagcacttctctctaagctaaaggacacgtgtcctaacgtggactcctcagactctaagctcgctgctcttgacgcagctagctcagtcaagtttgacaatgcttactacgtgaacttaatgaacaacataggactgttggattctgatcaaaccctaatgacagatcctacggctgccgccttggtgaagtcgtacagcgagaatccgtacttgttctcgagggatttcgcagtttcaatggttaaaatggggaatatcggagttatgaccggaagtgatggagtaattcgaggaaaatgtggatttccaggttaagttatatatagactcttcacaaaatccaaatcagtctattatatatctagagctaatctagctttaatgaggaatcaaataaaccaaagtctatgaataaaatatgttttatatatatggtgtaaaagcgtccttatgtatcaatatatatatatatggatcccataaacaaaaatacttggacttgtatgtgtgttacgtttgtgtgtaatggaaaatgtatttgtctttgtattttt

SEQ ID NO: 30851 - protein, 363 aa, Arabidopsis thaliana
  peptide (1)..(363): Ceres Seq. ID no. 13504695
  misc_feature (77)..(327): Pfam Name: Peroxidase Pfam Description: Peroxidase
  misc_feature (18)..(359): Homolog of NCBI NO: 15219493 NR Description: peroxidase, putative [Arabidopsis thaliana]
  misc_feature (61)..(359): Homolog of NCBI NO: 11513747 NR Description: Chain A, Arabidopsis Thaliana Peroxidase A2
  misc_feature (55)..(359): Homolog of NCBI NO: 5453379 NR Description: bacterial-induced peroxidase precursor [Gossypium
  misc_feature (58)..(359): Homolog of NCBI NO: 15240140 NR Description: peroxidase, putative [Arabidopsis thaliana]
  misc_feature (58)..(359): Homolog of NCBI NO: 21593262 NR Description: peroxidase [Arabidopsis thaliana]
  misc_feature (61)..(359): Homolog of NCBI NO: 1730490 NR Description: Peroxidase A2
  misc_feature (58)..(359): Homolog of NCBI NO: 15240141 NR Description: peroxidase, putative [Arabidopsis thaliana]
  misc_feature (58)..(359): Homolog of NCBI NO: 21594792 NR Description: peroxidase [Arabidopsis thaliana]
  misc_feature (14)..(363): Homolog of NCBI NO: 1546702 NR Description: peroxidase; peroxidase ATP5a [Arabidopsis
  misc_feature (14)..(363): Homolog of NCBI NO: 30694586 NR Description: peroxidase, putative [Arabidopsis thaliana]
TINLRSYIFHFIIMDHKMSMYLFVSYLAIFTLFFKGFVSSFPSGYNNGYNNGHGHGLTSNLNYRFYDRSCPRLQTIVKSGVWRAFKDDSRIAASLLRLHFHDCFVNGCDGSILLNDSEDFKGEKNAQPNRNSVRGFEVIEDIKSDIESSCPLTVSCADIVALAAREAVVLTGGPFWPVPLGRRDSLTASEQAANTNLPSPFEALENITAKFVTLGLDLKDVVVLSGAHTIGFAQCFVIKHRLFNFKGSGQPDPNLAASSALLSKLKDTCPNVDSSDSKLAALDAASSVKFDNAYYVNLMNNIGLLDSDQTLMTDPTAAALVKSYSENPYLFSRDFAVSMVKMGNIGVMTGSDGVIRGKCGFPG

SEQ ID NO: 30852 - protein, 350 aa, Arabidopsis thaliana
  peptide (1)..(350): Ceres Seq. ID no. 13504696
  misc_feature (64)..(314): Pfam Name: Peroxidase Pfam Description: Peroxidase
  misc_feature (5)..(346): Homolog of NCBI NO: 15219493 NR Description: peroxidase, putative [Arabidopsis thaliana]
  misc_feature (48)..(346): Homolog of NCBI NO: 11513747 NR Description: Chain A, Arabidopsis Thaliana Peroxidase A2
  misc_feature (42)..(346): Homolog of NCBI NO: 5453379 NR Description: bacterial-induced peroxidase precursor [Gossypium
  misc_feature (45)..(346): Homolog of NCBI NO: 15240140 NR Description: peroxidase, putative [Arabidopsis thaliana]
  misc_feature (45)..(346): Homolog of NCBI NO: 21593262 NR Description: peroxidase [Arabidopsis thaliana]
  misc_feature (48)..(346): Homolog of NCBI NO: 1730490 NR Description: Peroxidase A2
  misc_feature (45)..(346): Homolog of NCBI NO: 15240141 NR Description: peroxidase, putative [Arabidopsis thaliana]
  misc_feature (45)..(346): Homolog of NCBI NO: 21594792 NR Description: peroxidase [Arabidopsis thaliana]
  misc_feature (1)..(350): Homolog of NCBI NO: 1546702 NR Description: peroxidase; peroxidase ATP5a [Arabidopsis
  misc_feature (1)..(350): Homolog of NCBI NO: 30694586 NR Description: peroxidase, putative [Arabidopsis thaliana]
MDHKMSMYLFVSYLAIFTLFFKGFVSSFPSGYNNGYNNGHGHGLTSNLNYRFYDRSCPRLQTIVKSGVWRAFKDDSRIAASLLRLHFHDCFVNGCDGSILLNDSEDFKGEKNAQPNRNSVRGFEVIEDIKSDIESSCPLTVSCADIVALAAREAVVLTGGPFWPVPLGRRDSLTASEQAANTNLPSPFEALENITAKFVTLGLDLKDVVVLSGAHTIGFAQCFVIKHRLFNFKGSGQPDPNLAASSALLSKLKDTCPNVDSSDSKLAALDAASSVKFDNAYYVNLMNNIGLLDSDQTLMTDPTAAALVKSYSENPYLFSRDFAVSMVKMGNIGVMTGSDGVIRGKCGFPG

SEQ ID NO: 30853 - protein, 346 aa, Arabidopsis thaliana
  peptide (1)..(346): Ceres Seq. ID no. 13504697
  misc_feature (60)..(310): Pfam Name: Peroxidase Pfam Description: Peroxidase
  misc_feature (1)..(342): Homolog of NCBI NO: 15219493 NR Description: peroxidase, putative [Arabidopsis thaliana]
  misc_feature (44)..(342): Homolog of NCBI NO: 11513747 NR Description: Chain A, Arabidopsis Thaliana Peroxidase A2
  misc_feature (38)..(342): Homolog of NCBI NO: 5453379 NR Description: bacterial-induced peroxidase precursor [Gossypium
  misc_feature (41)..(342): Homolog of NCBI NO: 15240140 NR Description: peroxidase, putative [Arabidopsis thaliana]
  misc_feature (41)..(342): Homolog of NCBI NO: 21593262 NR Description: peroxidase [Arabidopsis thaliana]
  misc_feature (44)..(342): Homolog of NCBI NO: 1730490 NR Description: Peroxidase A2
  misc_feature (41)..(342): Homolog of NCBI NO: 15240141 NR Description: peroxidase, putative [Arabidopsis thaliana]
  misc_feature (41)..(342): Homolog of NCBI NO: 21594792 NR Description: peroxidase [Arabidopsis thaliana]
  misc_feature (1)..(346): Homolog of NCBI NO: 1546702 NR Description: peroxidase; peroxidase ATP5a [Arabidopsis
  misc_feature (1)..(346): Homolog of NCBI NO: 30694586 NR Description: peroxidase, putative [Arabidopsis thaliana]
MSMYLFVSYLAIFTLFFKGFVSSFPSGYNNGYNNGHGHGLTSNLNYRFYDRSCPRLQTIVKSGVWRAFKDDSRIAASLLRLHFHDCFVNGCDGSILLNDSEDFKGEKNAQPNRNSVRGFEVIEDIKSDIESSCPLTVSCADIVALAAREAVVLTGGPFWPVPLGRRDSLTASEQAANTNLPSPFEALENITAKFVTLGLDLKDVVVLSGAHTIGFAQCFVIKHRLFNFKGSGQPDPNLAASSALLSKLKDTCPNVDSSDSKLAALDAASSVKFDNAYYVNLMNNIGLLDSDQTLMTDPTAAALVKSYSENPYLFSRDFAVSMVKMGNIGVMTGSDGVIRGKCGFPG

SEQ ID NO: 30854 - DNA, 2484 bp, Arabidopsis thaliana
  misc_feature (1)..(2484): Ceres Seq. ID no. 12327297
  misc_feature: MA Experiment ID: 108462 Result: Up-regulated in Transcription
  misc_feature: MA Experiment 108462 PARAMETER Experiment Name: At_Germinating_Seeds_cDNA_P Parameter: Age (day) Value: 2 vs. 0
  misc_feature: MA Experiment 108462 PARAMETER Experiment Name: At_Germinating_Seeds_cDNA_P Parameter: Tissue Value: Germinating Seeds
  misc_feature: MA Experiment ID: 108463 Result: Up-regulated in Transcription
  misc_feature: MA Experiment 108463 PARAMETER Experiment Name: At_Germinating_Seeds_cDNA_P Parameter: Age (day) Value: 3 vs. 0
  misc_feature: MA Experiment 108463 PARAMETER Experiment Name: At_Germinating_Seeds_cDNA_P Parameter: Tissue Value: Germinating Seeds
  misc_feature: MA Experiment ID: 108464 Result: Up-regulated in Transcription
  misc_feature: MA Experiment 108464 PARAMETER Experiment Name: At_Germinating_Seeds_cDNA_P Parameter: Age (day) Value: 4 vs. 0
  misc_feature: MA Experiment 108464 PARAMETER Experiment Name: At_Germinating_Seeds_cDNA_P Parameter: Tissue Value: Germinating Seeds
  misc_feature: MA Experiment ID: 108605 Result: Up-regulated in Transcription
  misc_feature: MA Experiment 108605 PARAMETER Experiment Name: At_100uM_ABA_cDNA_P Parameter: Timepoint (hr) Value: 6
  misc_feature: MA Experiment 108605 PARAMETER Experiment Name: At_100uM_ABA_cDNA_P Parameter: Tissue Value: Aerial
  misc_feature: MA Experiment 108605 PARAMETER Experiment Name: At_100uM_ABA_cDNA_P Parameter: Treatment Value: 100uM ABA vs. No Treatment
  misc_feature: MA Experiment ID: 20000069 Result: Up-regulated in Transcription
  misc_feature: MA Experiment 20000069 PARAMETER Experiment Name: At_100uM_ABA_Mutants_cDNA_P Parameter: Plant Line Value: CS23
  misc_feature: MA Experiment 20000069 PARAMETER Experiment Name: At_100uM_ABA_Mutants_cDNA_P Parameter: Timepoint (hr) Value: 6
  misc_feature: MA Experiment 20000069 PARAMETER Experiment Name: At_100uM_ABA_Mutants_cDNA_P Parameter: Tissue Value: Aerial
  misc_feature: MA Experiment 20000069 PARAMETER Experiment Name: At_100uM_ABA_Mutants_cDNA_P Parameter: Treatment Value: 100uM ABA vs. No Treatment
  misc_feature: MA Experiment ID: 20000070 Result: Up-regulated in Transcription
  misc_feature: MA Experiment 20000070 PARAMETER Experiment Name: At_100uM_ABA_Mutants_cDNA_P Parameter: Plant Line Value: CS24
  misc_feature: MA Experiment 20000070 PARAMETER Experiment Name: At_100uM_ABA_Mutants_cDNA_P Parameter: Timepoint (hr) Value: 6
  misc_feature: MA Experiment 20000070 PARAMETER Experiment Name: At_100uM_ABA_Mutants_cDNA_P Parameter: Tissue Value: Aerial
  misc_feature: MA Experiment 20000070 PARAMETER Experiment Name: At_100uM_ABA_Mutants_cDNA_P Parameter: Treatment Value: 100uM ABA vs. No Treatment
  misc_feature: MA Experiment ID: 20000071 Result: Up-regulated in Transcription
  misc_feature: MA Experiment 20000071 PARAMETER Experiment Name: At_100uM_ABA_Mutants_cDNA_P Parameter: Plant Line Value: CS8104
  misc_feature: MA Experiment 20000071 PARAMETER Experiment Name: At_100uM_ABA_Mutants_cDNA_P Parameter: Timepoint (hr) Value: 6
  misc_feature: MA Experiment 20000071 PARAMETER Experiment Name: At_100uM_ABA_Mutants_cDNA_P Parameter: Tissue Value: Aerial
  misc_feature: MA Experiment 20000071 PARAMETER Experiment Name: At_100uM_ABA_Mutants_cDNA_P Parameter: Treatment Value: 100uM ABA vs. No Treatment
  misc_feature: MA Experiment ID: 20000072 Result: Up-regulated in Transcription
  misc_feature: MA Experiment 20000072 PARAMETER Experiment Name: At_100uM_ABA_Mutants_cDNA_P Parameter: Plant Line Value: CS8105
  misc_feature: MA Experiment 20000072 PARAMETER Experiment Name: At_100uM_ABA_Mutants_cDNA_P Parameter: Timepoint (hr) Value: 6
  misc_feature: MA Experiment 20000072 PARAMETER Experiment Name: At_100uM_ABA_Mutants_cDNA_P Parameter: Tissue Value: Aerial
  misc_feature: MA Experiment 20000072 PARAMETER Experiment Name: At_100uM_ABA_Mutants_cDNA_P Parameter: Treatment Value: 100uM ABA vs. No Treatment
  misc_feature: MA Experiment ID: 20000111 Result: Down-regulated in Transcription
  misc_feature: MA Experiment 20000111 PARAMETER Experiment Name: At_42deg_Heat_cDNA_P Parameter: Temperature (deg C) Value: 42 vs. 22
  misc_feature: MA Experiment 20000111 PARAMETER Experiment Name: At_42deg_Heat_cDNA_P Parameter: Timepoint (hr) Value: 6
  misc_feature: MA Experiment 20000111 PARAMETER Experiment Name: At_42deg_Heat_cDNA_P Parameter: Tissue Value: Aerial
  misc_feature: MA Experiment ID: 20000113 Result: Down-regulated in Transcription
  misc_feature: MA Experiment 20000113 PARAMETER Experiment Name: At_42deg_Heat_cDNA_P Parameter: Temperature (deg C) Value: 42 vs. 22
  misc_feature: MA Experiment 20000113 PARAMETER Experiment Name: At_42deg_Heat_cDNA_P Parameter: Timepoint (hr) Value: 8
  misc_feature: MA Experiment 20000113 PARAMETER Experiment Name: At_42deg_Heat_cDNA_P Parameter: Tissue Value: Aerial
  misc_feature: MA Experiment ID: 20000117 Result: Up-regulated in Transcription
  misc_feature: MA Experiment 20000117 PARAMETER Experiment Name: At_100uM_ABA_Mutants_cDNA_P Parameter: Plant Line Value: Columbia
  misc_feature: MA Experiment 20000117 PARAMETER Experiment Name: At_100uM_ABA_Mutants_cDNA_P Parameter: Timepoint (hr) Value: 6
  misc_feature: MA Experiment 20000117 PARAMETER Experiment Name: At_100uM_ABA_Mutants_cDNA_P Parameter: Tissue Value: Aerial
  misc_feature: MA Experiment 20000117 PARAMETER Experiment Name: At_100uM_ABA_Mutants_cDNA_P Parameter: Treatment Value: 100uM ABA vs. No Treatment
  misc_feature: MA Experiment ID: 20000173 Result: Down-regulated in Transcription
  misc_feature: MA Experiment 20000173 PARAMETER Experiment Name: At_42deg_Heat_P Parameter: Age (day) Value: 14
  misc_feature: MA Experiment 20000173 PARAMETER Experiment Name: At_42deg_Heat_P Parameter: Organism Value: A. thaliana
  misc_feature: MA Experiment 20000173 PARAMETER Experiment Name: At_42deg_Heat_P Parameter: Plant Line Value: WS
  misc_feature: MA Experiment 20000173 PARAMETER Experiment Name: At_42deg_Heat_P Parameter: Temperature (deg C) Value: 42 vs. 22
  misc_feature: MA Experiment 20000173 PARAMETER Experiment Name: At_42deg_Heat_P Parameter: Timepoint (hr) Value: 6
  misc_feature: MA Experiment 20000173 PARAMETER Experiment Name: At_42deg_Heat_P Parameter: Tissue Value: Aerial
  misc_feature: MA Experiment ID: 20000179 Result: Down-regulated in Transcription
  misc_feature: MA Experiment 20000179 PARAMETER Experiment Name: At_Germinating_Seeds_P Parameter: Age (hr) Value: 6 vs. 0
  misc_feature: MA Experiment 20000179 PARAMETER Experiment Name: At_Germinating_Seeds_P Parameter: Tissue Value: Germinating Seeds
  misc_feature: MA Experiment ID: 20000184 Result: Down-regulated in Transcription
  misc_feature: MA Experiment 20000184 PARAMETER Experiment Name: At_Shoots__P Parameter: Age (day) Value: 7
  misc_feature: MA Experiment 20000184 PARAMETER Experiment Name: At_Shoots__P Parameter: Tissue Value: Shoots vs. Whole Plant
  misc_feature: MA Experiment ID: 20000224 Result: Up-regulated in Transcription
  misc_feature: MA Experiment ID: 20000264 Result: Up-regulated in Transcription
  misc_feature: MA Experiment 20000264 PARAMETER Experiment Name: At_Open_Flower_P Parameter: Age (day) Value: 21
  misc_feature: MA Experiment 20000264 PARAMETER Experiment Name: At_Open_Flower_P Parameter: Plant Line Value: WS
  misc_feature: MA Experiment 20000264 PARAMETER Experiment Name: At_Open_Flower_P Parameter: Tissue Value: Open Flower vs. Whole Plant
  misc_feature: MA Experiment ID: 20000436 Result: Up-regulated in Transcription
  misc_feature: MA Experiment 20000436 PARAMETER Experiment Name: At_Drought_P Parameter: Age (day) Value: 7
  misc_feature: MA Experiment 20000436 PARAMETER Experiment Name: At_Drought_P Parameter: Organism Value: A. thaliana
  misc_feature: MA Experiment 20000436 PARAMETER Experiment Name: At_Drought_P Parameter: Plant Line Value: WS
  misc_feature: MA Experiment 20000436 PARAMETER Experiment Name: At_Drought_P Parameter: Timepoint (hr) Value: 12
  misc_feature: MA Experiment 20000436 PARAMETER Experiment Name: At_Drought_P Parameter: Tissue Value: Whole Plant
  misc_feature: MA Experiment 20000436 PARAMETER Experiment Name: At_Drought_P Parameter: Treatment Value: Drought vs. No Drought
  misc_feature: MA Experiment ID: 20000794 Result: Up-regulated in Transcription
  misc_feature: MA Experiment 20000794 PARAMETER Experiment Name: At_Petals_P Parameter: Age (day) Value: 23-25 days
  misc_feature: MA Experiment 20000794 PARAMETER Experiment Name: At_Petals_P Parameter: Plant Line Value: WS
  misc_feature: MA Experiment 20000794 PARAMETER Experiment Name: At_Petals_P Parameter: Tissue Value: Petals vs. Whole plant
  misc_feature: MA Experiment ID: 20001451 Result: Up-regulated in Transcription
  misc_feature: MA Experiment 20001451 PARAMETER Experiment Name: At_Far-red-induction_P Parameter: Age (day) Value: 7
  misc_feature: MA Experiment 20001451 PARAMETER Experiment Name: At_Far-red-induction_P Parameter: Light Value: Far-red vs. White
  misc_feature: MA Experiment 20001451 PARAMETER Experiment Name: At_Far-red-induction_P Parameter: Organism Value: A. thaliana
  misc_feature: MA Experiment 20001451 PARAMETER Experiment Name: At_Far-red-induction_P Parameter: Plant Line Value: Columbia
  misc_feature: MA Experiment 20001451 PARAMETER Experiment Name: At_Far-red-induction_P Parameter: Timepoint (hr) Value: 24
  misc_feature: MA Experiment 20001451 PARAMETER Experiment Name: At_Far-red-induction_P Parameter: Tissue Value: Whole Plant
gtctgattcttcaataagctcacggatttctcctcaaaatcctaatccaatcatttctccaattctccaaggagtttggtaatacacaaataacatggaagacgttagaagaagaaacagaggacatcctctgctcagatccaagaagagaggagaaggctacaaccatggcttctcaccgtctcagattcaatctcttgccgtcatctgtcaaactttcctccctccggagaccacgtcggaacagcaagctgttaattccttccacgtagcctcctctactcaaccaccattcactgatgaggtggcggagatgatagtgaaaaacggacgatcagaagcagtcaaagttttgagaatcatattgatgattttgtcattcagatttggaactttgttgctttgtgggtctctctgtcttgataagagttggccttttgttcttaaattctctcaacttccattggataaaagagaagcgatcttgagaaattggtctagacaaagtggattccttcttccatttcgtatcactttcttccttgcaaaattctacaccctcttctacttcttctcccagacggatgagaatctgaagaatcctgcactggaagctatagggtattgcatcgatgggacagagagaagtagcaacaagaagagtgaagcagatgagaagcgacgacctctagagaaagggatcattgaaactatgcatgagagtgacgtaaccatcacacaatctctaactgaaaaaggtgttcatgttgctagagacgatggtgacaatgtgtacaggatcagatgcgatgcggttgttgtaggctcaggaagtggaggaggtgttgcagctgcaaacctagctaaagctggattgaaagtcttggttctagagaaaggaaactactttacagctcatgactattcgggtctagaagttccgtctatgctcgagttatacgaaaaaggcggccttttgactacggttgatgggaaatttatgctcttggctggttcagctgttggaggaggtacagctgttaattggtctgcatctataaggacaccggatcatgttttgcaggaatggtctgaagggagtaagatcaagttttttggtagccaagaatatcagtctgcaatggatgaagttacgataaggattggtgtcacggaaagatgtgtcaaacacgggtttcagaatcaggttctgcggaaagggtgcgagagactcggtttgcaggtagaatcagttccaaggaactcaccagaggatcattactgtggcttgtgcgggtatggatgtagagcaggagccaagaacgggacagatcaaacctggttggttgatgctgtagagaatggtgcagtgatcctgacagggatcaaagctgagagatttgtattagtagacaacactagtagtagcaatgagagaaagaaacgatgtgtgggagtgtttgctagctctgttggaggaaagattgggaagaagtttattatcgaagctcgagtaacggtttcatccgctggatcgctgttaacaccgcctctgatgctttcgagtgggctaaagaacccgaacattggaaggaacttaaagctgcacccggttctgatgacatggggatacttcccggagaaagattctgagttctccgggaaaatgtatgagggagggatcatcacgtccgtccatcatatgaatgatactgaatctggatgcaaagcaatactggagaatccactgataggaccagcttcttacgcagggttgagcccgtgggtttcaggaccagaccttaaagagaggatgattaagtacggaagaacagctcatctttttgctctggttcgggacttagggtcaggtgaggttatgatggaaaacgaagttacatacaggacaaccaagaaagatagagagaatctgagggcaggtcttagacaagctttgcgggtttcggttgcagctggtgcagttgaagtcggaacatataggagtgatggacagaagatgaagtgtgaggcaattactaaagaagccatggaagagtttctagacgaagttgatgctgttggtggggttggcacaaaaggagagtattggacgacgtacttctcggctcaccagatgggtagttgtaggatgggagtcaccgcggaggaaggtgcgttggatgagaatggtgagagctgggaagcagaggggttgtttgtttgtgatggaagtatattgccatcagctgttggggttaacccaatgatcaccattcagtctactgcttactgcatctcctcaaagatagttgactcgctgcaaaacaaaacaaaagtatagagaagtaaaaaaagaaagaactgaaaccatcccattagtattcatatcgaataaatatgtttttccttgcaagacaaattttgtttaagaatcatggaataacttatcttgacgacaacaaagatgtaaacaaatgatatatc

SEQ ID NO: 30855 - protein, 748 aa, Arabidopsis thaliana
  peptide (1)..(748): Ceres Seq. ID no. 12327298
  misc_feature (239)..(514): Pfam Name: GMC oxidoreductase Pfam Description: GMC oxidoreductase
  misc_feature (162)..(745): Homolog of NCBI NO: 15234998 NR Description: putative protein; protein id: At4g19380.1
  misc_feature (164)..(744): Homolog of NCBI NO: 37535330 NR Description: putative alcohol oxidase [Oryza sativa (japonica
  misc_feature (161)..(742): Homolog of NCBI NO: 37535334 NR Description: putative oxidase [Oryza sativa (japonica
  misc_feature (162)..(742): Homolog of NCBI NO: 16905151 NR Description: putative alcohol oxidase [Oryza sativa]
  misc_feature (193)..(747): Homolog of NCBI NO: 15219612 NR Description: unknown protein; protein id: At1g03990.1
  misc_feature (9)..(143): Homolog of NCBI NO: 37535318 NR Description: putative alcohol oxidase [Oryza sativa (japonica
  misc_feature (164)..(745): Homolog of NCBI NO: 37535318 NR Description: putative alcohol oxidase [Oryza sativa (japonica
  misc_feature (5)..(747): Homolog of NCBI NO: 25367436 NR Description: hypothetical protein [imported] - Arabidopsis
  misc_feature (73)..(742): Homolog of NCBI NO: 22798796 NR Description: alcohol oxidase [Arabidopsis thaliana]
  misc_feature (30)..(742): Homolog of NCBI NO: 18403753 NR Description: expressed protein
MEDVRRRNRGHPLLRSKKRGEGYNHGFSPSQIQSLAVICQTFLPPETTSEQQAVNSFHVASSTQPPFTDEVAEMIVKNGRSEAVKVLRIILMILSFRFGTLLLCGSLCLDKSWPFVLKFSQLPLDKREAILRNWSRQSGFLLPFRITFFLAKFYTLFYFFSQTDENLKNPALEAIGYCIDGTERSSNKKSEADEKRRPLEKGIIETMHESDVTITQSLTEKGVHVARDDGDNVYRIRCDAVVVGSGSGGGVAAANLAKAGLKVLVLEKGNYFTAHDYSGLEVPSMLELYEKGGLLTTVDGKFMLLAGSAVGGGTAVNWSASIRTPDHVLQEWSEGSKIKFFGSQEYQSAMDEVTIRIGVTERCVKHGFQNQVLRKGCERLGLQVESVPRNSPEDHYCGLCGYGCRAGAKNGTDQTWLVDAVENGAVILTGIKAERFVLVDNTSSSNERKKRCVGVFASSVGGKIGKKFIIEARVTVSSAGSLLTPPLMLSSGLKNPNIGRNLKLHPVLMTWGYFPEKDSEFSGKMYEGGIITSVHHMNDTESGCKAILENPLIGPASYAGLSPWVSGPDLKERMIKYGRTAHLFALVRDLGSGEVMMENEVTYRTTKKDRENLRAGLRQALRVSVAAGAVEVGTYRSDGQKMKCEAITKEAMEEFLDEVDAVGGVGTKGEYWTTYFSAHQMGSCRMGVTAEEGALDENGESWEAEGLFVCDGSILPSAVGVNPMITIQSTAYCISSKIVDSLQNKTKV

SEQ ID NO: 30856 - protein, 675 aa, Arabidopsis thaliana
  peptide (1)..(675): Ceres Seq. ID no. 12327299
  misc_feature (166)..(441): Pfam Name: GMC oxidoreductase Pfam Description: GMC oxidoreductase
  misc_feature (89)..(672): Homolog of NCBI NO: 15234998 NR Description: putative protein; protein id: At4g19380.1
  misc_feature (91)..(671): Homolog of NCBI NO: 37535330 NR Description: putative alcohol oxidase [Oryza sativa (japonica
  misc_feature (88)..(669): Homolog of NCBI NO: 37535334 NR Description: putative oxidase [Oryza sativa (japonica
  misc_feature (89)..(669): Homolog of NCBI NO: 16905151 NR Description: putative alcohol oxidase [Oryza sativa]
  misc_feature (120)..(674): Homolog of NCBI NO: 15219612 NR Description: unknown protein; protein id: At1g03990.1
  misc_feature (1)..(70): Homolog of NCBI NO: 37535318 NR Description: putative alcohol oxidase [Oryza sativa (japonica
  misc_feature (91)..(672): Homolog of NCBI NO: 37535318 NR Description: putative alcohol oxidase [Oryza sativa (japonica
  misc_feature (1)..(674): Homolog of NCBI NO: 25367436 NR Description: hypothetical protein [imported] - Arabidopsis
  misc_feature (1)..(669): Homolog of NCBI NO: 22798796 NR Description: alcohol oxidase [Arabidopsis thaliana]
  misc_feature (1)..(669): Homolog of NCBI NO: 18403753 NR Description: expressed protein
MIVKNGRSEAVKVLRIILMILSFRFGTLLLCGSLCLDKSWPFVLKFSQLPLDKREAILRNWSRQSGFLLPFRITFFLAKFYTLFYFFSQTDENLKNPALEAIGYCIDGTERSSNKKSEADEKRRPLEKGIIETMHESDVTITQSLTEKGVHVARDDGDNVYRIRCDAVVVGSGSGGGVAAANLAKAGLKVLVLEKGNYFTAHDYSGLEVPSMLELYEKGGLLTTVDGKFMLLAGSAVGGGTAVNWSASIRTPDHVLQEWSEGSKIKFFGSQEYQSAMDEVTIRIGVTERCVKHGFQNQVLRKGCERLGLQVESVPRNSPEDHYCGLCGYGCRAGAKNGTDQTWLVDAVENGAVILTGIKAERFVLVDNTSSSNERKKRCVGVFASSVGGKIGKKFIIEARVTVSSAGSLLTPPLMLSSGLKNPNIGRNLKLHPVLMTWGYFPEKDSEFSGKMYEGGIITSVHHMNDTESGCKAILENPLIGPASYAGLSPWVSGPDLKERMIKYGRTAHLFALVRDLGSGEVMMENEVTYRTTKKDRENLRAGLRQALRVSVAAGAVEVGTYRSDGQKMKCEAITKEAMEEFLDEVDAVGGVGTKGEYWTTYFSAHQMGSCRMGVTAEEGALDENGESWEAEGLFVCDGSILPSAVGVNPMITIQSTAYCISSKIVDSLQNKTKV

SEQ ID NO: 30857 - protein, 657 aa, Arabidopsis thaliana
  peptide (1)..(657): Ceres Seq. ID no. 12327300
  misc_feature (148)..(423): Pfam Name: GMC oxidoreductase Pfam Description: GMC oxidoreductase
  misc_feature (71)..(654): Homolog of NCBI NO: 15234998 NR Description: putative protein; protein id: At4g19380.1
  misc_feature (73)..(653): Homolog of NCBI NO: 37535330 NR Description: putative alcohol oxidase [Oryza sativa (japonica
  misc_feature (70)..(651): Homolog of NCBI NO: 37535334 NR Description: putative oxidase [Oryza sativa (japonica
  misc_feature (71)..(651): Homolog of NCBI NO: 16905151 NR Description: putative alcohol oxidase [Oryza sativa]
  misc_feature (102)..(656): Homolog of NCBI NO: 15219612 NR Description: unknown protein; protein id: At1g03990.1
  misc_feature (1)..(52): Homolog of NCBI NO: 37535318 NR Description: putative alcohol oxidase [Oryza sativa (japonica
  misc_feature (73)..(654): Homolog of NCBI NO: 37535318 NR Description: putative alcohol oxidase [Oryza sativa (japonica
  misc_feature (1)..(656): Homolog of NCBI NO: 25367436 NR Description: hypothetical protein [imported] - Arabidopsis
  misc_feature (1)..(651): Homolog of NCBI NO: 22798796 NR Description: alcohol oxidase [Arabidopsis thaliana]
  misc_feature (1)..(651): Homolog of NCBI NO: 18403753 NR Description: expressed protein
MILSFRFGTLLLCGSLCLDKSWPFVLKFSQLPLDKREAILRNWSRQSGFLLPFRITFFLAKFYTLFYFFSQTDENLKNPALEAIGYCIDGTERSSNKKSEADEKRRPLEKGIIETMHESDVTITQSLTEKGVHVARDDGDNVYRIRCDAVVVGSGSGGGVAAANLAKAGLKVLVLEKGNYFTAHDYSGLEVPSMLELYEKGGLLTTVDGKFMLLAGSAVGGGTAVNWSASIRTPDHVLQEWSEGSKIKFFGSQEYQSAMDEVTIRIGVTERCVKHGFQNQVLRKGCERLGLQVESVPRNSPEDHYCGLCGYGCRAGAKNGTDQTWLVDAVENGAVILTGIKAERFVLVDNTSSSNERKKRCVGVFASSVGGKIGKKFIIEARVTVSSAGSLLTPPLMLSSGLKNPNIGRNLKLHPVLMTWGYFPEKDSEFSGKMYEGGIITSVHHMNDTESGCKAILENPLIGPASYAGLSPWVSGPDLKERMIKYGRTAHLFALVRDLGSGEVMMENEVTYRTTKKDRENLRAGLRQALRVSVAAGAVEVGTYRSDGQKMKCEAITKEAMEEFLDEVDAVGGVGTKGEYWTTYFSAHQMGSCRMGVTAEEGALDENGESWEAEGLFVCDGSILPSAVGVNPMITIQSTAYCISSKIVDSLQNKTKV

SEQ ID NO: 30858 - DNA, 841 bp, Arabidopsis thaliana
  misc_feature (1)..(841): Ceres Seq. ID no. 13591613
  misc_feature: MA Experiment ID: 108435 Result: Up-regulated in Transcription
  misc_feature: MA Experiment 108435 PARAMETER Experiment Name: At_stm_Mutants_cDNA_P Parameter: Plant Line Value: wt Landsburg vs stm
  misc_feature: MA Experiment 108435 PARAMETER Experiment Name: At_stm_Mutants_cDNA_P Parameter: Tissue Value: Shoot Apical Meristem Region
  misc_feature: MA Experiment ID: 108461 Result: Down-regulated in Transcription
  misc_feature: MA Experiment 108461 PARAMETER Experiment Name: At_Germinating_Seeds_cDNA_P Parameter: Age (day) Value: 1 vs. 0
  misc_feature: MA Experiment 108461 PARAMETER Experiment Name: At_Germinating_Seeds_cDNA_P Parameter: Tissue Value: Germinating Seeds
  misc_feature: MA Experiment ID: 108462 Result: Down-regulated in Transcription
  misc_feature: MA Experiment 108462 PARAMETER Experiment Name: At_Germinating_Seeds_cDNA_P Parameter: Age (day) Value: 2 vs. 0
  misc_feature: MA Experiment 108462 PARAMETER Experiment Name: At_Germinating_Seeds_cDNA_P Parameter: Tissue Value: Germinating Seeds
  misc_feature: MA Experiment ID: 108463 Result: Down-regulated in Transcription
  misc_feature: MA Experiment 108463 PARAMETER Experiment Name: At_Germinating_Seeds_cDNA_P Parameter: Age (day) Value: 3 vs. 0
  misc_feature: MA Experiment 108463 PARAMETER Experiment Name: At_Germinating_Seeds_cDNA_P Parameter: Tissue Value: Germinating Seeds
  misc_feature: MA Experiment ID: 108464 Result: Down-regulated in Transcription
  misc_feature: MA Experiment 108464 PARAMETER Experiment Name: At_Germinating_Seeds_cDNA_P Parameter: Age (day) Value: 4 vs. 0
  misc_feature: MA Experiment 108464 PARAMETER Experiment Name: At_Germinating_Seeds_cDNA_P Parameter: Tissue Value: Germinating Seeds
  misc_feature: MA Experiment ID: 108489 Result: Down-regulated in Transcription
  misc_feature: MA Experiment ID: 108595 Result: Up-regulated in Transcription
  misc_feature: MA Experiment 108595 PARAMETER Experiment Name: At_Ler-pi_Ovule_cDNA_P Parameter: Plant Line Value: null
  misc_feature: MA Experiment ID: 20000069 Result: Down-regulated in Transcription
  misc_feature: MA Experiment 20000069 PARAMETER Experiment Name: At_100uM_ABA_Mutants_cDNA_P Parameter: Plant Line Value: CS23
  misc_feature: MA Experiment 20000069 PARAMETER Experiment Name: At_100uM_ABA_Mutants_cDNA_P Parameter: Timepoint (hr) Value: 6
  misc_feature: MA Experiment 20000069 PARAMETER Experiment Name: At_100uM_ABA_Mutants_cDNA_P Parameter: Tissue Value: Aerial
  misc_feature: MA Experiment 20000069 PARAMETER Experiment Name: At_100uM_ABA_Mutants_cDNA_P Parameter: Treatment Value: 100uM ABA vs. No Treatment
  misc_feature: MA Experiment ID: 20000179 Result: Down-regulated in Transcription
  misc_feature: MA Experiment 20000179 PARAMETER Experiment Name: At_Germinating_Seeds_P Parameter: Age (hr) Value: 6 vs. 0
  misc_feature: MA Experiment 20000179 PARAMETER Experiment Name: At_Germinating_Seeds_P Parameter: Tissue Value: Germinating Seeds
  misc_feature: MA Experiment ID: 20000180 Result: Down-regulated in Transcription
  misc_feature: MA Experiment 20000180 PARAMETER Experiment Name: At_Germinating_Seeds_P Parameter: Age (hr) Value: 24 vs. 0
  misc_feature: MA Experiment 20000180 PARAMETER Experiment Name: At_Germinating_Seeds_P Parameter: Tissue Value: Germinating Seeds
  misc_feature: MA Experiment ID: 20000235 Result: Up-regulated in Transcription
  misc_feature: MA Experiment 20000235 PARAMETER Experiment Name: At_Siliques_P Parameter: Age (day) Value: 21
  misc_feature: MA Experiment 20000235 PARAMETER Experiment Name: At_Siliques_P Parameter: Organism Value: A. thaliana
  misc_feature: MA Experiment 20000235 PARAMETER Experiment Name: At_Siliques_P Parameter: Plant Line Value: WS
  misc_feature: MA Experiment 20000235 PARAMETER Experiment Name: At_Siliques_P Parameter: Tissue Value: 5-10mm Siliques vs. Whole Plant
  misc_feature: MA Experiment ID: 20000264 Result: Up-regulated in Transcription
  misc_feature: MA Experiment 20000264 PARAMETER Experiment Name: At_Open_Flower_P Parameter: Age (day) Value: 21
  misc_feature: MA Experiment 20000264 PARAMETER Experiment Name: At_Open_Flower_P Parameter: Plant Line Value: WS
  misc_feature: MA Experiment 20000264 PARAMETER Experiment Name: At_Open_Flower_P Parameter: Tissue Value: Open Flower vs. Whole Plant
  misc_feature: MA Experiment ID: 20000265 Result: Up-regulated in Transcription
  misc_feature: MA Experiment 20000265 PARAMETER Experiment Name: At_Open_Flower_P Parameter: Age (day) Value: 21
  misc_feature: MA Experiment 20000265 PARAMETER Experiment Name: At_Open_Flower_P Parameter: Plant Line Value: WS
  misc_feature: MA Experiment 20000265 PARAMETER Experiment Name: At_Open_Flower_P Parameter: Tissue Value: Closed Flower vs. Whole Plant
  misc_feature: MA Experiment ID: 20000286 Result: Up-regulated in Transcription
  misc_feature: MA Experiment 20000286 PARAMETER Experiment Name: At_Open_Flower_P Parameter: Age (day) Value: 21
  misc_feature: MA Experiment 20000286 PARAMETER Experiment Name: At_Open_Flower_P Parameter: Plant Line Value: WS
  misc_feature: MA Experiment 20000286 PARAMETER Experiment Name: At_Open_Flower_P Parameter: Tissue Value: Half Open vs. Whole Plant
  misc_feature: MA Experiment ID: 20000439 Result: Down-regulated in Transcription
  misc_feature: MA Experiment 20000439 PARAMETER Experiment Name: At_Roots__P Parameter: Age (day) Value: 14 vs. 21
  misc_feature: MA Experiment 20000439 PARAMETER Experiment Name: At_Roots__P Parameter: Organism Value: A. thaliana
  misc_feature: MA Experiment 20000439 PARAMETER Experiment Name: At_Roots__P Parameter: Tissue Value: Roots vs. Whole Plant
  misc_feature: MA Experiment ID: 20000573 Result: Up-regulated in Transcription
  misc_feature: MA Experiment 20000573 PARAMETER Experiment Name: At_100uM_ABA_Mutants__P Parameter: Organism Value: A. thaliana
  misc_feature: MA Experiment 20000573 PARAMETER Experiment Name: At_100uM_ABA_Mutants__P Parameter: Plant Line Value: CS22 vs. Ler wt
  misc_feature: MA Experiment 20000573 PARAMETER Experiment Name: At_100uM_ABA_Mutants__P Parameter: Timepoint (hr) Value: N/A
  misc_feature: MA Experiment 20000573 PARAMETER Experiment Name: At_100uM_ABA_Mutants__P Parameter: Tissue Value: Whole Plant
  misc_feature: MA Experiment 20000573 PARAMETER Experiment Name: At_100uM_ABA_Mutants__P Parameter: Treatment Value: None
  misc_feature: MA Experiment ID: 20000794 Result: Up-regulated in Transcription
  misc_feature: MA Experiment 20000794 PARAMETER Experiment Name: At_Petals_P Parameter: Age (day) Value: 23-25 days
  misc_feature: MA Experiment 20000794 PARAMETER Experiment Name: At_Petals_P Parameter: Plant Line Value: WS
  misc_feature: MA Experiment 20000794 PARAMETER Experiment Name: At_Petals_P Parameter: Tissue Value: Petals vs. Whole plant
  misc_feature: MA Experiment ID: 20001248 Result: Down-regulated in Transcription
  misc_feature: MA Experiment 20001248 PARAMETER Experiment Name: At_Far-red-induction_P Parameter: Age (day) Value: 7
  misc_feature: MA Experiment 20001248 PARAMETER Experiment Name: At_Far-red-induction_P Parameter: Light Value: Far-red vs. White
  misc_feature: MA Experiment 20001248 PARAMETER Experiment Name: At_Far-red-induction_P Parameter: Organism Value: A. thaliana
  misc_feature: MA Experiment 20001248 PARAMETER Experiment Name: At_Far-red-induction_P Parameter: Plant Line Value: Columbia
  misc_feature: MA Experiment 20001248 PARAMETER Experiment Name: At_Far-red-induction_P Parameter: Timepoint (hr) Value: 4
  misc_feature: MA Experiment 20001248 PARAMETER Experiment Name: At_Far-red-induction_P Parameter: Tissue Value: Whole Plant
  misc_feature: MA Experiment ID: 20001457 Result: Down-regulated in Transcription
  misc_feature: MA Experiment 20001457 PARAMETER Experiment Name: At_50mM_NH4NO3_L-to-H_P Parameter: Age (day) Value: Undefined
  misc_feature: MA Experiment 20001457 PARAMETER Experiment Name: At_50mM_NH4NO3_L-to-H_P Parameter: Organism Value: Undefined
  misc_feature: MA Experiment 20001457 PARAMETER Experiment Name: At_50mM_NH4NO3_L-to-H_P Parameter: Plant Line Value: Undefined
  misc_feature: MA Experiment 20001457 PARAMETER Experiment Name: At_50mM_NH4NO3_L-to-H_P Parameter: Timepoint (hr) Value: 0.5
  misc_feature: MA Experiment 20001457 PARAMETER Experiment Name: At_50mM_NH4NO3_L-to-H_P Parameter: Tissue Value: Siliques
  misc_feature: MA Experiment 20001457 PARAMETER Experiment Name: At_50mM_NH4NO3_L-to-H_P Parameter: Treatment Value: 50mM NH4NO3 vs. 100mM Manitol
  misc_feature: MA Experiment ID: 20001759 Result: Down-regulated in Transcription
  misc_feature: MA Experiment 20001759 PARAMETER Experiment Name: At_50mM_NH4NO3_L-to-H_P Parameter: Timepoint (hr) Value: 1
  misc_feature: MA Experiment 20001759 PARAMETER Experiment Name: At_50mM_NH4NO3_L-to-H_P Parameter: Tissue Value: Siliques
  misc_feature: MA Experiment 20001759 PARAMETER Experiment Name: At_50mM_NH4NO3_L-to-H_P Parameter: Treatment Value: 50mM NH4NO3 vs 100mM Mannitol
  misc_feature: MA Experiment ID: 20001906 Result: Up-regulated in Transcription
  misc_feature: MA Experiment 20001906 PARAMETER Experiment Name: At_Drought_Reproduction_P Parameter: Age (day) Value: 35
  misc_feature: MA Experiment 20001906 PARAMETER Experiment Name: At_Drought_Reproduction_P Parameter: Organism Value: A. thaliana
  misc_feature: MA Experiment 20001906 PARAMETER Experiment Name: At_Drought_Reproduction_P Parameter: Plant Line Value: WS
  misc_feature: MA Experiment 20001906 PARAMETER Experiment Name: At_Drought_Reproduction_P Parameter: Timepoint (day) Value: 5
  misc_feature: MA Experiment 20001906 PARAMETER Experiment Name: At_Drought_Reproduction_P Parameter: Tissue Value: Siliques
  misc_feature: MA Experiment 20001906 PARAMETER Experiment Name: At_Drought_Reproduction_P Parameter: Treatment Value: Drought vs. No Drought
  misc_feature: MA Experiment ID: 20001907 Result: Up-regulated in Transcription
  misc_feature: MA Experiment 20001907 PARAMETER Experiment Name: At_Drought_Reproduction_P Parameter: Age (day) Value: 37
  misc_feature: MA Experiment 20001907 PARAMETER Experiment Name: At_Drought_Reproduction_P Parameter: Organism Value: A. thaliana
  misc_feature: MA Experiment 20001907 PARAMETER Experiment Name: At_Drought_Reproduction_P Parameter: Plant Line Value: WS
  misc_feature: MA Experiment 20001907 PARAMETER Experiment Name: At_Drought_Reproduction_P Parameter: Timepoint (day) Value: 7
  misc_feature: MA Experiment 20001907 PARAMETER Experiment Name: At_Drought_Reproduction_P Parameter: Tissue Value: Siliques
  misc_feature: MA Experiment 20001907 PARAMETER Experiment Name: At_Drought_Reproduction_P Parameter: Treatment Value: Drought vs. No Drought
  misc_feature: MA Experiment ID: 20001908 Result: Up-regulated in Transcription
  misc_feature: MA Experiment 20001908 PARAMETER Experiment Name: At_Drought_Reproduction_P Parameter: Age (day) Value: 40
  misc_feature: MA Experiment 20001908 PARAMETER Experiment Name: At_Drought_Reproduction_P Parameter: Organism Value: A. thaliana
  misc_feature: MA Experiment 20001908 PARAMETER Experiment Name: At_Drought_Reproduction_P Parameter: Plant Line Value: WS
  misc_feature: MA Experiment 20001908 PARAMETER Experiment Name: At_Drought_Reproduction_P Parameter: Timepoint (day) Value: 10
  misc_feature: MA Experiment 20001908 PARAMETER Experiment Name: At_Drought_Reproduction_P Parameter: Tissue Value: Siliques
  misc_feature: MA Experiment 20001908 PARAMETER Experiment Name: At_Drought_Reproduction_P Parameter: Treatment Value: Drought vs. No Drought
  misc_feature: MA Experiment ID: 20001911 Result: Up-regulated in Transcription
  misc_feature: MA Experiment 20001911 PARAMETER Experiment Name: At_Drought_Reproduction_P Parameter: Age (day) Value: 40
  misc_feature: MA Experiment 20001911 PARAMETER Experiment Name: At_Drought_Reproduction_P Parameter: Organism Value: A. thaliana
  misc_feature: MA Experiment 20001911 PARAMETER Experiment Name: At_Drought_Reproduction_P Parameter: Plant Line Value: WS
  misc_feature: MA Experiment 20001911 PARAMETER Experiment Name: At_Drought_Reproduction_P Parameter: Timepoint (day) Value: 10
  misc_feature: MA Experiment 20001911 PARAMETER Experiment Name: At_Drought_Reproduction_P Parameter: Tissue Value: Flowers
  misc_feature: MA Experiment 20001911 PARAMETER Experiment Name: At_Drought_Reproduction_P Parameter: Treatment Value: Drought vs. No Drought
  misc_feature: Phenotype: ROSETTE LEAVES Wax-Glossy
  misc_feature: Phenotype: WHOLE PLANT Color-Dark Green
  misc_feature: Phenotype: WHOLE PLANT Size-Small
  misc_feature: Phenotype: WHOLE PLANT Size-Small
  misc_feature: Phenotype: WHOLE PLANT Size-Small
  misc_feature: Phenotype: WHOLE PLANT Size-Small
cgtagacttatctctatataccccctttaatttgtttgctcttagcctttactttatagttttatatcatatcaatcgacatggcgaatgtggatcgtgatcggcgtgtgcatgtagaccgtactgacaaacgtgttcatcagccaaactacgaagatgatgtcggttttggtggctatggcggttatggtgctggttctgattataagagtcgcggcccctccactaaccaaatcttggcacttatagcaggagttcccattggtggcacactgctaaccctagctggactcactctagccggttcggtgatcggcttgctagtctccatacccctcttcctcctcttcagtccggtgatagtcccggcggctctcactattgggcttgctgtgacgggaatcttggcttctggtttgtttgggttgacgggtctgagctcggtctcgtgggtcctcaactacctccgtgggacgagtgatacagtgccagagcaattggactacgctaaacggcgtatggctgatgcggtaggctatgctggtatgaagggaaaagagatgggtcagtatgtgcaagataaggctcatgaggctcgtgagactgagttcatgactgagacccatgagccgggtaaggccaggagaggctcataagctaatataaattgcgggagtcagttggaaacgcgataaatgtagttttacttttatgtcccagtttctttcctcttttaagaatatctttgtctatatatgtgttcgttcgttttgtcttgtccaaataaaaatccttgttagtgaaataagaaatgaaataaatatgttttcttttttgagat

SEQ ID NO: 30859 - protein, 191 aa, Arabidopsis thaliana
  peptide (1)..(191): Ceres Seq. ID no. 13591614
  misc_feature (48)..(165): Pfam Name: Oleosin Pfam Description: Oleosin
  misc_feature (37)..(188): Homolog of NCBI NO: 82051 NR Description: lipid body-associated membrane protein - carrot
  misc_feature (19)..(131): Homolog of NCBI NO: 99796 NR Description: major oleosin chain nap-I - rape (fragment)
  misc_feature (32)..(175): Homolog of NCBI NO: 29243355 NR Description: oleosin [Corylus avellana]
  misc_feature (1)..(173): Homolog of NCBI NO: 266690 NR Description: Oleosin 18.2 kDa
  misc_feature (42)..(176): Homolog of NCBI NO: 15232141 NR Description: oleosin [Arabidopsis thaliana]
  misc_feature (12)..(183): Homolog of NCBI NO: 2129658 NR Description: oleosin, 21K - Arabidopsis thaliana
  misc_feature (12)..(183): Homolog of NCBI NO: 15242686 NR Description: oleosin [Arabidopsis thaliana]
  misc_feature (1)..(191): Homolog of NCBI NO: 21554017 NR Description: oleosin isoform [Arabidopsis thaliana]
  misc_feature (1)..(190): Homolog of NCBI NO: 1592686 NR Description: oleosin type4 [Arabidopsis thaliana]
  misc_feature (1)..(191): Homolog of NCBI NO: 15232227 NR Description: oleosin [Arabidopsis thaliana]
MANVDRDRRVHVDRTDKRVHQPNYEDDVGFGGYGGYGAGSDYKSRGPSTNQILALIAGVPIGGTLLTLAGLTLAGSVIGLLVSIPLFLLFSPVIVPAALTIGLAVTGILASGLFGLTGLSSVSWVLNYLRGTSDTVPEQLDYAKRRMADAVGYAGMKGKEMGQYVQDKAHEARETEFMTETHEPGKARRGS

SEQ ID NO: 30860 - DNA, 665 bp, Arabidopsis thaliana
  misc_feature (1)..(665): Ceres Seq. ID no. 12323110
  misc_feature: MA Experiment ID: 108434 Result: Up-regulated in Transcription
  misc_feature: MA Experiment 108434 PARAMETER Experiment Name: At_Root_Tips_cDNA_P Parameter: Tissue Value: Root Tips
  misc_feature: MA Experiment ID: 108435 Result: Up-regulated in Transcription
  misc_feature: MA Experiment 108435 PARAMETER Experiment Name: At_stm_Mutants_cDNA_P Parameter: Plant Line Value: wt Landsburg vs stm
  misc_feature: MA Experiment 108435 PARAMETER Experiment Name: At_stm_Mutants_cDNA_P Parameter: Tissue Value: Shoot Apical Meristem Region
  misc_feature: MA Experiment ID: 108462 Result: Down-regulated in Transcription
  misc_feature: MA Experiment 108462 PARAMETER Experiment Name: At_Germinating_Seeds_cDNA_P Parameter: Age (day) Value: 2 vs. 0
  misc_feature: MA Experiment 108462 PARAMETER Experiment Name: At_Germinating_Seeds_cDNA_P Parameter: Tissue Value: Germinating Seeds
  misc_feature: MA Experiment ID: 108463 Result: Down-regulated in Transcription
  misc_feature: MA Experiment 108463 PARAMETER Experiment Name: At_Germinating_Seeds_cDNA_P Parameter: Age (day) Value: 3 vs. 0
  misc_feature: MA Experiment 108463 PARAMETER Experiment Name: At_Germinating_Seeds_cDNA_P Parameter: Tissue Value: Germinating Seeds
  misc_feature: MA Experiment ID: 108488 Result: Up-regulated in Transcription
  misc_feature: MA Experiment ID: 108573 Result: Down-regulated in Transcription
  misc_feature: MA Experiment 108573 PARAMETER Experiment Name: At_Drought_cDNA_P Parameter: Timepoint (hr) Value: 6
  misc_feature: MA Experiment 108573 PARAMETER Experiment Name: At_Drought_cDNA_P Parameter: Tissue Value: Aerial
  misc_feature: MA Experiment 108573 PARAMETER Experiment Name: At_Drought_cDNA_P Parameter: Treatment Value: Drought vs. No Drought
  misc_feature: MA Experiment ID: 20000227 Result: Up-regulated in Transcription
  misc_feature: MA Experiment 20000227 PARAMETER Experiment Name: At_Root-Tips-vs-Tops_P Parameter: Tissue Value: Root Tips vs. Root Tops
  misc_feature: MA Experiment ID: 20000234 Result: Up-regulated in Transcription
  misc_feature: MA Experiment 20000234 PARAMETER Experiment Name: At_Siliques_P Parameter: Age (day) Value: 21
  misc_feature: MA Experiment 20000234 PARAMETER Experiment Name: At_Siliques_P Parameter: Organism Value: A. thaliana
  misc_feature: MA Experiment 20000234 PARAMETER Experiment Name: At_Siliques_P Parameter: Plant Line Value: WS
  misc_feature: MA Experiment 20000234 PARAMETER Experiment Name: At_Siliques_P Parameter: Tissue Value: Less Than 5mm Siliques vs. Whole Plant
  misc_feature: MA Experiment ID: 20000437 Result: Down-regulated in Transcription
  misc_feature: MA Experiment 20000437 PARAMETER Experiment Name: At_Drought_P Parameter: Age (day) Value: 8
  misc_feature: MA Experiment 20000437 PARAMETER Experiment Name: At_Drought_P Parameter: Organism Value: A. thaliana
  misc_feature: MA Experiment 20000437 PARAMETER Experiment Name: At_Drought_P Parameter: Plant Line Value: WS
  misc_feature: MA Experiment 20000437 PARAMETER Experiment Name: At_Drought_P Parameter: Timepoint (hr) Value: 24
  misc_feature: MA Experiment 20000437 PARAMETER Experiment Name: At_Drought_P Parameter: Tissue Value: Whole Plant
  misc_feature: MA Experiment 20000437 PARAMETER Experiment Name: At_Drought_P Parameter: Treatment Value: Drought vs. No Drought
  misc_feature: MA Experiment ID: 20001557 Result: Up-regulated in Transcription
  misc_feature: MA Experiment 20001557 PARAMETER Experiment Name: At_Drought_Soil_Dry_P Parameter: Age (day) Value: 27
  misc_feature: MA Experiment 20001557 PARAMETER Experiment Name: At_Drought_Soil_Dry_P Parameter: Organism Value: A. thaliana
  misc_feature: MA Experiment 20001557 PARAMETER Experiment Name: At_Drought_Soil_Dry_P Parameter: Plant Line Value: WS
  misc_feature: MA Experiment 20001557 PARAMETER Experiment Name: At_Drought_Soil_Dry_P Parameter: Post Timepoint (hr) Value: 3
  misc_feature: MA Experiment 20001557 PARAMETER Experiment Name: At_Drought_Soil_Dry_P Parameter: Post-Treatment Value: Re-Water vs. No Drought
  misc_feature: MA Experiment 20001557 PARAMETER Experiment Name: At_Drought_Soil_Dry_P Parameter: Timepoint (day) Value: 13
  misc_feature: MA Experiment 20001557 PARAMETER Experiment Name: At_Drought_Soil_Dry_P Parameter: Treatment Value: Drought vs. No Drought
  misc_feature: MA Experiment ID: 20001558 Result: Up-regulated in Transcription
  misc_feature: MA Experiment 20001558 PARAMETER Experiment Name: At_Drought_Soil_Dry_P Parameter: Age (day) Value: 27
  misc_feature: MA Experiment 20001558 PARAMETER Experiment Name: At_Drought_Soil_Dry_P Parameter: Organism Value: A. thaliana
  misc_feature: MA Experiment 20001558 PARAMETER Experiment Name: At_Drought_Soil_Dry_P Parameter: Plant Line Value: WS
  misc_feature: MA Experiment 20001558 PARAMETER Experiment Name: At_Drought_Soil_Dry_P Parameter: Post Timepoint (hr) Value: 6
  misc_feature: MA Experiment 20001558 PARAMETER Experiment Name: At_Drought_Soil_Dry_P Parameter: Post-Treatment Value: Re-Water vs. No Drought
  misc_feature: MA Experiment 20001558 PARAMETER Experiment Name: At_Drought_Soil_Dry_P Parameter: Timepoint (day) Value: 13
  misc_feature: MA Experiment 20001558 PARAMETER Experiment Name: At_Drought_Soil_Dry_P Parameter: Treatment Value: Drought vs. No Drought
  misc_feature: MA Experiment ID: 20001560 Result: Up-regulated in Transcription
  misc_feature: MA Experiment 20001560 PARAMETER Experiment Name: At_Drought_Soil_Dry_P Parameter: Age (day) Value: 28
  misc_feature: MA Experiment 20001560 PARAMETER Experiment Name: At_Drought_Soil_Dry_P Parameter: Organism Value: A. thaliana
  misc_feature: MA Experiment 20001560 PARAMETER Experiment Name: At_Drought_Soil_Dry_P Parameter: Plant Line Value: WS
  misc_feature: MA Experiment 20001560 PARAMETER Experiment Name: At_Drought_Soil_Dry_P Parameter: Post Timepoint (hr) Value: None
  misc_feature: MA Experiment 20001560 PARAMETER Experiment Name: At_Drought_Soil_Dry_P Parameter: Post-Treatment Value: None
  misc_feature: MA Experiment 20001560 PARAMETER Experiment Name: At_Drought_Soil_Dry_P Parameter: Timepoint (day) Value: 14
  misc_feature: MA Experiment 20001560 PARAMETER Experiment Name: At_Drought_Soil_Dry_P Parameter: Treatment Value: Drought vs. No Drought
  misc_feature: MA Experiment ID: 20001757 Result: Up-regulated in Transcription
  misc_feature: MA Experiment 20001757 PARAMETER Experiment Name: At_50mM_NH4NO3_L-to-H_P Parameter: Timepoint (hr) Value: 6
  misc_feature: MA Experiment 20001757 PARAMETER Experiment Name: At_50mM_NH4NO3_L-to-H_P Parameter: Tissue Value: Leaf
  misc_feature: MA Experiment 20001757 PARAMETER Experiment Name: At_50mM_NH4NO3_L-to-H_P Parameter: Treatment Value: 50mM NH4NO3 vs 100mM Mannitol
agtctagagccgcgcaagaagacgattctctctcttgagttgaagaaatgaagcacaacaatgttatccccaatggtcacttcaaaaagcactggcagaattatgtcaagacatggttcaaccagcctgccaggaaaaccagaagaagaattgcgaggcaaaagaaggctgtgaagatcttccctcgtccaacttctggacctctccgccctgttgtgcatggtcagactcttaagtacaacatgaaggtcagaaccggtaaaggattcactcttgaagagctcaaggctggtgactctacaccagaagagttggctaatgctacccaagttcaaggagactacttgcctattgtacgtgagaagcctaccatggaactcgtcaagctgacttcagaaatgaagtctttcaaggcttttgacaagatacgccttgagcgcactaacaagaggcatgccggagctagagccaagagagccgcagaggctgagaaagaagagaagaagtgaggtcgttcttcttaggtagaagaaacttttatcttatcaacttttggaactgaattttgtgtatcagactgtcttttctttcatcagtttttatccttaaatctttgattttgctgctaccttgcttctcttgatttatggaaaagaccgtatctc

SEQ ID NO: 30861 - protein, 153 aa, Arabidopsis thaliana
  peptide (1)..(153): Ceres Seq. ID no. 12323111
  misc_feature (5)..(147): Pfam Name: Ribosomal protein L13e Pfam Description: Ribosomal protein L13e
  misc_feature (1)..(151): Homolog of NCBI NO: 12580867 NR Description: 60S ribosomal protein L13E [Picea abies]
  misc_feature (1)..(138): Homolog of NCBI NO: 15237847 NR Description: 60S ribosomal protein L13
  misc_feature (1)..(138): Homolog of NCBI NO: 21537149 NR Description: 60S ribosomal protein L13, BBC1 protein
  misc_feature (1)..(138): Homolog of NCBI NO: 15229064 NR Description: 60S ribosomal protein L13, BBC1 protein
  misc_feature (1)..(147): Homolog of NCBI NO: 7441103 NR Description: ribosomal protein L13.B, cytosolic - rape
  misc_feature (1)..(147): Homolog of NCBI NO: 7441102 NR Description: ribosomal protein L13.A, cytosolic - rape
  misc_feature (1)..(147): Homolog of NCBI NO: 730449 NR Description: 60S RIBOSOMAL PROTEIN L13-1 (COLD INDUCED PROTEIN
  misc_feature (1)..(147): Homolog of NCBI NO: 730450 NR Description: 60S RIBOSOMAL PROTEIN L13-2 (COLD INDUCED PROTEIN
  misc_feature (86)..(153): Homolog of NCBI NO: 1350664 NR Description: 60S RIBOSOMAL PROTEIN L13 (CLONE 6.2.1)
  misc_feature (9)..(99): Homolog of NCBI NO: 1350664 NR Description: 60S RIBOSOMAL PROTEIN L13 (CLONE 6.2.1)
MKHNNVIPNGHFKKHWQNYVKTWFNQPARKTRRRIARQKKAVKIFPRPTSGPLRPVVHGQTLKYNMKVRTGKGFTLEELKAGDSTPEELANATQVQGDYLPIVREKPTMELVKLTSEMKSFKAFDKIRLERTNKRHAGARAKRAAEAEKEEKK

SEQ ID NO: 30862 - protein, 88 aa, Arabidopsis thaliana
  peptide (1)..(88): Ceres Seq. ID no. 12323112
  misc_feature (1)..(82): Pfam Name: Ribosomal protein L13e Pfam Description: Ribosomal protein L13e
  misc_feature (1)..(86): Homolog of NCBI NO: 12580867 NR Description: 60S ribosomal protein L13E [Picea abies]
  misc_feature (1)..(73): Homolog of NCBI NO: 15237847 NR Description: 60S ribosomal protein L13
  misc_feature (1)..(73): Homolog of NCBI NO: 21537149 NR Description: 60S ribosomal protein L13, BBC1 protein
  misc_feature (1)..(73): Homolog of NCBI NO: 15229064 NR Description: 60S ribosomal protein L13, BBC1 protein
  misc_feature (1)..(82): Homolog of NCBI NO: 7441103 NR Description: ribosomal protein L13.B, cytosolic - rape
  misc_feature (1)..(82): Homolog of NCBI NO: 7441102 NR Description: ribosomal protein L13.A, cytosolic - rape
  misc_feature (1)..(82): Homolog of NCBI NO: 730449 NR Description: 60S RIBOSOMAL PROTEIN L13-1 (COLD INDUCED PROTEIN
  misc_feature (1)..(82): Homolog of NCBI NO: 730450 NR Description: 60S RIBOSOMAL PROTEIN L13-2 (COLD INDUCED PROTEIN
  misc_feature (21)..(88): Homolog of NCBI NO: 1350664 NR Description: 60S RIBOSOMAL PROTEIN L13 (CLONE 6.2.1)
  misc_feature (1)..(34): Homolog of NCBI NO: 1350664 NR Description: 60S RIBOSOMAL PROTEIN L13 (CLONE 6.2.1)
MKVRTGKGFTLEELKAGDSTPEELANATQVQGDYLPIVREKPTMELVKLTSEMKSFKAFDKIRLERTNKRHAGARAKRAAEAEKEEKK

SEQ ID NO: 30863 - DNA, 1593 bp, Arabidopsis thaliana
  misc_feature (1)..(1593): Ceres Seq. ID no. 12322908
  misc_feature: MA Experiment ID: 108577 Result: Down-regulated in Transcription
  misc_feature: MA Experiment 108577 PARAMETER Experiment Name: At_42deg_Heat_cDNA_P Parameter: Temperature (deg C) Value: 42 vs. 22
  misc_feature: MA Experiment 108577 PARAMETER Experiment Name: At_42deg_Heat_cDNA_P Parameter: Timepoint (hr) Value: 6
  misc_feature: MA Experiment 108577 PARAMETER Experiment Name: At_42deg_Heat_cDNA_P Parameter: Tissue Value: Aerial
  misc_feature: MA Experiment ID: 108585 Result: Up-regulated in Transcription
  misc_feature: MA Experiment 108585 PARAMETER Experiment Name: At_5mM_NaNP_cDNA_P Parameter: Timepoint (hr) Value: 6
  misc_feature: MA Experiment 108585 PARAMETER Experiment Name: At_5mM_NaNP_cDNA_P Parameter: Tissue Value: Aerial
  misc_feature: MA Experiment 108585 PARAMETER Experiment Name: At_5mM_NaNP_cDNA_P Parameter: Treatment Value: null
  misc_feature: MA Experiment ID: 20000171 Result: Down-regulated in Transcription
  misc_feature: MA Experiment 20000171 PARAMETER Experiment Name: At_42deg_Heat_P Parameter: Age (day) Value: 14
  misc_feature: MA Experiment 20000171 PARAMETER Experiment Name: At_42deg_Heat_P Parameter: Organism Value: A. thaliana
  misc_feature: MA Experiment 20000171 PARAMETER Experiment Name: At_42deg_Heat_P Parameter: Plant Line Value: WS
  misc_feature: MA Experiment 20000171 PARAMETER Experiment Name: At_42deg_Heat_P Parameter: Temperature (deg C) Value: 42 vs. 22
  misc_feature: MA Experiment 20000171 PARAMETER Experiment Name: At_42deg_Heat_P Parameter: Timepoint (hr) Value: 1
  misc_feature: MA Experiment 20000171 PARAMETER Experiment Name: At_42deg_Heat_P Parameter: Tissue Value: Aerial
  misc_feature: MA Experiment ID: 20000184 Result: Down-regulated in Transcription
  misc_feature: MA Experiment 20000184 PARAMETER Experiment Name: At_Shoots__P Parameter: Age (day) Value: 7
  misc_feature: MA Experiment 20000184 PARAMETER Experiment Name: At_Shoots__P Parameter: Tissue Value: Shoots vs. Whole Plant
gattgactaaaagtcattaaattacaaatctaaagttaaaagtgtttcgtctgaaatttcttgttagctccaaaagaggaaaacgaatccaagaaggagaaaaagtctcattcctcaagctccgcatcattcctccttcatggggtctctgcatcttacaatttagcactctcatattattattccttaaaccccttgttttgattttgtttccagatttaaagaaaccctaagacctcttcgaaatctccccagaaacacttatttcatttcttccttggccttgactacgcgtctttccttttactccggaaggaagatccagaaaggttttctttcgatcgttgcttttgactatgcatagatctggtacaacaatggcgtggaacgtattcaagttctgtactgccttacgaggtcttggatcgatcatgatccttttggttcttggtgttgtcggtgttacttattacgctgtcgttttgactaattatggtcctgcactctctcaaggtggccttgattctcttgctgctctcactatcttaatcctcttccatttcctcctggcaatgcttttgtggagctatttctcagtggtttttactgatcctggtgttgtgcctcctaattggagaccatctactgatgaagaaagaggtgaatctgatccgttaaatagtttggactttgttggtttacaatccgattcttcttcttcaaacccaagagttcggttttgtcggaagtgcaatcaactaaaaccttctcgttgtcatcattgttctgtttgtggtcggtgtgtgttgaagatggatcaccattgtgtttgggttgttaactgtgtaggagcactgaactataagtattttcttcttttcttgttctacacatttttagagacgacccttgtgactttggttcttatgccgcacttcattgcattctttagtgatgaagaaatacctggaaccccaggcactcttgctactacttttcttgcatttgttttgaacttggcatttgcgttgagcgtgatgggtttcttaattatgcatatttccttggtagctggcaataccacaactatagaggcatatgagaagaaaaccactacaaaatggcggtatgacctcggtaaaaagaaaaactttgaacaggtatttggaatggataagagatactggttaatcccaggatacacagaagaagatctaaggcgaatgccggagctgcagggacttgaatacccttcgaaacccgactttgattcccagtgatgctcaagaagactttgatcatcatcatcatcccatgtaaaacagcaatacgtagaaaaacagagcaagtggcatgtcaaggagaaatctactaacatgaagatggatgcttcactttaggcagtgtagatgtcttcccatggaaggctaagtcatcatcaaatttgtgggttttgaaaagaggatgattacaatttagctttgttggccacatatatgttcatcatcttcaatagttcatatatagatatgatcttattataaatgtagaacacacatgatttaccctaaatcctcttgactcttttgtttc

SEQ ID NO: 30864 - protein, 307 aa, Arabidopsis thaliana
  peptide (1)..(307): Ceres Seq. ID no. 12322909
  misc_feature (118)..(182): Pfam Name: DHHC zinc finger domain Pfam Description: DHHC zinc finger domain
  misc_feature (10)..(280): Homolog of NCBI NO: 12856270 NR Description: unnamed protein product [Mus musculus]
  misc_feature (10)..(280): Homolog of NCBI NO: 31560054 NR Description: RIKEN cDNA 5033406L14 [Mus musculus]
  misc_feature (218)..(269): Homolog of NCBI NO: 18411456 NR Description: hypothetical protein; protein id: At4g00840.1
  misc_feature (73)..(232): Homolog of NCBI NO: 18411456 NR Description: hypothetical protein; protein id: At4g00840.1
  misc_feature (7)..(307): Homolog of NCBI NO: 7486880 NR Description: hypothetical protein T12H17.140 - Arabidopsis
  misc_feature (8)..(307): Homolog of NCBI NO: 18416000 NR Description: Expressed protein
  misc_feature (8)..(307): Homolog of NCBI NO: 21593364 NR Description: unknown [Arabidopsis thaliana]
  misc_feature (8)..(126): Homolog of NCBI NO: 11358343 NR Description: hypothetical protein T4C21.210 - Arabidopsis
  misc_feature (152)..(307): Homolog of NCBI NO: 11358343 NR Description: hypothetical protein T4C21.210 - Arabidopsis
  misc_feature (1)..(307): Homolog of NCBI NO: 22331887 NR Description: putative protein
MHRSGTTMAWNVFKFCTALRGLGSIMILLVLGVVGVTYYAVVLTNYGPALSQGGLDSLAALTILILFHFLLAMLLWSYFSVVFTDPGVVPPNWRPSTDEERGESDPLNSLDFVGLQSDSSSSNPRVRFCRKCNQLKPSRCHHCSVCGRCVLKMDHHCVWVVNCVGALNYKYFLLFLFYTFLETTLVTLVLMPHFIAFFSDEEIPGTPGTLATTFLAFVLNLAFALSVMGFLIMHISLVAGNTTTIEAYEKKTTTKWRYDLGKKKNFEQVFGMDKRYWLIPGYTEEDLRRMPELQGLEYPSKPDFDSQ

SEQ ID NO: 30865 - protein, 300 aa, Arabidopsis thaliana
  peptide (1)..(300): Ceres Seq. ID no. 12322910
  misc_feature (111)..(175): Pfam Name: DHHC zinc finger domain Pfam Description: DHHC zinc finger domain
  misc_feature (3)..(273): Homolog of NCBI NO: 12856270 NR Description: unnamed protein product [Mus musculus]
  misc_feature (3)..(273): Homolog of NCBI NO: 31560054 NR Description: RIKEN cDNA 5033406L14 [Mus musculus]
  misc_feature (211)..(262): Homolog of NCBI NO: 18411456 NR Description: hypothetical protein; protein id: At4g00840.1
  misc_feature (66)..(225): Homolog of NCBI NO: 18411456 NR Description: hypothetical protein; protein id: At4g00840.1
  misc_feature (1)..(300): Homolog of NCBI NO: 7486880 NR Description: hypothetical protein T12H17.140 - Arabidopsis
  misc_feature (1)..(300): Homolog of NCBI NO: 18416000 NR Description: Expressed protein
  misc_feature (1)..(300): Homolog of NCBI NO: 21593364 NR Description: unknown [Arabidopsis thaliana]
  misc_feature (1)..(119): Homolog of NCBI NO: 11358343 NR Description: hypothetical protein T4C21.210 - Arabidopsis
  misc_feature (145)..(300): Homolog of NCBI NO: 11358343 NR Description: hypothetical protein T4C21.210 - Arabidopsis
  misc_feature (1)..(300): Homolog of NCBI NO: 22331887 NR Description: putative protein
MAWNVFKFCTALRGLGSIMILLVLGVVGVTYYAVVLTNYGPALSQGGLDSLAALTILILFHFLLAMLLWSYFSVVFTDPGVVPPNWRPSTDEERGESDPLNSLDFVGLQSDSSSSNPRVRFCRKCNQLKPSRCHHCSVCGRCVLKMDHHCVWVVNCVGALNYKYFLLFLFYTFLETTLVTLVLMPHFIAFFSDEEIPGTPGTLATTFLAFVLNLAFALSVMGFLIMHISLVAGNTTTIEAYEKKTTTKWRYDLGKKKNFEQVFGMDKRYWLIPGYTEEDLRRMPELQGLEYPSKPDFDSQ

SEQ ID NO: 30866 - protein, 282 aa, Arabidopsis thaliana
  peptide (1)..(282): Ceres Seq. ID no. 12322911
  misc_feature (93)..(157): Pfam Name: DHHC zinc finger domain Pfam Description: DHHC zinc finger domain
  misc_feature (1)..(255): Homolog of NCBI NO: 12856270 NR Description: unnamed protein product [Mus musculus]
  misc_feature (1)..(255): Homolog of NCBI NO: 31560054 NR Description: RIKEN cDNA 5033406L14 [Mus musculus]
  misc_feature (193)..(244): Homolog of NCBI NO: 18411456 NR Description: hypothetical protein; protein id: At4g00840.1
  misc_feature (48)..(207): Homolog of NCBI NO: 18411456 NR Description: hypothetical protein; protein id: At4g00840.1
  misc_feature (1)..(282): Homolog of NCBI NO: 7486880 NR Description: hypothetical protein T12H17.140 - Arabidopsis
  misc_feature (1)..(282): Homolog of NCBI NO: 18416000 NR Description: Expressed protein
  misc_feature (1)..(282): Homolog of NCBI NO: 21593364 NR Description: unknown [Arabidopsis thaliana]
  misc_feature (1)..(101): Homolog of NCBI NO: 11358343 NR Description: hypothetical protein T4C21.210 - Arabidopsis
  misc_feature (127)..(282): Homolog of NCBI NO: 11358343 NR Description: hypothetical protein T4C21.210 - Arabidopsis
  misc_feature (1)..(282): Homolog of NCBI NO: 22331887 NR Description: putative protein
MILLVLGVVGVTYYAVVLTNYGPALSQGGLDSLAALTILILFHFLLAMLLWSYFSVVFTDPGVVPPNWRPSTDEERGESDPLNSLDFVGLQSDSSSSNPRVRFCRKCNQLKPSRCHHCSVCGRCVLKMDHHCVWVVNCVGALNYKYFLLFLFYTFLETTLVTLVLMPHFIAFFSDEEIPGTPGTLATTFLAFVLNLAFALSVMGFLIMHISLVAGNTTTIEAYEKKTTTKWRYDLGKKKNFEQVFGMDKRYWLIPGYTEEDLRRMPELQGLEYPSKPDFDSQ

SEQ ID NO: 30867 - DNA, 838 bp, Arabidopsis thaliana
  misc_feature (1)..(838): Ceres Seq. ID no. 12335427
  misc_feature: MA Experiment ID: 108573 Result: Up-regulated in Transcription
  misc_feature: MA Experiment 108573 PARAMETER Experiment Name: At_Drought_cDNA_P Parameter: Timepoint (hr) Value: 6
  misc_feature: MA Experiment 108573 PARAMETER Experiment Name: At_Drought_cDNA_P Parameter: Tissue Value: Aerial
  misc_feature: MA Experiment 108573 PARAMETER Experiment Name: At_Drought_cDNA_P Parameter: Treatment Value: Drought vs. No Drought
  misc_feature: MA Experiment ID: 108577 Result: Down-regulated in Transcription
  misc_feature: MA Experiment 108577 PARAMETER Experiment Name: At_42deg_Heat_cDNA_P Parameter: Temperature (deg C) Value: 42 vs. 22
  misc_feature: MA Experiment 108577 PARAMETER Experiment Name: At_42deg_Heat_cDNA_P Parameter: Timepoint (hr) Value: 6
  misc_feature: MA Experiment 108577 PARAMETER Experiment Name: At_42deg_Heat_cDNA_P Parameter: Tissue Value: Aerial
  misc_feature: MA Experiment ID: 20000179 Result: Up-regulated in Transcription
  misc_feature: MA Experiment 20000179 PARAMETER Experiment Name: At_Germinating_Seeds_P Parameter: Age (hr) Value: 6 vs. 0
  misc_feature: MA Experiment 20000179 PARAMETER Experiment Name: At_Germinating_Seeds_P Parameter: Tissue Value: Germinating Seeds
  misc_feature: MA Experiment ID: 20000180 Result: Up-regulated in Transcription
  misc_feature: MA Experiment 20000180 PARAMETER Experiment Name: At_Germinating_Seeds_P Parameter: Age (hr) Value: 24 vs. 0
  misc_feature: MA Experiment 20000180 PARAMETER Experiment Name: At_Germinating_Seeds_P Parameter: Tissue Value: Germinating Seeds
  misc_feature: MA Experiment ID: 20000224 Result: Down-regulated in Transcription
aactactctctctctctctctttcttctgccatcgccaaaaacttgtcttttgcttcttatttgctctgatcttttgattcaacggctcccggagacgacggaagcaatgcagttcttcggtggatctgagattagtccgtcgccgccagttccgacggcgagtggaaacaacgcgcacatgatgtacgttttcaatcgtaacggtgtatgtcttctctacaaagaatggaatcggcctcttcatacacttaatcctcagcaagatcacaagctcatgtttggtcttctcttctctctcaaatctctcaccgctaagatggatccagtcaatgcggataaaggaaatcttggggttccacagttgccaggacaaggttgctctttccatagtttccgtacgaatacttacaagctaagtttcatggagactccctctggtattaagattatcttagtaactcatccaaagaccggagatttacgcgaatccttgaagtacatctacagtttatacgttgaatatgtcgtaaaaaatcctatatacagcccaggatctccaatcaagtcggagttgttcaacactgcacttgaccagtacgtaaggagcatctcttagtgtgtgcattacagatttgtccattggaacttctctccttcaacagaactatcgtctgaacaatctctgaaaagaagagagaattgtagtagagagatttatcttgagttcgactgttttctctgcaaatctatgtttcgtttaccctttttattaactccactgtattggcttgctatcaatgatgttcatggtttactcaaatattgaaatgcgacatg

SEQ ID NO: 30868 - protein, 204 aa, Arabidopsis thaliana
  peptide (1)..(204): Ceres Seq. ID no. 12335428
  misc_feature (58)..(203): Pfam Name: Sybindin-like family Pfam Description: Sybindin-like family
  misc_feature (59)..(202): Homolog of NCBI NO: 19113462 NR Description: hypothetical protein [Schizosaccharomyces pombe]
  misc_feature (128)..(204): Homolog of NCBI NO: 19115000 NR Description: conserved hypothetical protein
  misc_feature (88)..(203): Homolog of NCBI NO: 40740926 NR Description: hypothetical protein AN8828.2 [Aspergillus
  misc_feature (59)..(204): Homolog of NCBI NO: 19114985 NR Description: hypothetical protein [Schizosaccharomyces pombe]
  misc_feature (84)..(203): Homolog of NCBI NO: 28828451 NR Description: similar to Homo sapiens (Human). MUM2 protein
  misc_feature (61)..(201): Homolog of NCBI NO: 24651330 NR Description: CG1359-PA [Drosophila melanogaster]
  misc_feature (59)..(203): Homolog of NCBI NO: 10864021 NR Description: MUM2 protein [Homo sapiens]
  misc_feature (59)..(203): Homolog of NCBI NO: 20881775 NR Description: similar to MUM2 protein [Homo sapiens] [Mus
  misc_feature (43)..(203): Homolog of NCBI NO: 34914656 NR Description: P0504D03.19 [Oryza sativa (japonica
  misc_feature (36)..(204): Homolog of NCBI NO: 15223752 NR Description: unknown protein; protein id: At1g51160.1
LLSLSLFLLPSPKTCLLLLICSDLLIQRLPETTEAMQFFGGSEISPSPPVPTASGNNAHMMYVFNRNGVCLLYKEWNRPLHTLNPQQDHKLMFGLLFSLKSLTAKMDPVNADKGNLGVPQLPGQGCSFHSFRTNTYKLSFMETPSGIKIILVTHPKTGDLRESLKYIYSLYVEYVVKNPIYSPGSPIKSELFNTALDQYVRSIS

SEQ ID NO: 30869 - protein, 169 aa, Arabidopsis thaliana; identical to SEQ ID NO: 24678
  peptide (1)..(169): Ceres Seq. ID no. 12335429
  misc_feature (23)..(168): Pfam Name: Sybindin-like family Pfam Description: Sybindin-like family
  misc_feature (24)..(167): Homolog of NCBI NO: 19113462 NR Description: hypothetical protein [Schizosaccharomyces pombe]
  misc_feature (93)..(169): Homolog of NCBI NO: 19115000 NR Description: conserved hypothetical protein
  misc_feature (53)..(168): Homolog of NCBI NO: 40740926 NR Description: hypothetical protein AN8828.2 [Aspergillus
  misc_feature (24)..(169): Homolog of NCBI NO: 19114985 NR Description: hypothetical protein [Schizosaccharomyces pombe]
  misc_feature (49)..(168): Homolog of NCBI NO: 28828451 NR Description: similar to Homo sapiens (Human). MUM2 protein
  misc_feature (26)..(166): Homolog of NCBI NO: 24651330 NR Description: CG1359-PA [Drosophila melanogaster]
  misc_feature (24)..(168): Homolog of NCBI NO: 10864021 NR Description: MUM2 protein [Homo sapiens]
  misc_feature (24)..(168): Homolog of NCBI NO: 20881775 NR Description: similar to MUM2 protein [Homo sapiens] [Mus
  misc_feature (8)..(168): Homolog of NCBI NO: 34914656 NR Description: P0504D03.19 [Oryza sativa (japonica
  misc_feature (1)..(169): Homolog of NCBI NO: 15223752 NR Description: unknown protein; protein id: At1g51160.1

SEQ ID NO: 30870 - protein, 145 aa, Arabidopsis thaliana; identical to SEQ ID NO: 24679
  peptide (1)..(145): Ceres Seq. ID no. 12335430
  misc_feature (1)..(144): Pfam Name: Sybindin-like family Pfam Description: Sybindin-like family
  misc_feature (1)..(143): Homolog of NCBI NO: 19113462 NR Description: hypothetical protein [Schizosaccharomyces pombe]
  misc_feature (69)..(145): Homolog of NCBI NO: 19115000 NR Description: conserved hypothetical protein
  misc_feature (29)..(144): Homolog of NCBI NO: 40740926 NR Description: hypothetical protein AN8828.2 [Aspergillus
  misc_feature (1)..(145): Homolog of NCBI NO: 19114985 NR Description: hypothetical protein [Schizosaccharomyces pombe]
  misc_feature (25)..(144): Homolog of NCBI NO: 28828451 NR Description: similar to Homo sapiens (Human). MUM2 protein
  misc_feature (2)..(142): Homolog of NCBI NO: 24651330 NR Description: CG1359-PA [Drosophila melanogaster]
  misc_feature (1)..(144): Homolog of NCBI NO: 10864021 NR Description: MUM2 protein [Homo sapiens]
  misc_feature (1)..(144): Homolog of NCBI NO: 20881775 NR Description: similar to MUM2 protein [Homo sapiens] [Mus
  misc_feature (1)..(144): Homolog of NCBI NO: 34914656 NR Description: P0504D03.19 [Oryza sativa (japonica
  misc_feature (1)..(145): Homolog of NCBI NO: 15223752 NR Description: unknown protein; protein id: At1g51160.1

SEQ ID NO: 30871 - DNA, 776 bp, Arabidopsis thaliana
  misc_feature (1)..(776): Ceres Seq. ID no. 12332230
  misc_feature: MA Experiment ID: 108433 Result: Up-regulated in Transcription
  misc_feature: MA Experiment 108433 PARAMETER Experiment Name: At_rhl_Mutant2_cDNA_P Parameter: Age (day) Value: 7
  misc_feature: MA Experiment 108433 PARAMETER Experiment Name: At_rhl_Mutant2_cDNA_P Parameter: Organism Value: A. thaliana
  misc_feature: MA Experiment 108433 PARAMETER Experiment Name: At_rhl_Mutant2_cDNA_P Parameter: Plant Line Value: rhl Mutant vs. wt landsburg
  misc_feature: MA Experiment 108433 PARAMETER Experiment Name: At_rhl_Mutant2_cDNA_P Parameter: Tissue Value: Roots
  misc_feature: MA Experiment ID: 108435 Result: Down-regulated in Transcription
  misc_feature: MA Experiment 108435 PARAMETER Experiment Name: At_stm_Mutants_cDNA_P Parameter: Plant Line Value: wt Landsburg vs stm
  misc_feature: MA Experiment 108435 PARAMETER Experiment Name: At_stm_Mutants_cDNA_P Parameter: Tissue Value: Shoot Apical Meristem Region
  misc_feature: MA Experiment ID: 20000439 Result: Down-regulated in Transcription
  misc_feature: MA Experiment 20000439 PARAMETER Experiment Name: At_Roots__P Parameter: Age (day) Value: 14 vs. 21
  misc_feature: MA Experiment 20000439 PARAMETER Experiment Name: At_Roots__P Parameter: Organism Value: A. thaliana
  misc_feature: MA Experiment 20000439 PARAMETER Experiment Name: At_Roots__P Parameter: Tissue Value: Roots vs. Whole Plant
  misc_feature: MA Experiment ID: 20000495 Result: Down-regulated in Transcription
  misc_feature: MA Experiment 20000495 PARAMETER Experiment Name: At_Guard_Cells_P Parameter: Harvest Date Value: 8/2/2002
  misc_feature: MA Experiment 20000495 PARAMETER Experiment Name: At_Guard_Cells_P Parameter: Organism Value: A. thaliana
  misc_feature: MA Experiment 20000495 PARAMETER Experiment Name: At_Guard_Cells_P Parameter: Tissue Value: Guard Cells vs. Leaves
  misc_feature: MA Experiment ID: 20000573 Result: Up-regulated in Transcription
  misc_feature: MA Experiment 20000573 PARAMETER Experiment Name: At_100uM_ABA_Mutants__P Parameter: Organism Value: A. thaliana
  misc_feature: MA Experiment 20000573 PARAMETER Experiment Name: At_100uM_ABA_Mutants__P Parameter: Plant Line Value: CS22 vs. Ler wt
  misc_feature: MA Experiment 20000573 PARAMETER Experiment Name: At_100uM_ABA_Mutants__P Parameter: Timepoint (hr) Value: N/A
  misc_feature: MA Experiment 20000573 PARAMETER Experiment Name: At_100uM_ABA_Mutants__P Parameter: Tissue Value: Whole Plant
  misc_feature: MA Experiment 20000573 PARAMETER Experiment Name: At_100uM_ABA_Mutants__P Parameter: Treatment Value: None
  misc_feature: MA Experiment ID: 20000574 Result: Up-regulated in Transcription
  misc_feature: MA Experiment 20000574 PARAMETER Experiment Name: At_100uM_ABA_Mutants__P Parameter: Organism Value: A. thaliana
  misc_feature: MA Experiment 20000574 PARAMETER Experiment Name: At_100uM_ABA_Mutants__P Parameter: Plant Line Value: CS23 vs. Ler wt
  misc_feature: MA Experiment 20000574 PARAMETER Experiment Name: At_100uM_ABA_Mutants__P Parameter: Timepoint (hr) Value: N/A
  misc_feature: MA Experiment 20000574 PARAMETER Experiment Name: At_100uM_ABA_Mutants__P Parameter: Tissue Value: Whole Plant
  misc_feature: MA Experiment 20000574 PARAMETER Experiment Name: At_100uM_ABA_Mutants__P Parameter: Treatment Value: None
atacgattgccataatttcatccatacttatccggtttataacaccgataatccgatttggtcaaaatccggcggagaaaaaccctaaaaatggagaaagagacgaaggagaagatcgagaaaactgtgatagagatactcagtgaatcggatatgaaagagataacagagttcaaggttcgtaaactcgcttcggagaaactcgcaatcgatctctcggagaaatctcacaaagcatttgtacgaagcgtcgtggagaaattcctcgacgaagagagagcgagagaatatgaaaactcacaagtgaataaggaagaagaagatggagataaggattgtggtaaaggaaacaaagagtttgatgatgacggcgatcttatcatttgcaggttatcggataagagaagagtgacgattcaggaatttaaagggaagagtttggtttctatcagagagtattacaagaaagatggcaaagaacttcctacttctaaaggaataagcttaacagatgaacaatggtcaaccttcaagaaaaacatgccagccatcgaaaatgctgtcaagaaaatggaatcgcgtgtctgaatgaagaacatgtgatactttatctctaaacatgtgtaagtgtcttcttaagtagttagttgttcgaatgttcaggtctctcatgtaactgtcttttttattttcttctctcgaattggtcgttatgtgtctcgtactgagttgtatccatttcgctttaaccgattccaaaaactctggaccaaagt

SEQ ID NO: 30872 - protein, 165 aa, Arabidopsis thaliana
  peptide (1)..(165): Ceres Seq. ID no. 12332231
  misc_feature (68)..(158): Pfam Name: Transcriptional Coactivator p15 (PC4) Pfam Description: Transcriptional Coactivator p15 (PC4)
  misc_feature (136)..(165): Homolog of NCBI NO: 7485280 NR Description: hypothetical protein A_TM018A10.1 - Arabidopsis
  misc_feature (1)..(59): Homolog of NCBI NO: 7485280 NR Description: hypothetical protein A_TM018A10.1 - Arabidopsis
  misc_feature (88)..(155): Homolog of NCBI NO: 40739125 NR Description: hypothetical protein AN5806.2 [Aspergillus
  misc_feature (65)..(161): Homolog of NCBI NO: 15242365 NR Description: putative transcriptional co-activator (KIWI)
  misc_feature (1)..(93): Homolog of NCBI NO: 34910378 NR Description: P0684B02.23 [Oryza sativa (japonica
  misc_feature (1)..(165): Homolog of NCBI NO: 16610191 NR Description: PBF68 protein [Nicotiana tabacum]
  misc_feature (1)..(165): Homolog of NCBI NO: 30678785 NR Description: contains similarity to gag proteins [Arabidopsis
  misc_feature (62)..(161): Homolog of NCBI NO: 34910378 NR Description: P0684B02.23 [Oryza sativa (japonica
  misc_feature (1)..(165): Homolog of NCBI NO: 13699910 NR Description: putative transcriptional coactivator [Brassica
  misc_feature (1)..(165): Homolog of NCBI NO: 15236980 NR Description: putative protein
MEKETKEKIEKTVIEILSESDMKEITEFKVRKLASEKLAIDLSEKSHKAFVRSVVEKFLDEERAREYENSQVNKEEEDGDKDCGKGNKEFDDDGDLIICRLSDKRRVTIQEFKGKSLVSIREYYKKDGKELPTSKGISLTDEQWSTFKKNMPAIENAVKKMESRV

SEQ ID NO: 30873 - protein, 144 aa, Arabidopsis thaliana
  peptide (1)..(144): Ceres Seq. ID no. 12332232
  misc_feature (47)..(137): Pfam Name: Transcriptional Coactivator p15 (PC4) Pfam Description: Transcriptional Coactivator p15 (PC4)
  misc_feature (115)..(144): Homolog of NCBI NO: 7485280 NR Description: hypothetical protein A_TM018A10.1 - Arabidopsis
  misc_feature (1)..(38): Homolog of NCBI NO: 7485280 NR Description: hypothetical protein A_TM018A10.1 - Arabidopsis
  misc_feature (67)..(134): Homolog of NCBI NO: 40739125 NR Description: hypothetical protein AN5806.2 [Aspergillus
  misc_feature (44)..(140): Homolog of NCBI NO: 15242365 NR Description: putative transcriptional co-activator (KIWI)
  misc_feature (1)..(72): Homolog of NCBI NO: 34910378 NR Description: P0684B02.23 [Oryza sativa (japonica
  misc_feature (1)..(144): Homolog of NCBI NO: 16610191 NR Description: PBF68 protein [Nicotiana tabacum]
  misc_feature (1)..(144): Homolog of NCBI NO: 30678785 NR Description: contains similarity to gag proteins [Arabidopsis
  misc_feature (41)..(140): Homolog of NCBI NO: 34910378 NR Description: P0684B02.23 [Oryza sativa (japonica
  misc_feature (1)..(144): Homolog of NCBI NO: 13699910 NR Description: putative transcriptional coactivator [Brassica
  misc_feature (1)..(144): Homolog of NCBI NO: 15236980 NR Description: putative protein
MKEITEFKVRKLASEKLAIDLSEKSHKAFVRSVVEKFLDEERAREYENSQVNKEEEDGDKDCGKGNKEFDDDGDLIICRLSDKRRVTIQEFKGKSLVSIREYYKKDGKELPTSKGISLTDEQWSTFKKNMPAIENAVKKMESRV

SEQ ID NO: 30874 - DNA, 834 bp, Arabidopsis thaliana
  misc_feature (1)..(834): Ceres Seq. ID no. 13489264
  misc_feature: MA Experiment ID: 108434 Result: Down-regulated in Transcription
  misc_feature: MA Experiment 108434 PARAMETER Experiment Name: At_Root_Tips_cDNA_P Parameter: Tissue Value: Root Tips
  misc_feature: MA Experiment ID: 108488 Result: Down-regulated in Transcription
  misc_feature: MA Experiment ID: 108573 Result: Up-regulated in Transcription
  misc_feature: MA Experiment 108573 PARAMETER Experiment Name: At_Drought_cDNA_P Parameter: Timepoint (hr) Value: 6
  misc_feature: MA Experiment 108573 PARAMETER Experiment Name: At_Drought_cDNA_P Parameter: Tissue Value: Aerial
  misc_feature: MA Experiment 108573 PARAMETER Experiment Name: At_Drought_cDNA_P Parameter: Treatment Value: Drought vs. No Drought
  misc_feature: MA Experiment ID: 108579 Result: Up-regulated in Transcription
  misc_feature: MA Experiment 108579 PARAMETER Experiment Name: At_4deg_Cold_cDNA_P Parameter: Temperature (deg C) Value: 4 vs. 22
  misc_feature: MA Experiment 108579 PARAMETER Experiment Name: At_4deg_Cold_cDNA_P Parameter: Timepoint (hr) Value: 6
  misc_feature: MA Experiment 108579 PARAMETER Experiment Name: At_4deg_Cold_cDNA_P Parameter: Tissue Value: Aerial
  misc_feature: MA Experiment ID: 108585 Result: Up-regulated in Transcription
  misc_feature: MA Experiment 108585 PARAMETER Experiment Name: At_5mM_NaNP_cDNA_P Parameter: Timepoint (hr) Value: 6
  misc_feature: MA Experiment 108585 PARAMETER Experiment Name: At_5mM_NaNP_cDNA_P Parameter: Tissue Value: Aerial
  misc_feature: MA Experiment 108585 PARAMETER Experiment Name: At_5mM_NaNP_cDNA_P Parameter: Treatment Value: null
  misc_feature: MA Experiment ID: 108595 Result: Up-regulated in Transcription
  misc_feature: MA Experiment 108595 PARAMETER Experiment Name: At_Ler-pi_Ovule_cDNA_P Parameter: Plant Line Value: null
  misc_feature: MA Experiment ID: 20000111 Result: Down-regulated in Transcription
  misc_feature: MA Experiment 20000111 PARAMETER Experiment Name: At_42deg_Heat_cDNA_P Parameter: Temperature (deg C) Value: 42 vs. 22
  misc_feature: MA Experiment 20000111 PARAMETER Experiment Name: At_42deg_Heat_cDNA_P Parameter: Timepoint (hr) Value: 6
  misc_feature: MA Experiment 20000111 PARAMETER Experiment Name: At_42deg_Heat_cDNA_P Parameter: Tissue Value: Aerial
  misc_feature: MA Experiment ID: 20000113 Result: Down-regulated in Transcription
  misc_feature: MA Experiment 20000113 PARAMETER Experiment Name: At_42deg_Heat_cDNA_P Parameter: Temperature (deg C) Value: 42 vs. 22
  misc_feature: MA Experiment 20000113 PARAMETER Experiment Name: At_42deg_Heat_cDNA_P Parameter: Timepoint (hr) Value: 8
  misc_feature: MA Experiment 20000113 PARAMETER Experiment Name: At_42deg_Heat_cDNA_P Parameter: Tissue Value: Aerial
  misc_feature: MA Experiment ID: 20000144 Result: Down-regulated in Transcription
  misc_feature: MA Experiment 20000144 PARAMETER Experiment Name: At_42deg_Heat_cDNA_P Parameter: Temperature (deg C) Value: 42 vs. 22
  misc_feature: MA Experiment 20000144 PARAMETER Experiment Name: At_42deg_Heat_cDNA_P Parameter: Timepoint (hr) Value: 1
  misc_feature: MA Experiment 20000144 PARAMETER Experiment Name: At_42deg_Heat_cDNA_P Parameter: Tissue Value: Aerial
  misc_feature: MA Experiment ID: 20000171 Result: Down-regulated in Transcription
  misc_feature: MA Experiment 20000171 PARAMETER Experiment Name: At_42deg_Heat_P Parameter: Age (day) Value: 14
  misc_feature: MA Experiment 20000171 PARAMETER Experiment Name: At_42deg_Heat_P Parameter: Organism Value: A. thaliana
  misc_feature: MA Experiment 20000171 PARAMETER Experiment Name: At_42deg_Heat_P Parameter: Plant Line Value: WS
  misc_feature: MA Experiment 20000171 PARAMETER Experiment Name: At_42deg_Heat_P Parameter: Temperature (deg C) Value: 42 vs. 22
  misc_feature: MA Experiment 20000171 PARAMETER Experiment Name: At_42deg_Heat_P Parameter: Timepoint (hr) Value: 1
  misc_feature: MA Experiment 20000171 PARAMETER Experiment Name: At_42deg_Heat_P Parameter: Tissue Value: Aerial
  misc_feature: MA Experiment ID: 20000173 Result: Down-regulated in Transcription
  misc_feature: MA Experiment 20000173 PARAMETER Experiment Name: At_42deg_Heat_P Parameter: Age (day) Value: 14
  misc_feature: MA Experiment 20000173 PARAMETER Experiment Name: At_42deg_Heat_P Parameter: Organism Value: A. thaliana
  misc_feature: MA Experiment 20000173 PARAMETER Experiment Name: At_42deg_Heat_P Parameter: Plant Line Value: WS
  misc_feature: MA Experiment 20000173 PARAMETER Experiment Name: At_42deg_Heat_P Parameter: Temperature (deg C) Value: 42 vs. 22
  misc_feature: MA Experiment 20000173 PARAMETER Experiment Name: At_42deg_Heat_P Parameter: Timepoint (hr) Value: 6
  misc_feature: MA Experiment 20000173 PARAMETER Experiment Name: At_42deg_Heat_P Parameter: Tissue Value: Aerial
  misc_feature: MA Experiment ID: 20000184 Result: Down-regulated in Transcription
  misc_feature: MA Experiment 20000184 PARAMETER Experiment Name: At_Shoots__P Parameter: Age (day) Value: 7
  misc_feature: MA Experiment 20000184 PARAMETER Experiment Name: At_Shoots__P Parameter: Tissue Value: Shoots vs. Whole Plant
  misc_feature: MA Experiment ID: 20000213 Result: Up-regulated in Transcription
  misc_feature: MA Experiment 20000213 PARAMETER Experiment Name: At_4deg_Cold_P Parameter: Timepoint (hr) Value: 2
  misc_feature: MA Experiment ID: 20000227 Result: Down-regulated in Transcription
  misc_feature: MA Experiment 20000227 PARAMETER Experiment Name: At_Root-Tips-vs-Tops_P Parameter: Tissue Value: Root Tips vs. Root Tops
  misc_feature: MA Experiment ID: 20000438 Result: Down-regulated in Transcription
  misc_feature: MA Experiment 20000438 PARAMETER Experiment Name: At_Shoots__P Parameter: Age (day) Value: 14
  misc_feature: MA Experiment 20000438 PARAMETER Experiment Name: At_Shoots__P Parameter: Tissue Value: Shoots vs. Whole Plant
  misc_feature: MA Experiment ID: 20000495 Result: Down-regulated in Transcription
  misc_feature: MA Experiment 20000495 PARAMETER Experiment Name: At_Guard_Cells_P Parameter: Harvest Date Value: 8/2/2002
  misc_feature: MA Experiment 20000495 PARAMETER Experiment Name: At_Guard_Cells_P Parameter: Organism Value: A. thaliana
  misc_feature: MA Experiment 20000495 PARAMETER Experiment Name: At_Guard_Cells_P Parameter: Tissue Value: Guard Cells vs. Leaves
  misc_feature: MA Experiment ID: 20000794 Result: Up-regulated in Transcription
  misc_feature: MA Experiment 20000794 PARAMETER Experiment Name: At_Petals_P Parameter: Age (day) Value: 23-25 days
  misc_feature: MA Experiment 20000794 PARAMETER Experiment Name: At_Petals_P Parameter: Plant Line Value: WS
  misc_feature: MA Experiment 20000794 PARAMETER Experiment Name: At_Petals_P Parameter: Tissue Value: Petals vs. Whole plant
  misc_feature: MA Experiment ID: 20001557 Result: Up-regulated in Transcription
  misc_feature: MA Experiment 20001557 PARAMETER Experiment Name: At_Drought_Soil_Dry_P Parameter: Age (day) Value: 27
  misc_feature: MA Experiment 20001557 PARAMETER Experiment Name: At_Drought_Soil_Dry_P Parameter: Organism Value: A. thaliana
  misc_feature: MA Experiment 20001557 PARAMETER Experiment Name: At_Drought_Soil_Dry_P Parameter: Plant Line Value: WS
  misc_feature: MA Experiment 20001557 PARAMETER Experiment Name: At_Drought_Soil_Dry_P Parameter: Post Timepoint (hr) Value: 3
  misc_feature: MA Experiment 20001557 PARAMETER Experiment Name: At_Drought_Soil_Dry_P Parameter: Post-Treatment Value: Re-Water vs. No Drought
  misc_feature: MA Experiment 20001557 PARAMETER Experiment Name: At_Drought_Soil_Dry_P Parameter: Timepoint (day) Value: 13
  misc_feature: MA Experiment 20001557 PARAMETER Experiment Name: At_Drought_Soil_Dry_P Parameter: Treatment Value: Drought vs. No Drought
gctctttatctctctctccaactttacctttaacaaaaaaaaaatggcaagcgcgaatccagaaaccgccaaacccacgcctgcaacggtggacatggctaatccagaggagcttaagaaagttttcgaccagtttgactccaacggcgacggcaagatctcagtcctcgaactcggcggtgtgtttaaggctatggggacttcctacacagagacggaactcaaccgcgtgctcgaagaagtcgatacagatcgcgacggttacatcaacctcgacgaattctcaactctctgtcgctcgtcttcctccgccgcagagatccgtgacgctttcgatctctacgatcaggacaaaaacggactgatctccgcctctgagcttcaccaggtgcttaaccgtctcgggatgtcttgctctgttgaagactgtactcgtatgatcggacctgtggatgctgacggcgatgggaatgttaatttcgaagagtttcagaagatgatgacgtcgtcttctctcctcaacagcaatggatccgccgctcctccttcgacctagggagttttccagatttcagatctggatttcgggaataagaataactatggaaattaggtactcttttcttcttaaatgtgatcaatcatcatcagtctaacttcaatcggatctcttttcattcatacatggttgagatttagatctgaatatggatatatatcgtttgctctccttgttcaaaacaaatttggtttctaatttcttattctgcattctcgagttatgtatcagtttcgaactatatttgcatagaaacaaaaaccagattctctgcc

SEQ ID NO: 30875 - protein, 184 aa, Arabidopsis thaliana
  peptide (1)..(184): Ceres Seq. ID no. 13489265
  misc_feature (142)..(170): Pfam Name: EF hand Pfam Description: EF hand
  misc_feature (37)..(171): Homolog of NCBI NO: 15221781 NR Description: polcalcin (calcium-binding pollen allergen),
  misc_feature (32)..(167): Homolog of NCBI NO: 21618074 NR Description: calmodulin-related protein [Arabidopsis thaliana]
  misc_feature (32)..(167): Homolog of NCBI NO: 18408502 NR Description: calmodulin-related protein, putative [Arabidopsis
  misc_feature (36)..(174): Homolog of NCBI NO: 13397927 NR Description: putative calmodulin-related protein [Medicago
  misc_feature (15)..(182): Homolog of NCBI NO: 6901654 NR Description: calcium-binding protein [Olea europaea]
  misc_feature (15)..(182): Homolog of NCBI NO: 14423648 NR Description: Calcium-binding allergen Ole e 8 (PCA18/PCA23)
  misc_feature (6)..(171): Homolog of NCBI NO: 14589311 NR Description: calcium binding protein [Sesbania rostrata]
  misc_feature (37)..(173): Homolog of NCBI NO: 21618025 NR Description: putative calmodulin [Arabidopsis thaliana]
  misc_feature (15)..(173): Homolog of NCBI NO: 15219514 NR Description: calcium-binding protein, putative [Arabidopsis
  misc_feature (15)..(184): Homolog of NCBI NO: 15221030 NR Description: calcium-binding protein, putative [Arabidopsis
LFISLSNFTFNKKKMASANPETAKPTPATVDMANPEELKKVFDQFDSNGDGKISVLELGGVFKAMGTSYTETELNRVLEEVDTDRDGYINLDEFSTLCRSSSSAAEIRDAFDLYDQDKNGLISASELHQVLNRLGMSCSVEDCTRMIGPVDADGDGNVNFEEFQKMMTSSSLLNSNGSAAPPST

SEQ ID NO: 30876 - protein, 170 aa, Arabidopsis thaliana
  peptide (1)..(170): Ceres Seq. ID no. 13489266
  misc_feature (128)..(156): Pfam Name: EF hand Pfam Description: EF hand
  misc_feature (23)..(157): Homolog of NCBI NO: 15221781 NR Description: polcalcin (calcium-binding pollen allergen),
  misc_feature (18)..(153): Homolog of NCBI NO: 21618074 NR Description: calmodulin-related protein [Arabidopsis thaliana]
  misc_feature (18)..(153): Homolog of NCBI NO: 18408502 NR Description: calmodulin-related protein, putative [Arabidopsis
  misc_feature (22)..(160): Homolog of NCBI NO: 13397927 NR Description: putative calmodulin-related protein [Medicago
  misc_feature (1)..(168): Homolog of NCBI NO: 6901654 NR Description: calcium-binding protein [Olea europaea]
  misc_feature (1)..(168): Homolog of NCBI NO: 14423648 NR Description: Calcium-binding allergen Ole e 8 (PCA18/PCA23)
  misc_feature (1)..(157): Homolog of NCBI NO: 14589311 NR Description: calcium binding protein [Sesbania rostrata]
  misc_feature (23)..(159): Homolog of NCBI NO: 21618025 NR Description: putative calmodulin [Arabidopsis thaliana]
  misc_feature (1)..(159): Homolog of NCBI NO: 15219514 NR Description: calcium-binding protein, putative [Arabidopsis
  misc_feature (1)..(170): Homolog of NCBI NO: 15221030 NR Description: calcium-binding protein, putative [Arabidopsis
MASANPETAKPTPATVDMANPEELKKVFDQFDSNGDGKISVLELGGVFKAMGTSYTETELNRVLEEVDTDRDGYINLDEFSTLCRSSSSAAEIRDAFDLYDQDKNGLISASELHQVLNRLGMSCSVEDCTRMIGPVDADGDGNVNFEEFQKMMTSSSLLNSNGSAAPPST

SEQ ID NO: 30877 - protein, 153 aa, Arabidopsis thaliana
  peptide (1)..(153): Ceres Seq. ID no. 13489267
  misc_feature (111)..(139): Pfam Name: EF hand Pfam Description: EF hand
  misc_feature (6)..(140): Homolog of NCBI NO: 15221781 NR Description: polcalcin (calcium-binding pollen allergen),
  misc_feature (1)..(136): Homolog of NCBI NO: 21618074 NR Description: calmodulin-related protein [Arabidopsis thaliana]
  misc_feature (1)..(136): Homolog of NCBI NO: 18408502 NR Description: calmodulin-related protein, putative [Arabidopsis
  misc_feature (5)..(143): Homolog of NCBI NO: 13397927 NR Description: putative calmodulin-related protein [Medicago
  misc_feature (1)..(151): Homolog of NCBI NO: 6901654 NR Description: calcium-binding protein [Olea europaea]
  misc_feature (1)..(151): Homolog of NCBI NO: 14423648 NR Description: Calcium-binding allergen Ole e 8 (PCA18/PCA23)
  misc_feature (1)..(140): Homolog of NCBI NO: 14589311 NR Description: calcium binding protein [Sesbania rostrata]
  misc_feature (6)..(142): Homolog of NCBI NO: 21618025 NR Description: putative calmodulin [Arabidopsis thaliana]
  misc_feature (1)..(142): Homolog of NCBI NO: 15219514 NR Description: calcium-binding protein, putative [Arabidopsis
  misc_feature (1)..(153): Homolog of NCBI NO: 15221030 NR Description: calcium-binding protein, putative [Arabidopsis
MANPEELKKVFDQFDSNGDGKISVLELGGVFKAMGTSYTETELNRVLEEVDTDRDGYINLDEFSTLCRSSSSAAEIRDAFDLYDQDKNGLISASELHQVLNRLGMSCSVEDCTRMIGPVDADGDGNVNFEEFQKMMTSSSLLNSNGSAAPPST

SEQ ID NO: 30878 - DNA, 806 bp, Arabidopsis thaliana
  misc_feature (1)..(806): Ceres Seq. ID no. 12332172
  misc_feature: MA Experiment ID: 108434 Result: Down-regulated in Transcription
  misc_feature: MA Experiment 108434 PARAMETER Experiment Name: At_Root_Tips_cDNA_P Parameter: Tissue Value: Root Tips
  misc_feature: MA Experiment ID: 108462 Result: Up-regulated in Transcription
  misc_feature: MA Experiment 108462 PARAMETER Experiment Name: At_Germinating_Seeds_cDNA_P Parameter: Age (day) Value: 2 vs. 0
  misc_feature: MA Experiment 108462 PARAMETER Experiment Name: At_Germinating_Seeds_cDNA_P Parameter: Tissue Value: Germinating Seeds
  misc_feature: MA Experiment ID: 108463 Result: Up-regulated in Transcription
  misc_feature: MA Experiment 108463 PARAMETER Experiment Name: At_Germinating_Seeds_cDNA_P Parameter: Age (day) Value: 3 vs. 0
  misc_feature: MA Experiment 108463 PARAMETER Experiment Name: At_Germinating_Seeds_cDNA_P Parameter: Tissue Value: Germinating Seeds
  misc_feature: MA Experiment ID: 108464 Result: Up-regulated in Transcription
  misc_feature: MA Experiment 108464 PARAMETER Experiment Name: At_Germinating_Seeds_cDNA_P Parameter: Age (day) Value: 4 vs. 0
  misc_feature: MA Experiment 108464 PARAMETER Experiment Name: At_Germinating_Seeds_cDNA_P Parameter: Tissue Value: Germinating Seeds
  misc_feature: MA Experiment ID: 108569 Result: Up-regulated in Transcription
  misc_feature: MA Experiment 108569 PARAMETER Experiment Name: At_0.001%_MeJA__cDNA_P Parameter: Timepoint (hr) Value: 6
  misc_feature: MA Experiment 108569 PARAMETER Experiment Name: At_0.001%_MeJA__cDNA_P Parameter: Tissue Value: Aerial
  misc_feature: MA Experiment 108569 PARAMETER Experiment Name: At_0.001%_MeJA__cDNA_P Parameter: Treatment Value: 0.001% MeJA vs. No Treatment
  misc_feature: MA Experiment ID: 108605 Result: Down-regulated in Transcription
  misc_feature: MA Experiment 108605 PARAMETER Experiment Name: At_100uM_ABA_cDNA_P Parameter: Timepoint (hr) Value: 6
  misc_feature: MA Experiment 108605 PARAMETER Experiment Name: At_100uM_ABA_cDNA_P Parameter: Tissue Value: Aerial
  misc_feature: MA Experiment 108605 PARAMETER Experiment Name: At_100uM_ABA_cDNA_P Parameter: Treatment Value: 100uM ABA vs. No Treatment
  misc_feature: MA Experiment ID: 20000069 Result: Down-regulated in Transcription
  misc_feature: MA Experiment 20000069 PARAMETER Experiment Name: At_100uM_ABA_Mutants_cDNA_P Parameter: Plant Line Value: CS23
  misc_feature: MA Experiment 20000069 PARAMETER Experiment Name: At_100uM_ABA_Mutants_cDNA_P Parameter: Timepoint (hr) Value: 6
  misc_feature: MA Experiment 20000069 PARAMETER Experiment Name: At_100uM_ABA_Mutants_cDNA_P Parameter: Tissue Value: Aerial
  misc_feature: MA Experiment 20000069 PARAMETER Experiment Name: At_100uM_ABA_Mutants_cDNA_P Parameter: Treatment Value: 100uM ABA vs. No Treatment
  misc_feature: MA Experiment ID: 20000070 Result: Down-regulated in Transcription
  misc_feature: MA Experiment 20000070 PARAMETER Experiment Name: At_100uM_ABA_Mutants_cDNA_P Parameter: Plant Line Value: CS24
  misc_feature: MA Experiment 20000070 PARAMETER Experiment Name: At_100uM_ABA_Mutants_cDNA_P Parameter: Timepoint (hr) Value: 6
  misc_feature: MA Experiment 20000070 PARAMETER Experiment Name: At_100uM_ABA_Mutants_cDNA_P Parameter: Tissue Value: Aerial
  misc_feature: MA Experiment 20000070 PARAMETER Experiment Name: At_100uM_ABA_Mutants_cDNA_P Parameter: Treatment Value: 100uM ABA vs. No Treatment
  misc_feature: MA Experiment ID: 20000071 Result: Down-regulated in Transcription
  misc_feature: MA Experiment 20000071 PARAMETER Experiment Name: At_100uM_ABA_Mutants_cDNA_P Parameter: Plant Line Value: CS8104
  misc_feature: MA Experiment 20000071 PARAMETER Experiment Name: At_100uM_ABA_Mutants_cDNA_P Parameter: Timepoint (hr) Value: 6
  misc_feature: MA Experiment 20000071 PARAMETER Experiment Name: At_100uM_ABA_Mutants_cDNA_P Parameter: Tissue Value: Aerial
  misc_feature: MA Experiment 20000071 PARAMETER Experiment Name: At_100uM_ABA_Mutants_cDNA_P Parameter: Treatment Value: 100uM ABA vs. No Treatment
  misc_feature: MA Experiment ID: 20000086 Result: Down-regulated in Transcription
  misc_feature: MA Experiment 20000086 PARAMETER Experiment Name: At_100uM_ABA_Mutants_cDNA_P Parameter: Plant Line Value: CS22
  misc_feature: MA Experiment 20000086 PARAMETER Experiment Name: At_100uM_ABA_Mutants_cDNA_P Parameter: Timepoint (hr) Value: 6
  misc_feature: MA Experiment 20000086 PARAMETER Experiment Name: At_100uM_ABA_Mutants_cDNA_P Parameter: Tissue Value: Aerial
  misc_feature: MA Experiment 20000086 PARAMETER Experiment Name: At_100uM_ABA_Mutants_cDNA_P Parameter: Treatment Value: 100uM ABA vs. No Treatment
  misc_feature: MA Experiment ID: 20000087 Result: Down-regulated in Transcription
  misc_feature: MA Experiment 20000087 PARAMETER Experiment Name: At_100uM_ABA_Mutants_cDNA_P Parameter: Plant Line Value: WS
  misc_feature: MA Experiment 20000087 PARAMETER Experiment Name: At_100uM_ABA_Mutants_cDNA_P Parameter: Timepoint (hr) Value: 6
  misc_feature: MA Experiment 20000087 PARAMETER Experiment Name: At_100uM_ABA_Mutants_cDNA_P Parameter: Tissue Value: Aerial
  misc_feature: MA Experiment 20000087 PARAMETER Experiment Name: At_100uM_ABA_Mutants_cDNA_P Parameter: Treatment Value: 100uM ABA vs. No Treatment
  misc_feature: MA Experiment ID: 20000089 Result: Down-regulated in Transcription
  misc_feature: MA Experiment ID: 20000111 Result: Down-regulated in Transcription
  misc_feature: MA Experiment 20000111 PARAMETER Experiment Name: At_42deg_Heat_cDNA_P Parameter: Temperature (deg C) Value: 42 vs. 22
  misc_feature: MA Experiment 20000111 PARAMETER Experiment Name: At_42deg_Heat_cDNA_P Parameter: Timepoint (hr) Value: 6
  misc_feature: MA Experiment 20000111 PARAMETER Experiment Name: At_42deg_Heat_cDNA_P Parameter: Tissue Value: Aerial
  misc_feature: MA Experiment ID: 20000112 Result: Down-regulated in Transcription
  misc_feature: MA Experiment 20000112 PARAMETER Experiment Name: At_42deg_Heat_cDNA_P Parameter: Temperature (deg C) Value: 42 vs. 22
  misc_feature: MA Experiment 20000112 PARAMETER Experiment Name: At_42deg_Heat_cDNA_P Parameter: Timepoint (hr) Value: 2
  misc_feature: MA Experiment 20000112 PARAMETER Experiment Name: At_42deg_Heat_cDNA_P Parameter: Tissue Value: Aerial
  misc_feature: MA Experiment ID: 20000113 Result: Down-regulated in Transcription
  misc_feature: MA Experiment 20000113 PARAMETER Experiment Name: At_42deg_Heat_cDNA_P Parameter: Temperature (deg C) Value: 42 vs. 22
  misc_feature: MA Experiment 20000113 PARAMETER Experiment Name: At_42deg_Heat_cDNA_P Parameter: Timepoint (hr) Value: 8
  misc_feature: MA Experiment 20000113 PARAMETER Experiment Name: At_42deg_Heat_cDNA_P Parameter: Tissue Value: Aerial
  misc_feature: MA Experiment ID: 20000117 Result: Down-regulated in Transcription
  misc_feature: MA Experiment 20000117 PARAMETER Experiment Name: At_100uM_ABA_Mutants_cDNA_P Parameter: Plant Line Value: Columbia
  misc_feature: MA Experiment 20000117 PARAMETER Experiment Name: At_100uM_ABA_Mutants_cDNA_P Parameter: Timepoint (hr) Value: 6
  misc_feature: MA Experiment 20000117 PARAMETER Experiment Name: At_100uM_ABA_Mutants_cDNA_P Parameter: Tissue Value: Aerial
  misc_feature: MA Experiment 20000117 PARAMETER Experiment Name: At_100uM_ABA_Mutants_cDNA_P Parameter: Treatment Value: 100uM ABA vs. No Treatment
  misc_feature: MA Experiment ID: 20000144 Result: Down-regulated in Transcription
  misc_feature: MA Experiment 20000144 PARAMETER Experiment Name: At_42deg_Heat_cDNA_P Parameter: Temperature (deg C) Value: 42 vs. 22
  misc_feature: MA Experiment 20000144 PARAMETER Experiment Name: At_42deg_Heat_cDNA_P Parameter: Timepoint (hr) Value: 1
  misc_feature: MA Experiment 20000144 PARAMETER Experiment Name: At_42deg_Heat_cDNA_P Parameter: Tissue Value: Aerial
  misc_feature: MA Experiment ID: 20000286 Result: Up-regulated in Transcription
  misc_feature: MA Experiment 20000286 PARAMETER Experiment Name: At_Open_Flower_P Parameter: Age (day) Value: 21
  misc_feature: MA Experiment 20000286 PARAMETER Experiment Name: At_Open_Flower_P Parameter: Plant Line Value: WS
  misc_feature: MA Experiment 20000286 PARAMETER Experiment Name: At_Open_Flower_P Parameter: Tissue Value: Half Open vs. Whole Plant
  misc_feature: MA Experiment ID: 20000438 Result: Up-regulated in Transcription
  misc_feature: MA Experiment 20000438 PARAMETER Experiment Name: At_Shoots__P Parameter: Age (day) Value: 14
  misc_feature: MA Experiment 20000438 PARAMETER Experiment Name: At_Shoots__P Parameter: Tissue Value: Shoots vs. Whole Plant
  misc_feature: MA Experiment ID: 20000439 Result: Up-regulated in Transcription
  misc_feature: MA Experiment 20000439 PARAMETER Experiment Name: At_Roots__P Parameter: Age (day) Value: 14 vs. 21
  misc_feature: MA Experiment 20000439 PARAMETER Experiment Name: At_Roots__P Parameter: Organism Value: A. thaliana
  misc_feature: MA Experiment 20000439 PARAMETER Experiment Name: At_Roots__P Parameter: Tissue Value: Roots vs. Whole Plant
  misc_feature: MA Experiment ID: 20000495 Result: Down-regulated in Transcription
  misc_feature: MA Experiment 20000495 PARAMETER Experiment Name: At_Guard_Cells_P Parameter: Harvest Date Value: 8/2/2002
  misc_feature: MA Experiment 20000495 PARAMETER Experiment Name: At_Guard_Cells_P Parameter: Organism Value: A. thaliana
  misc_feature: MA Experiment 20000495 PARAMETER Experiment Name: At_Guard_Cells_P Parameter: Tissue Value: Guard Cells vs. Leaves
  misc_feature: MA Experiment ID: 20001248 Result: Down-regulated in Transcription
  misc_feature: MA Experiment 20001248 PARAMETER Experiment Name: At_Far-red-induction_P Parameter: Age (day) Value: 7
  misc_feature: MA Experiment 20001248 PARAMETER Experiment Name: At_Far-red-induction_P Parameter: Light Value: Far-red vs. White
  misc_feature: MA Experiment 20001248 PARAMETER Experiment Name: At_Far-red-induction_P Parameter: Organism Value: A. thaliana
  misc_feature: MA Experiment 20001248 PARAMETER Experiment Name: At_Far-red-induction_P Parameter: Plant Line Value: Columbia
  misc_feature: MA Experiment 20001248 PARAMETER Experiment Name: At_Far-red-induction_P Parameter: Timepoint (hr) Value: 4
  misc_feature: MA Experiment 20001248 PARAMETER Experiment Name: At_Far-red-induction_P Parameter: Tissue Value: Whole Plant
  misc_feature: MA Experiment ID: 20001450 Result: Down-regulated in Transcription
  misc_feature: MA Experiment 20001450 PARAMETER Experiment Name: At_Far-red-induction_P Parameter: Age (day) Value: 7
  misc_feature: MA Experiment 20001450 PARAMETER Experiment Name: At_Far-red-induction_P Parameter: Light Value: Far-red vs. White
  misc_feature: MA Experiment 20001450 PARAMETER Experiment Name: At_Far-red-induction_P Parameter: Organism Value: A. thaliana
  misc_feature: MA Experiment 20001450 PARAMETER Experiment Name: At_Far-red-induction_P Parameter: Plant Line Value: Columbia
  misc_feature: MA Experiment 20001450 PARAMETER Experiment Name: At_Far-red-induction_P Parameter: Timepoint (hr) Value: 8
  misc_feature: MA Experiment 20001450 PARAMETER Experiment Name: At_Far-red-induction_P Parameter: Tissue Value: Whole Plant
  misc_feature: MA Experiment ID: 20001451 Result: Down-regulated in Transcription
  misc_feature: MA Experiment 20001451 PARAMETER Experiment Name: At_Far-red-induction_P Parameter: Age (day) Value: 7
  misc_feature: MA Experiment 20001451 PARAMETER Experiment Name: At_Far-red-induction_P Parameter: Light Value: Far-red vs. White
  misc_feature: MA Experiment 20001451 PARAMETER Experiment Name: At_Far-red-induction_P Parameter: Organism Value: A. thaliana
  misc_feature: MA Experiment 20001451 PARAMETER Experiment Name: At_Far-red-induction_P Parameter: Plant Line Value: Columbia
  misc_feature: MA Experiment 20001451 PARAMETER Experiment Name: At_Far-red-induction_P Parameter: Timepoint (hr) Value: 24
  misc_feature: MA Experiment 20001451 PARAMETER Experiment Name: At_Far-red-induction_P Parameter: Tissue Value: Whole Plant
  misc_feature: MA Experiment ID: 20001906 Result: Down-regulated in Transcription
  misc_feature: MA Experiment 20001906 PARAMETER Experiment Name: At_Drought_Reproduction_P Parameter: Age (day) Value: 35
  misc_feature: MA Experiment 20001906 PARAMETER Experiment Name: At_Drought_Reproduction_P Parameter: Organism Value: A. thaliana
  misc_feature: MA Experiment 20001906 PARAMETER Experiment Name: At_Drought_Reproduction_P Parameter: Plant Line Value: WS
  misc_feature: MA Experiment 20001906 PARAMETER Experiment Name: At_Drought_Reproduction_P Parameter: Timepoint (day) Value: 5
  misc_feature: MA Experiment 20001906 PARAMETER Experiment Name: At_Drought_Reproduction_P Parameter: Tissue Value: Siliques
  misc_feature: MA Experiment 20001906 PARAMETER Experiment Name: At_Drought_Reproduction_P Parameter: Treatment Value: Drought vs. No Drought
  misc_feature: MA Experiment ID: 20001911 Result: Down-regulated in Transcription
  misc_feature: MA Experiment 20001911 PARAMETER Experiment Name: At_Drought_Reproduction_P Parameter: Age (day) Value: 40
  misc_feature: MA Experiment 20001911 PARAMETER Experiment Name: At_Drought_Reproduction_P Parameter: Organism Value: A. thaliana
  misc_feature: MA Experiment 20001911 PARAMETER Experiment Name: At_Drought_Reproduction_P Parameter: Plant Line Value: WS
  misc_feature: MA Experiment 20001911 PARAMETER Experiment Name: At_Drought_Reproduction_P Parameter: Timepoint (day) Value: 10
  misc_feature: MA Experiment 20001911 PARAMETER Experiment Name: At_Drought_Reproduction_P Parameter: Tissue Value: Flowers
  misc_feature: MA Experiment 20001911 PARAMETER Experiment Name: At_Drought_Reproduction_P Parameter: Treatment Value: Drought vs. No Drought
  misc_feature: Phenotype: FERTILITY Fertility-Reduced
  misc_feature: Phenotype: ROSETTE LEAVES Other
  misc_feature: Phenotype: WHOLE PLANT Other
  misc_feature: Phenotype: FERTILITY Fertility-Reduced
  misc_feature: Phenotype: WHOLE PLANT Other
  misc_feature: Phenotype: ROSETTE LEAVES Shape-Serrate
  misc_feature: Phenotype: WHOLE PLANT Other
cacacatacatcttctccatccattacacaacgaagcatagtggcaaacccgtaaatacataataccaatgacgaccaaagattgcggaaaccacggcggcggcggaggaggaggaaccgccagtcgaatctgcggagtaatcatcggcttcatcatcatcgtcttgataacaatattcctcgtttggataatcctccaaccgacaaaaccaagattcatcctccaagacgccaccgtctacgcctttaatctctcgcagcctaacctcctcacctcaaactttcagatcacgatcgcttcacgtaaccgaaactcaagaatcggaatctactacgaccgtcttcacgtctacgctacttaccggaaccaacaaatcactctacgtacagcaattcctccgacgtaccaaggccataaagaagacaacgtttggtctcctttcgtttatggaaactccgtccctatcgctcctttcaacgccgtggctctcggcgacgagcagaatcgtgggtttgtcacgttgattatacgcgccgatggacgcgtgaggtggaaggtcgggactcttattacagggaagtatcatctccatgttcgttgtcaggcgttcataaatctggctgataaagccgccggagttcatgtcggcgaaaacgccgtcaagtacatgttgatcaataagtgcagtgtcaatgtttagtaggtaaaatgacacaactttgacgccgtcaatgtttgcattcttcttcttttcatttttcttctacttggataatgtttttgcttcaatatcgtttaatttgtc

SEQ ID NO: 30879 - protein, 210 aa, Arabidopsis thaliana
  peptide (1)..(210): Ceres Seq. ID no. 12332173
  misc_feature (20)..(194): Homolog of NCBI NO: 38344036 NR Description: OJ991214_12.17 [Oryza sativa (japonica
  misc_feature (1)..(210): Homolog of NCBI NO: 22326984 NR Description: similar to hairpin-induced protein, putative
  misc_feature (1)..(210): Homolog of NCBI NO: 15229906 NR Description: hairpin-induced protein, putative (HIN1); protein
  misc_feature (1)..(210): Homolog of NCBI NO: 15240001 NR Description: hairpin-induced protein, putative (HIN1); protein
  misc_feature (4)..(210): Homolog of NCBI NO: 28392929 NR Description: putative VAMP protein SEC22 [Arabidopsis thaliana]
  misc_feature (4)..(210): Homolog of NCBI NO: 18399308 NR Description: VAMP protein SEC22
  misc_feature (3)..(210): Homolog of NCBI NO: 15231227 NR Description: hairpin-induced protein, putative (HIN1)
  misc_feature (1)..(209): Homolog of NCBI NO: 15227540 NR Description: hairpin-induced protein, putative (HIN1); protein
  misc_feature (1)..(209): Homolog of NCBI NO: 15233951 NR Description: hairpin-induced protein, putative (HIN1); protein
  misc_feature (1)..(210): Homolog of NCBI NO: 15227538 NR Description: hairpin-induced protein, putative (HIN1)
MTTKDCGNHGGGGGGGTASRICGVIIGFIIIVLITIFLVWIILQPTKPRFILQDATVYAFNLSQPNLLTSNFQITIASRNRNSRIGIYYDRLHVYATYRNQQITLRTAIPPTYQGHKEDNVWSPFVYGNSVPIAPFNAVALGDEQNRGFVTLIIRADGRVRWKVGTLITGKYHLHVRCQAFINLADKAAGVHVGENAVKYMLINKCSVNV

SEQ ID NO: 30880 - DNA, 1407 bp, Arabidopsis thaliana
  misc_feature (1)..(1407): Ceres Seq. ID no. 13486967
  misc_feature: MA Experiment ID: 108434 Result: Down-regulated in Transcription
  misc_feature: MA Experiment 108434 PARAMETER Experiment Name: At_Root_Tips_cDNA_P Parameter: Tissue Value: Root Tips
  misc_feature: MA Experiment ID: 108463 Result: Up-regulated in Transcription
  misc_feature: MA Experiment 108463 PARAMETER Experiment Name: At_Germinating_Seeds_cDNA_P Parameter: Age (day) Value: 3 vs. 0
  misc_feature: MA Experiment 108463 PARAMETER Experiment Name: At_Germinating_Seeds_cDNA_P Parameter: Tissue Value: Germinating Seeds
  misc_feature: MA Experiment ID: 108488 Result: Down-regulated in Transcription
  misc_feature: MA Experiment ID: 108572 Result: Up-regulated in Transcription
  misc_feature: MA Experiment 108572 PARAMETER Experiment Name: At_Drought_cDNA_P Parameter: Timepoint (hr) Value: 1
  misc_feature: MA Experiment 108572 PARAMETER Experiment Name: At_Drought_cDNA_P Parameter: Tissue Value: Aerial
  misc_feature: MA Experiment 108572 PARAMETER Experiment Name: At_Drought_cDNA_P Parameter: Treatment Value: Drought vs. No Drought
  misc_feature: MA Experiment ID: 108573 Result: Up-regulated in Transcription
  misc_feature: MA Experiment 108573 PARAMETER Experiment Name: At_Drought_cDNA_P Parameter: Timepoint (hr) Value: 6
  misc_feature: MA Experiment 108573 PARAMETER Experiment Name: At_Drought_cDNA_P Parameter: Tissue Value: Aerial
  misc_feature: MA Experiment 108573 PARAMETER Experiment Name: At_Drought_cDNA_P Parameter: Treatment Value: Drought vs. No Drought
  misc_feature: MA Experiment ID: 108576 Result: Up-regulated in Transcription
  misc_feature: MA Experiment 108576 PARAMETER Experiment Name: At_42deg_Heat_cDNA_P Parameter: Temperature (deg C) Value: 42 vs. 22
  misc_feature: MA Experiment 108576 PARAMETER Experiment Name: At_42deg_Heat_cDNA_P Parameter: Timepoint (hr) Value: 1
  misc_feature: MA Experiment 108576 PARAMETER Experiment Name: At_42deg_Heat_cDNA_P Parameter: Tissue Value: Aerial
  misc_feature: MA Experiment ID: 108594 Result: Down-regulated in Transcription
  misc_feature: MA Experiment 108594 PARAMETER Experiment Name: At_Ler-rhl_Root_cDNA_P Parameter: Plant Line Value: null
  misc_feature: MA Experiment ID: 108605 Result: Up-regulated in Transcription
  misc_feature: MA Experiment 108605 PARAMETER Experiment Name: At_100uM_ABA_cDNA_P Parameter: Timepoint (hr) Value: 6
  misc_feature: MA Experiment 108605 PARAMETER Experiment Name: At_100uM_ABA_cDNA_P Parameter: Tissue Value: Aerial
  misc_feature: MA Experiment 108605 PARAMETER Experiment Name: At_100uM_ABA_cDNA_P Parameter: Treatment Value: 100uM ABA vs. No Treatment
  misc_feature: MA Experiment ID: 108607 Result: Up-regulated in Transcription
  misc_feature: MA Experiment 108607 PARAMETER Experiment Name: At_100uM_ABA_cDNA_P Parameter: Timepoint (hr) Value: 4
  misc_feature: MA Experiment 108607 PARAMETER Experiment Name: At_100uM_ABA_cDNA_P Parameter: Tissue Value: Aerial
  misc_feature: MA Experiment 108607 PARAMETER Experiment Name: At_100uM_ABA_cDNA_P Parameter: Treatment Value: 100uM ABA vs. No Treatment
  misc_feature: MA Experiment ID: 108608 Result: Up-regulated in Transcription
  misc_feature: MA Experiment 108608 PARAMETER Experiment Name: At_100uM_ABA_cDNA_P Parameter: Timepoint (hr) Value: 1
  misc_feature: MA Experiment 108608 PARAMETER Experiment Name: At_100uM_ABA_cDNA_P Parameter: Tissue Value: Aerial
  misc_feature: MA Experiment 108608 PARAMETER Experiment Name: At_100uM_ABA_cDNA_P Parameter: Treatment Value: 100uM ABA vs. No Treatment
  misc_feature: MA Experiment ID: 108668 Result: Up-regulated in Transcription
  misc_feature: MA Experiment 108668 PARAMETER Experiment Name: At_2mM_SA_cDNA_P Parameter: Plant Line Value: WS
  misc_feature: MA Experiment 108668 PARAMETER Experiment Name: At_2mM_SA_cDNA_P Parameter: Timepoint (hr) Value: 6
  misc_feature: MA Experiment 108668 PARAMETER Experiment Name: At_2mM_SA_cDNA_P Parameter: Treatment Value: 2mM SA vs. No Treatment
  misc_feature: MA Experiment ID: 20000070 Result: Up-regulated in Transcription
  misc_feature: MA Experiment 20000070 PARAMETER Experiment Name: At_100uM_ABA_Mutants_cDNA_P Parameter: Plant Line Value: CS24
  misc_feature: MA Experiment 20000070 PARAMETER Experiment Name: At_100uM_ABA_Mutants_cDNA_P Parameter: Timepoint (hr) Value: 6
  misc_feature: MA Experiment 20000070 PARAMETER Experiment Name: At_100uM_ABA_Mutants_cDNA_P Parameter: Tissue Value: Aerial
  misc_feature: MA Experiment 20000070 PARAMETER Experiment Name: At_100uM_ABA_Mutants_cDNA_P Parameter: Treatment Value: 100uM ABA vs. No Treatment
  misc_feature: MA Experiment ID: 20000071 Result: Up-regulated in Transcription
  misc_feature: MA Experiment 20000071 PARAMETER Experiment Name: At_100uM_ABA_Mutants_cDNA_P Parameter: Plant Line Value: CS8104
  misc_feature: MA Experiment 20000071 PARAMETER Experiment Name: At_100uM_ABA_Mutants_cDNA_P Parameter: Timepoint (hr) Value: 6
  misc_feature: MA Experiment 20000071 PARAMETER Experiment Name: At_100uM_ABA_Mutants_cDNA_P Parameter: Tissue Value: Aerial
  misc_feature: MA Experiment 20000071 PARAMETER Experiment Name: At_100uM_ABA_Mutants_cDNA_P Parameter: Treatment Value: 100uM ABA vs. No Treatment
  misc_feature: MA Experiment ID: 20000072 Result: Up-regulated in Transcription
  misc_feature: MA Experiment 20000072 PARAMETER Experiment Name: At_100uM_ABA_Mutants_cDNA_P Parameter: Plant Line Value: CS8105
  misc_feature: MA Experiment 20000072 PARAMETER Experiment Name: At_100uM_ABA_Mutants_cDNA_P Parameter: Timepoint (hr) Value: 6
  misc_feature: MA Experiment 20000072 PARAMETER Experiment Name: At_100uM_ABA_Mutants_cDNA_P Parameter: Tissue Value: Aerial
  misc_feature: MA Experiment 20000072 PARAMETER Experiment Name: At_100uM_ABA_Mutants_cDNA_P Parameter: Treatment Value: 100uM ABA vs. No Treatment
  misc_feature: MA Experiment ID: 20000088 Result: Up-regulated in Transcription
  misc_feature: MA Experiment 20000088 PARAMETER Experiment Name: At_100uM_ABA_Mutants_cDNA_P Parameter: Plant Line Value: Landsberg
  misc_feature: MA Experiment 20000088 PARAMETER Experiment Name: At_100uM_ABA_Mutants_cDNA_P Parameter: Timepoint (hr) Value: 6
  misc_feature: MA Experiment 20000088 PARAMETER Experiment Name: At_100uM_ABA_Mutants_cDNA_P Parameter: Tissue Value: Aerial
  misc_feature: MA Experiment 20000088 PARAMETER Experiment Name: At_100uM_ABA_Mutants_cDNA_P Parameter: Treatment Value: 100uM ABA vs. No Treatment
  misc_feature: MA Experiment ID: 20000093 Result: Up-regulated in Transcription
  misc_feature: MA Experiment 20000093 PARAMETER Experiment Name: At_42deg_Heat_cDNA_P Parameter: Temperature (deg C) Value: 42 vs. 22
  misc_feature: MA Experiment 20000093 PARAMETER Experiment Name: At_42deg_Heat_cDNA_P Parameter: Timepoint (hr) Value: 0.5
  misc_feature: MA Experiment 20000093 PARAMETER Experiment Name: At_42deg_Heat_cDNA_P Parameter: Tissue Value: Aerial
  misc_feature: MA Experiment ID: 20000111 Result: Up-regulated in Transcription
  misc_feature: MA Experiment 20000111 PARAMETER Experiment Name: At_42deg_Heat_cDNA_P Parameter: Temperature (deg C) Value: 42 vs. 22
  misc_feature: MA Experiment 20000111 PARAMETER Experiment Name: At_42deg_Heat_cDNA_P Parameter: Timepoint (hr) Value: 6
  misc_feature: MA Experiment 20000111 PARAMETER Experiment Name: At_42deg_Heat_cDNA_P Parameter: Tissue Value: Aerial
  misc_feature: MA Experiment ID: 20000112 Result: Up-regulated in Transcription
  misc_feature: MA Experiment 20000112 PARAMETER Experiment Name: At_42deg_Heat_cDNA_P Parameter: Temperature (deg C) Value: 42 vs. 22
  misc_feature: MA Experiment 20000112 PARAMETER Experiment Name: At_42deg_Heat_cDNA_P Parameter: Timepoint (hr) Value: 2
  misc_feature: MA Experiment 20000112 PARAMETER Experiment Name: At_42deg_Heat_cDNA_P Parameter: Tissue Value: Aerial
  misc_feature: MA Experiment ID: 20000113 Result: Up-regulated in Transcription
  misc_feature: MA Experiment 20000113 PARAMETER Experiment Name: At_42deg_Heat_cDNA_P Parameter: Temperature (deg C) Value: 42 vs. 22
  misc_feature: MA Experiment 20000113 PARAMETER Experiment Name: At_42deg_Heat_cDNA_P Parameter: Timepoint (hr) Value: 8
  misc_feature: MA Experiment 20000113 PARAMETER Experiment Name: At_42deg_Heat_cDNA_P Parameter: Tissue Value: Aerial
  misc_feature: MA Experiment ID: 20000117 Result: Up-regulated in Transcription
  misc_feature: MA Experiment 20000117 PARAMETER Experiment Name: At_100uM_ABA_Mutants_cDNA_P Parameter: Plant Line Value: Columbia
  misc_feature: MA Experiment 20000117 PARAMETER Experiment Name: At_100uM_ABA_Mutants_cDNA_P Parameter: Timepoint (hr) Value: 6
  misc_feature: MA Experiment 20000117 PARAMETER Experiment Name: At_100uM_ABA_Mutants_cDNA_P Parameter: Tissue Value: Aerial
  misc_feature: MA Experiment 20000117 PARAMETER Experiment Name: At_100uM_ABA_Mutants_cDNA_P Parameter: Treatment Value: 100uM ABA vs. No Treatment
  misc_feature: MA Experiment ID: 20000144 Result: Up-regulated in Transcription
  misc_feature: MA Experiment 20000144 PARAMETER Experiment Name: At_42deg_Heat_cDNA_P Parameter: Temperature (deg C) Value: 42 vs. 22
  misc_feature: MA Experiment 20000144 PARAMETER Experiment Name: At_42deg_Heat_cDNA_P Parameter: Timepoint (hr) Value: 1
  misc_feature: MA Experiment 20000144 PARAMETER Experiment Name: At_42deg_Heat_cDNA_P Parameter: Tissue Value: Aerial
  misc_feature: MA Experiment ID: 20000166 Result: Up-regulated in Transcription
  misc_feature: MA Experiment 20000166 PARAMETER Experiment Name: At_100uM_ABA_P Parameter: Age (day) Value: 14
  misc_feature: MA Experiment 20000166 PARAMETER Experiment Name: At_100uM_ABA_P Parameter: Organism Value: A. thaliana
  misc_feature: MA Experiment 20000166 PARAMETER Experiment Name: At_100uM_ABA_P Parameter: Plant Line Value: WS
  misc_feature: MA Experiment 20000166 PARAMETER Experiment Name: At_100uM_ABA_P Parameter: Timepoint (hr) Value: 1
  misc_feature: MA Experiment 20000166 PARAMETER Experiment Name: At_100uM_ABA_P Parameter: Tissue Value: Aerial
  misc_feature: MA Experiment 20000166 PARAMETER Experiment Name: At_100uM_ABA_P Parameter: Treatment Value: 100uM ABA vs. No Treatment
  misc_feature: MA Experiment ID: 20000169 Result: Up-regulated in Transcription
  misc_feature: MA Experiment 20000169 PARAMETER Experiment Name: At_100uM_ABA_P Parameter: Age (day) Value: 14
  misc_feature: MA Experiment 20000169 PARAMETER Experiment Name: At_100uM_ABA_P Parameter: Organism Value: A. thaliana
  misc_feature: MA Experiment 20000169 PARAMETER Experiment Name: At_100uM_ABA_P Parameter: Plant Line Value: WS
  misc_feature: MA Experiment 20000169 PARAMETER Experiment Name: At_100uM_ABA_P Parameter: Timepoint (hr) Value: 6
  misc_feature: MA Experiment 20000169 PARAMETER Experiment Name: At_100uM_ABA_P Parameter: Tissue Value: Aerial
  misc_feature: MA Experiment 20000169 PARAMETER Experiment Name: At_100uM_ABA_P Parameter: Treatment Value: 100uM ABA vs. No Treatment
  misc_feature: MA Experiment ID: 20000171 Result: Up-regulated in Transcription
  misc_feature: MA Experiment 20000171 PARAMETER Experiment Name: At_42deg_Heat_P Parameter: Age (day) Value: 14
  misc_feature: MA Experiment 20000171 PARAMETER Experiment Name: At_42deg_Heat_P Parameter: Organism Value: A. thaliana
  misc_feature: MA Experiment 20000171 PARAMETER Experiment Name: At_42deg_Heat_P Parameter: Plant Line Value: WS
  misc_feature: MA Experiment 20000171 PARAMETER Experiment Name: At_42deg_Heat_P Parameter: Temperature (deg C) Value: 42 vs. 22
  misc_feature: MA Experiment 20000171 PARAMETER Experiment Name: At_42deg_Heat_P Parameter: Timepoint (hr) Value: 1
  misc_feature: MA Experiment 20000171 PARAMETER Experiment Name: At_42deg_Heat_P Parameter: Tissue Value: Aerial
  misc_feature: MA Experiment ID: 20000173 Result: Up-regulated in Transcription
  misc_feature: MA Experiment 20000173 PARAMETER Experiment Name: At_42deg_Heat_P Parameter: Age (day) Value: 14
  misc_feature: MA Experiment 20000173 PARAMETER Experiment Name: At_42deg_Heat_P Parameter: Organism Value: A. thaliana
  misc_feature: MA Experiment 20000173 PARAMETER Experiment Name: At_42deg_Heat_P Parameter: Plant Line Value: WS
  misc_feature: MA Experiment 20000173 PARAMETER Experiment Name: At_42deg_Heat_P Parameter: Temperature (deg C) Value: 42 vs. 22
  misc_feature: MA Experiment 20000173 PARAMETER Experiment Name: At_42deg_Heat_P Parameter: Timepoint (hr) Value: 6
  misc_feature: MA Experiment 20000173 PARAMETER Experiment Name: At_42deg_Heat_P Parameter: Tissue Value: Aerial
  misc_feature: MA Experiment ID: 20000234 Result: Down-regulated in Transcription
  misc_feature: MA Experiment 20000234 PARAMETER Experiment Name: At_Siliques_P Parameter: Age (day) Value: 21
  misc_feature: MA Experiment 20000234 PARAMETER Experiment Name: At_Siliques_P Parameter: Organism Value: A. thaliana
  misc_feature: MA Experiment 20000234 PARAMETER Experiment Name: At_Siliques_P Parameter: Plant Line Value: WS
  misc_feature: MA Experiment 20000234 PARAMETER Experiment Name: At_Siliques_P Parameter: Tissue Value: Less Than 5mm Siliques vs. Whole Plant
  misc_feature: MA Experiment ID: 20000235 Result: Down-regulated in Transcription
  misc_feature: MA Experiment 20000235 PARAMETER Experiment Name: At_Siliques_P Parameter: Age (day) Value: 21
  misc_feature: MA Experiment 20000235 PARAMETER Experiment Name: At_Siliques_P Parameter: Organism Value: A. thaliana
  misc_feature: MA Experiment 20000235 PARAMETER Experiment Name: At_Siliques_P Parameter: Plant Line Value: WS
  misc_feature: MA Experiment 20000235 PARAMETER Experiment Name: At_Siliques_P Parameter: Tissue Value: 5-10mm Siliques vs. Whole Plant
  misc_feature: MA Experiment ID: 20000267 Result: Up-regulated in Transcription
  misc_feature: MA Experiment 20000267 PARAMETER Experiment Name: At_Drought_P Parameter: Age (day) Value: 7
  misc_feature: MA Experiment 20000267 PARAMETER Experiment Name: At_Drought_P Parameter: Organism Value: A. thaliana
  misc_feature: MA Experiment 20000267 PARAMETER Experiment Name: At_Drought_P Parameter: Plant Line Value: WS
  misc_feature: MA Experiment 20000267 PARAMETER Experiment Name: At_Drought_P Parameter: Timepoint (hr) Value: 6
  misc_feature: MA Experiment 20000267 PARAMETER Experiment Name: At_Drought_P Parameter: Tissue Value: Whole Plant
  misc_feature: MA Experiment 20000267 PARAMETER Experiment Name: At_Drought_P Parameter: Treatment Value: Drought vs. No Drought
  misc_feature: MA Experiment ID: 20000268 Result: Up-regulated in Transcription
  misc_feature: MA Experiment 20000268 PARAMETER Experiment Name: At_100mM_NaCl__P Parameter: Age (day) Value: 14
  misc_feature: MA Experiment 20000268 PARAMETER Experiment Name: At_100mM_NaCl__P Parameter: Organism Value: A. thaliana
  misc_feature: MA Experiment 20000268 PARAMETER Experiment Name: At_100mM_NaCl__P Parameter: Plant Line Value: WS
  misc_feature: MA Experiment 20000268 PARAMETER Experiment Name: At_100mM_NaCl__P Parameter: Timepoint (hr) Value: 6
  misc_feature: MA Experiment 20000268 PARAMETER Experiment Name: At_100mM_NaCl__P Parameter: Tissue Value: Whole Plant
  misc_feature: MA Experiment 20000268 PARAMETER Experiment Name: At_100mM_NaCl__P Parameter: Treatment Value: 100mM NaCl vs. No Treatment
  misc_feature: MA Experiment ID: 20000436 Result: Up-regulated in Transcription
  misc_feature: MA Experiment 20000436 PARAMETER Experiment Name: At_Drought_P Parameter: Age (day) Value: 7
  misc_feature: MA Experiment 20000436 PARAMETER Experiment Name: At_Drought_P Parameter: Organism Value: A. thaliana
  misc_feature: MA Experiment 20000436 PARAMETER Experiment Name: At_Drought_P Parameter: Plant Line Value: WS
  misc_feature: MA Experiment 20000436 PARAMETER Experiment Name: At_Drought_P Parameter: Timepoint (hr) Value: 12
  misc_feature: MA Experiment 20000436 PARAMETER Experiment Name: At_Drought_P Parameter: Tissue Value: Whole Plant
  misc_feature: MA Experiment 20000436 PARAMETER Experiment Name: At_Drought_P Parameter: Treatment Value: Drought vs. No Drought
  misc_feature: MA Experiment ID: 20000437 Result: Up-regulated in Transcription
  misc_feature: MA Experiment 20000437 PARAMETER Experiment Name: At_Drought_P Parameter: Age (day) Value: 8
  misc_feature: MA Experiment 20000437 PARAMETER Experiment Name: At_Drought_P Parameter: Organism Value: A. thaliana
  misc_feature: MA Experiment 20000437 PARAMETER Experiment Name: At_Drought_P Parameter: Plant Line Value: WS
  misc_feature: MA Experiment 20000437 PARAMETER Experiment Name: At_Drought_P Parameter: Timepoint (hr) Value: 24
  misc_feature: MA Experiment 20000437 PARAMETER Experiment Name: At_Drought_P Parameter: Tissue Value: Whole Plant
  misc_feature: MA Experiment 20000437 PARAMETER Experiment Name: At_Drought_P Parameter: Treatment Value: Drought vs. No Drought
  misc_feature: MA Experiment ID: 20000453 Result: Up-regulated in Transcription
  misc_feature: MA Experiment 20000453 PARAMETER Experiment Name: At_100uM_ABA_P Parameter: Age (day) Value: 15
  misc_feature: MA Experiment 20000453 PARAMETER Experiment Name: At_100uM_ABA_P Parameter: Organism Value: A. thaliana
  misc_feature: MA Experiment 20000453 PARAMETER Experiment Name: At_100uM_ABA_P Parameter: Plant Line Value: WS
  misc_feature: MA Experiment 20000453 PARAMETER Experiment Name: At_100uM_ABA_P Parameter: Timepoint (hr) Value: 24
  misc_feature: MA Experiment 20000453 PARAMETER Experiment Name: At_100uM_ABA_P Parameter: Tissue Value: Aerial
  misc_feature: MA Experiment 20000453 PARAMETER Experiment Name: At_100uM_ABA_P Parameter: Treatment Value: 100uM ABA vs. No Treatment
  misc_feature: MA Experiment ID: 20000794 Result: Up-regulated in Transcription
  misc_feature: MA Experiment 20000794 PARAMETER Experiment Name: At_Petals_P Parameter: Age (day) Value: 23-25 days
  misc_feature: MA Experiment 20000794 PARAMETER Experiment Name: At_Petals_P Parameter: Plant Line Value: WS
  misc_feature: MA Experiment 20000794 PARAMETER Experiment Name: At_Petals_P Parameter: Tissue Value: Petals vs. Whole plant
  misc_feature: MA Experiment ID: 20001248 Result: Down-regulated in Transcription
  misc_feature: MA Experiment 20001248 PARAMETER Experiment Name: At_Far-red-induction_P Parameter: Age (day) Value: 7
  misc_feature: MA Experiment 20001248 PARAMETER Experiment Name: At_Far-red-induction_P Parameter: Light Value: Far-red vs. White
  misc_feature: MA Experiment 20001248 PARAMETER Experiment Name: At_Far-red-induction_P Parameter: Organism Value: A. thaliana
  misc_feature: MA Experiment 20001248 PARAMETER Experiment Name: At_Far-red-induction_P Parameter: Plant Line Value: Columbia
  misc_feature: MA Experiment 20001248 PARAMETER Experiment Name: At_Far-red-induction_P Parameter: Timepoint (hr) Value: 4
  misc_feature: MA Experiment 20001248 PARAMETER Experiment Name: At_Far-red-induction_P Parameter: Tissue Value: Whole Plant
  misc_feature: MA Experiment ID: 20001554 Result: Up-regulated in Transcription
  misc_feature: MA Experiment 20001554 PARAMETER Experiment Name: At_Drought_Soil_Dry_P Parameter: Age (day) Value: 21
  misc_feature: MA Experiment 20001554 PARAMETER Experiment Name: At_Drought_Soil_Dry_P Parameter: Organism Value: A. thaliana
  misc_feature: MA Experiment 20001554 PARAMETER Experiment Name: At_Drought_Soil_Dry_P Parameter: Plant Line Value: WS
  misc_feature: MA Experiment 20001554 PARAMETER Experiment Name: At_Drought_Soil_Dry_P Parameter: Post Timepoint (hr) Value: None
  misc_feature: MA Experiment 20001554 PARAMETER Experiment Name: At_Drought_Soil_Dry_P Parameter: Post-Treatment Value: None
  misc_feature: MA Experiment 20001554 PARAMETER Experiment Name: At_Drought_Soil_Dry_P Parameter: Timepoint (day) Value: 7
  misc_feature: MA Experiment 20001554 PARAMETER Experiment Name: At_Drought_Soil_Dry_P Parameter: Treatment Value: Drought vs. No Drought
  misc_feature: MA Experiment ID: 20001555 Result: Up-regulated in Transcription
  misc_feature: MA Experiment 20001555 PARAMETER Experiment Name: At_Drought_Soil_Dry_P Parameter: Age (day) Value: 24
  misc_feature: MA Experiment 20001555 PARAMETER Experiment Name: At_Drought_Soil_Dry_P Parameter: Organism Value: A. thaliana
  misc_feature: MA Experiment 20001555 PARAMETER Experiment Name: At_Drought_Soil_Dry_P Parameter: Plant Line Value: WS
  misc_feature: MA Experiment 20001555 PARAMETER Experiment Name: At_Drought_Soil_Dry_P Parameter: Post Timepoint (hr) Value: None
  misc_feature: MA Experiment 20001555 PARAMETER Experiment Name: At_Drought_Soil_Dry_P Parameter: Post-Treatment Value: None
  misc_feature: MA Experiment 20001555 PARAMETER Experiment Name: At_Drought_Soil_Dry_P Parameter: Timepoint (day) Value: 10
  misc_feature: MA Experiment 20001555 PARAMETER Experiment Name: At_Drought_Soil_Dry_P Parameter: Treatment Value: Drought vs. No Drought
  misc_feature: MA Experiment ID: 20001559 Result: Up-regulated in Transcription
  misc_feature: MA Experiment 20001559 PARAMETER Experiment Name: At_Drought_Soil_Dry_P Parameter: Age (day) Value: 28
  misc_feature: MA Experiment 20001559 PARAMETER Experiment Name: At_Drought_Soil_Dry_P Parameter: Organism Value: A. thaliana
  misc_feature: MA Experiment 20001559 PARAMETER Experiment Name: At_Drought_Soil_Dry_P Parameter: Plant Line Value: WS
  misc_feature: MA Experiment 20001559 PARAMETER Experiment Name: At_Drought_Soil_Dry_P Parameter: Post Timepoint (hr) Value: 29
  misc_feature: MA Experiment 20001559 PARAMETER Experiment Name: At_Drought_Soil_Dry_P Parameter: Post-Treatment Value: Re-Water vs. No Drought
  misc_feature: MA Experiment 20001559 PARAMETER Experiment Name: At_Drought_Soil_Dry_P Parameter: Timepoint (day) Value: 14
  misc_feature: MA Experiment 20001559 PARAMETER Experiment Name: At_Drought_Soil_Dry_P Parameter: Treatment Value: Drought vs. No Drought
  misc_feature: MA Experiment ID: 20001904 Result: Up-regulated in Transcription
  misc_feature: MA Experiment 20001904 PARAMETER Experiment Name: At_Drought_Reproduction_P Parameter: Age (day) Value: 37
  misc_feature: MA Experiment 20001904 PARAMETER Experiment Name: At_Drought_Reproduction_P Parameter: Organism Value: A. thaliana
  misc_feature: MA Experiment 20001904 PARAMETER Experiment Name: At_Drought_Reproduction_P Parameter: Plant Line Value: WS
  misc_feature: MA Experiment 20001904 PARAMETER Experiment Name: At_Drought_Reproduction_P Parameter: Timepoint (day) Value: 7
  misc_feature: MA Experiment 20001904 PARAMETER Experiment Name: At_Drought_Reproduction_P Parameter: Tissue Value: Rosettes
  misc_feature: MA Experiment 20001904 PARAMETER Experiment Name: At_Drought_Reproduction_P Parameter: Treatment Value: Drought vs. No Drought
  misc_feature: MA Experiment ID: 20001905 Result: Up-regulated in Transcription
  misc_feature: MA Experiment 20001905 PARAMETER Experiment Name: At_Drought_Reproduction_P Parameter: Age (day) Value: 40
  misc_feature: MA Experiment 20001905 PARAMETER Experiment Name: At_Drought_Reproduction_P Parameter: Organism Value: A. thaliana
  misc_feature: MA Experiment 20001905 PARAMETER Experiment Name: At_Drought_Reproduction_P Parameter: Plant Line Value: WS
  misc_feature: MA Experiment 20001905 PARAMETER Experiment Name: At_Drought_Reproduction_P Parameter: Timepoint (day) Value: 10
  misc_feature: MA Experiment 20001905 PARAMETER Experiment Name: At_Drought_Reproduction_P Parameter: Tissue Value: Rosettes
  misc_feature: MA Experiment 20001905 PARAMETER Experiment Name: At_Drought_Reproduction_P Parameter: Treatment Value: Drought vs. No Drought
  misc_feature: MA Experiment ID: 20001911 Result: Up-regulated in Transcription
  misc_feature: MA Experiment 20001911 PARAMETER Experiment Name: At_Drought_Reproduction_P Parameter: Age (day) Value: 40
  misc_feature: MA Experiment 20001911 PARAMETER Experiment Name: At_Drought_Reproduction_P Parameter: Organism Value: A. thaliana
  misc_feature: MA Experiment 20001911 PARAMETER Experiment Name: At_Drought_Reproduction_P Parameter: Plant Line Value: WS
  misc_feature: MA Experiment 20001911 PARAMETER Experiment Name: At_Drought_Reproduction_P Parameter: Timepoint (day) Value: 10
  misc_feature: MA Experiment 20001911 PARAMETER Experiment Name: At_Drought_Reproduction_P Parameter: Tissue Value: Flowers
  misc_feature: MA Experiment 20001911 PARAMETER Experiment Name: At_Drought_Reproduction_P Parameter: Treatment Value: Drought vs. No Drought
  misc_feature: Phenotype: ROSETTE LEAVES Shape-Serrate
  misc_feature: Phenotype: ROSETTE LEAVES Other
  misc_feature: Phenotype: WHOLE PLANT Other
  misc_feature: Phenotype: ROSETTE LEAVES Curled-Curled 1
  misc_feature: Phenotype: ROSETTE LEAVES Shape-Serrate
  misc_feature: Phenotype: WHOLE PLANT Other
  misc_feature: Phenotype: WHOLE PLANT Other
  misc_feature: Phenotype: ROSETTE LEAVES Shape-Oval
  misc_feature: Phenotype: WHOLE PLANT Color-Dark Green
  misc_feature: Phenotype: WHOLE PLANT Size-Small
tgaaatgaacaaatatatcaaataataatagtgtaattaagtcggaggaaaacaacaagaacccagaaagaggaacgaagaaactaattcaaaggatcaagttcaccgcttcattttagtcattaaacaaagatggtgatgggaggagaagcatccatggaactggaccagtgttttcagaagatgaagatggaaggaatctcgatcaaagagtggaaagatatccctgtggagcttctgatgaggatcctttcccttgttgatgatcgtaatgtcattgttgcttctggtgtttgcactggctggagagatgctatctcttttggcctcactcgtctccgtctatcttggtgcaacaacaacatgaacagcttggttctttctcttgttcccaagtttgtaaagctgcagactttaaatctaaggcaggacaaaccgcaactagaggacaatgcagtggaggccatagcaaatcactgccatgagttacaagaacttgatctcagcaaaagcttgaaaattacagaccgttcactttatgcacttgctcatggttgcccagacctcacaaaactcaaccttagtggctgcacttcattcagcgacactgctattgcgtatttgaccagattctgcagaaagcttaaagttttgaatctttgcggatgtgtcaaagctgtaactgacaatgccttggaggctattgggaataactgcaatcagatgcagtcactaaacttgggatggtgtgagaatatcagtgatgatggggtaatgagtttagcttatggctgtccagatctcaggacccttgacctctgcggctgtgttcttattacagatgagagtgtggtagctctagcagactggtgtgtccacttgaggtcactggggctatactattgcagaaacataacagacagagcaatgtactcgctagctcaaagcggggtaaagaacaaaccgggatcgtggaaatcggttaagaaaggtaaatacgatgaagaaggactgagaagtctcaacattagccaatgcactgcccttacaccttcagcggttcaagctgtttgcgattcatttcccgcacttcacacatgctcaggaaggcattcgcttgtcatgagcggctgtctgaacttaacaactgtgcactgtgcttgtatccttcaggctcatcgtgcacacaatgcggttcctcatcctgctcattaagacagaggaatagttatgttgtatatataaacatcatgttgatggagattagtattataaacgaagtagcttttttaaggtttatgtgaaaccttagaagcttttgagttgttctttctttgtcttgaaagatcttttgtatattttggtgctatgttcataacttctttagtaagacctctcgttgttacc

SEQ ID NO: 30881 - protein, 360 aa, Arabidopsis thaliana
  peptide (1)..(360): Ceres Seq. ID no. 13486968
  misc_feature (66)..(271): Homolog of NCBI NO: 37590914 NR Description: Unknown (protein for MGC:73374) [Danio rerio]
  misc_feature (93)..(271): Homolog of NCBI NO: 16306582 NR Description: F-box and leucine-rich repeat protein 2
  misc_feature (93)..(271): Homolog of NCBI NO: 7022695 NR Description: unnamed protein product [Homo sapiens]
  misc_feature (93)..(271): Homolog of NCBI NO: 5919219 NR Description: leucine-rich repeats containing F-box protein
  misc_feature (29)..(343): Homolog of NCBI NO: 31226369 NR Description: ENSANGP00000010053 [Anopheles gambiae]
  misc_feature (215)..(360): Homolog of NCBI NO: 26450797 NR Description: unknown protein [Arabidopsis thaliana]
  misc_feature (22)..(355): Homolog of NCBI NO: 34907434 NR Description: P0018C10.44 [Oryza sativa (japonica
  misc_feature (1)..(360): Homolog of NCBI NO: 18411319 NR Description: F-box protein family [Arabidopsis thaliana]
  misc_feature (1)..(360): Homolog of NCBI NO: 21554029 NR Description: F-box protein AtFBL5 [Arabidopsis thaliana]
  misc_feature (1)..(360): Homolog of NCBI NO: 18394987 NR Description: F-box protein family [Arabidopsis thaliana]
MVMGGEASMELDQCFQKMKMEGISIKEWKDIPVELLMRILSLVDDRNVIVASGVCTGWRDAISFGLTRLRLSWCNNNMNSLVLSLVPKFVKLQTLNLRQDKPQLEDNAVEAIANHCHELQELDLSKSLKITDRSLYALAHGCPDLTKLNLSGCTSFSDTAIAYLTRFCRKLKVLNLCGCVKAVTDNALEAIGNNCNQMQSLNLGWCENISDDGVMSLAYGCPDLRTLDLCGCVLITDESVVALADWCVHLRSLGLYYCRNITDRAMYSLAQSGVKNKPGSWKSVKKGKYDEEGLRSLNISQCTALTPSAVQAVCDSFPALHTCSGRHSLVMSGCLNLTTVHCACILQAHRAHNAVPHPAH

SEQ ID NO: 30882 - protein, 358 aa, Arabidopsis thaliana
  peptide (1)..(358): Ceres Seq. ID no. 13486969
  misc_feature (64)..(269): Homolog of NCBI NO: 37590914 NR Description: Unknown (protein for MGC:73374) [Danio rerio]
  misc_feature (91)..(269): Homolog of NCBI NO: 16306582 NR Description: F-box and leucine-rich repeat protein 2
  misc_feature (91)..(269): Homolog of NCBI NO: 7022695 NR Description: unnamed protein product [Homo sapiens]
  misc_feature (91)..(269): Homolog of NCBI NO: 5919219 NR Description: leucine-rich repeats containing F-box protein
  misc_feature (27)..(341): Homolog of NCBI NO: 31226369 NR Description: ENSANGP00000010053 [Anopheles gambiae]
  misc_feature (213)..(358): Homolog of NCBI NO: 26450797 NR Description: unknown protein [Arabidopsis thaliana]
  misc_feature (20)..(353): Homolog of NCBI NO: 34907434 NR Description: P0018C10.44 [Oryza sativa (japonica
  misc_feature (1)..(358): Homolog of NCBI NO: 18411319 NR Description: F-box protein family [Arabidopsis thaliana]
  misc_feature (1)..(358): Homolog of NCBI NO: 21554029 NR Description: F-box protein AtFBL5 [Arabidopsis thaliana]
  misc_feature (1)..(358): Homolog of NCBI NO: 18394987 NR Description: F-box protein family [Arabidopsis thaliana]
MGGEASMELDQCFQKMKMEGISIKEWKDIPVELLMRILSLVDDRNVIVASGVCTGWRDAISFGLTRLRLSWCNNNMNSLVLSLVPKFVKLQTLNLRQDKPQLEDNAVEAIANHCHELQELDLSKSLKITDRSLYALAHGCPDLTKLNLSGCTSFSDTAIAYLTRFCRKLKVLNLCGCVKAVTDNALEAIGNNCNQMQSLNLGWCENISDDGVMSLAYGCPDLRTLDLCGCVLITDESVVALADWCVHLRSLGLYYCRNITDRAMYSLAQSGVKNKPGSWKSVKKGKYDEEGLRSLNISQCTALTPSAVQAVCDSFPALHTCSGRHSLVMSGCLNLTTVHCACILQAHRAHNAVPHPAH

SEQ ID NO: 30883 - protein, 352 aa, Arabidopsis thaliana
  peptide (1)..(352): Ceres Seq. ID no. 13486970
  misc_feature (58)..(263): Homolog of NCBI NO: 37590914 NR Description: Unknown (protein for MGC:73374) [Danio rerio]
  misc_feature (85)..(263): Homolog of NCBI NO: 16306582 NR Description: F-box and leucine-rich repeat protein 2
  misc_feature (85)..(263): Homolog of NCBI NO: 7022695 NR Description: unnamed protein product [Homo sapiens]
  misc_feature (85)..(263): Homolog of NCBI NO: 5919219 NR Description: leucine-rich repeats containing F-box protein
  misc_feature (21)..(335): Homolog of NCBI NO: 31226369 NR Description: ENSANGP00000010053 [Anopheles gambiae]
  misc_feature (207)..(352): Homolog of NCBI NO: 26450797 NR Description: unknown protein [Arabidopsis thaliana]
  misc_feature (14)..(347): Homolog of NCBI NO: 34907434 NR Description: P0018C10.44 [Oryza sativa (japonica
  misc_feature (1)..(352): Homolog of NCBI NO: 18411319 NR Description: F-box protein family [Arabidopsis thaliana]
  misc_feature (1)..(352): Homolog of NCBI NO: 21554029 NR Description: F-box protein AtFBL5 [Arabidopsis thaliana]
  misc_feature (1)..(352): Homolog of NCBI NO: 18394987 NR Description: F-box protein family [Arabidopsis thaliana]
MELDQCFQKMKMEGISIKEWKDIPVELLMRILSLVDDRNVIVASGVCTGWRDAISFGLTRLRLSWCNNNMNSLVLSLVPKFVKLQTLNLRQDKPQLEDNAVEAIANHCHELQELDLSKSLKITDRSLYALAHGCPDLTKLNLSGCTSFSDTAIAYLTRFCRKLKVLNLCGCVKAVTDNALEAIGNNCNQMQSLNLGWCENISDDGVMSLAYGCPDLRTLDLCGCVLITDESVVALADWCVHLRSLGLYYCRNITDRAMYSLAQSGVKNKPGSWKSVKKGKYDEEGLRSLNISQCTALTPSAVQAVCDSFPALHTCSGRHSLVMSGCLNLTTVHCACILQAHRAHNAVPHPAH

SEQ ID NO: 30884 - DNA, 694 bp, Arabidopsis thaliana
  misc_feature (1)..(694): Ceres Seq. ID no. 12422743
  misc_feature: MA Experiment ID: 20000171 Result: Down-regulated in Transcription
  misc_feature: MA Experiment 20000171 PARAMETER Experiment Name: At_42deg_Heat_P Parameter: Age (day) Value: 14
  misc_feature: MA Experiment 20000171 PARAMETER Experiment Name: At_42deg_Heat_P Parameter: Organism Value: A. thaliana
  misc_feature: MA Experiment 20000171 PARAMETER Experiment Name: At_42deg_Heat_P Parameter: Plant Line Value: WS
  misc_feature: MA Experiment 20000171 PARAMETER Experiment Name: At_42deg_Heat_P Parameter: Temperature (deg C) Value: 42 vs. 22
  misc_feature: MA Experiment 20000171 PARAMETER Experiment Name: At_42deg_Heat_P Parameter: Timepoint (hr) Value: 1
  misc_feature: MA Experiment 20000171 PARAMETER Experiment Name: At_42deg_Heat_P Parameter: Tissue Value: Aerial
  misc_feature: MA Experiment ID: 20000179 Result: Up-regulated in Transcription
  misc_feature: MA Experiment 20000179 PARAMETER Experiment Name: At_Germinating_Seeds_P Parameter: Age (hr) Value: 6 vs. 0
  misc_feature: MA Experiment 20000179 PARAMETER Experiment Name: At_Germinating_Seeds_P Parameter: Tissue Value: Germinating Seeds
  misc_feature: MA Experiment ID: 20000182 Result: Down-regulated in Transcription
  misc_feature: MA Experiment 20000182 PARAMETER Experiment Name: At_2mM_SA_P Parameter: Age (day) Value: 14
  misc_feature: MA Experiment 20000182 PARAMETER Experiment Name: At_2mM_SA_P Parameter: Organism Value: A. thaliana
  misc_feature: MA Experiment 20000182 PARAMETER Experiment Name: At_2mM_SA_P Parameter: Plant Line Value: WS
  misc_feature: MA Experiment 20000182 PARAMETER Experiment Name: At_2mM_SA_P Parameter: Timepoint (hr) Value: 6
  misc_feature: MA Experiment 20000182 PARAMETER Experiment Name: At_2mM_SA_P Parameter: Tissue Value: Aerial
  misc_feature: MA Experiment 20000182 PARAMETER Experiment Name: At_2mM_SA_P Parameter: Treatment Value: 2mM SA vs. No Treatment
  misc_feature: MA Experiment ID: 20000184 Result: Up-regulated in Transcription
  misc_feature: MA Experiment 20000184 PARAMETER Experiment Name: At_Shoots__P Parameter: Age (day) Value: 7
  misc_feature: MA Experiment 20000184 PARAMETER Experiment Name: At_Shoots__P Parameter: Tissue Value: Shoots vs. Whole Plant
  misc_feature: MA Experiment ID: 20000227 Result: Up-regulated in Transcription
  misc_feature: MA Experiment 20000227 PARAMETER Experiment Name: At_Root-Tips-vs-Tops_P Parameter: Tissue Value: Root Tips vs. Root Tops
  misc_feature: MA Experiment ID: 20000234 Result: Up-regulated in Transcription
  misc_feature: MA Experiment 20000234 PARAMETER Experiment Name: At_Siliques_P Parameter: Age (day) Value: 21
  misc_feature: MA Experiment 20000234 PARAMETER Experiment Name: At_Siliques_P Parameter: Organism Value: A. thaliana
  misc_feature: MA Experiment 20000234 PARAMETER Experiment Name: At_Siliques_P Parameter: Plant Line Value: WS
  misc_feature: MA Experiment 20000234 PARAMETER Experiment Name: At_Siliques_P Parameter: Tissue Value: Less Than 5mm Siliques vs. Whole Plant
  misc_feature: MA Experiment ID: 20000264 Result: Up-regulated in Transcription
  misc_feature: MA Experiment 20000264 PARAMETER Experiment Name: At_Open_Flower_P Parameter: Age (day) Value: 21
  misc_feature: MA Experiment 20000264 PARAMETER Experiment Name: At_Open_Flower_P Parameter: Plant Line Value: WS
  misc_feature: MA Experiment 20000264 PARAMETER Experiment Name: At_Open_Flower_P Parameter: Tissue Value: Open Flower vs. Whole Plant
  misc_feature: MA Experiment ID: 20000265 Result: Up-regulated in Transcription
  misc_feature: MA Experiment 20000265 PARAMETER Experiment Name: At_Open_Flower_P Parameter: Age (day) Value: 21
  misc_feature: MA Experiment 20000265 PARAMETER Experiment Name: At_Open_Flower_P Parameter: Plant Line Value: WS
  misc_feature: MA Experiment 20000265 PARAMETER Experiment Name: At_Open_Flower_P Parameter: Tissue Value: Closed Flower vs. Whole Plant
  misc_feature: MA Experiment ID: 20000286 Result: Up-regulated in Transcription
  misc_feature: MA Experiment 20000286 PARAMETER Experiment Name: At_Open_Flower_P Parameter: Age (day) Value: 21
  misc_feature: MA Experiment 20000286 PARAMETER Experiment Name: At_Open_Flower_P Parameter: Plant Line Value: WS
  misc_feature: MA Experiment 20000286 PARAMETER Experiment Name: At_Open_Flower_P Parameter: Tissue Value: Half Open vs. Whole Plant
  misc_feature: MA Experiment ID: 20000438 Result: Up-regulated in Transcription
  misc_feature: MA Experiment 20000438 PARAMETER Experiment Name: At_Shoots__P Parameter: Age (day) Value: 14
  misc_feature: MA Experiment 20000438 PARAMETER Experiment Name: At_Shoots__P Parameter: Tissue Value: Shoots vs. Whole Plant
  misc_feature: MA Experiment ID: 20000495 Result: Up-regulated in Transcription
  misc_feature: MA Experiment 20000495 PARAMETER Experiment Name: At_Guard_Cells_P Parameter: Harvest Date Value: 8/2/2002
  misc_feature: MA Experiment 20000495 PARAMETER Experiment Name: At_Guard_Cells_P Parameter: Organism Value: A. thaliana
  misc_feature: MA Experiment 20000495 PARAMETER Experiment Name: At_Guard_Cells_P Parameter: Tissue Value: Guard Cells vs. Leaves
  misc_feature: MA Experiment ID: 20000794 Result: Down-regulated in Transcription
  misc_feature: MA Experiment 20000794 PARAMETER Experiment Name: At_Petals_P Parameter: Age (day) Value: 23-25 days
  misc_feature: MA Experiment 20000794 PARAMETER Experiment Name: At_Petals_P Parameter: Plant Line Value: WS
  misc_feature: MA Experiment 20000794 PARAMETER Experiment Name: At_Petals_P Parameter: Tissue Value: Petals vs. Whole plant
  misc_feature: MA Experiment ID: 20001248 Result: Down-regulated in Transcription
  misc_feature: MA Experiment 20001248 PARAMETER Experiment Name: At_Far-red-induction_P Parameter: Age (day) Value: 7
  misc_feature: MA Experiment 20001248 PARAMETER Experiment Name: At_Far-red-induction_P Parameter: Light Value: Far-red vs. White
  misc_feature: MA Experiment 20001248 PARAMETER Experiment Name: At_Far-red-induction_P Parameter: Organism Value: A. thaliana
  misc_feature: MA Experiment 20001248 PARAMETER Experiment Name: At_Far-red-induction_P Parameter: Plant Line Value: Columbia
  misc_feature: MA Experiment 20001248 PARAMETER Experiment Name: At_Far-red-induction_P Parameter: Timepoint (hr) Value: 4
  misc_feature: MA Experiment 20001248 PARAMETER Experiment Name: At_Far-red-induction_P Parameter: Tissue Value: Whole Plant
  misc_feature: MA Experiment ID: 20001558 Result: Up-regulated in Transcription
  misc_feature: MA Experiment 20001558 PARAMETER Experiment Name: At_Drought_Soil_Dry_P Parameter: Age (day) Value: 27
  misc_feature: MA Experiment 20001558 PARAMETER Experiment Name: At_Drought_Soil_Dry_P Parameter: Organism Value: A. thaliana
  misc_feature: MA Experiment 20001558 PARAMETER Experiment Name: At_Drought_Soil_Dry_P Parameter: Plant Line Value: WS
  misc_feature: MA Experiment 20001558 PARAMETER Experiment Name: At_Drought_Soil_Dry_P Parameter: Post Timepoint (hr) Value: 6
  misc_feature: MA Experiment 20001558 PARAMETER Experiment Name: At_Drought_Soil_Dry_P Parameter: Post-Treatment Value: Re-Water vs. No Drought
  misc_feature: MA Experiment 20001558 PARAMETER Experiment Name: At_Drought_Soil_Dry_P Parameter: Timepoint (day) Value: 13
  misc_feature: MA Experiment 20001558 PARAMETER Experiment Name: At_Drought_Soil_Dry_P Parameter: Treatment Value: Drought vs. No Drought
  misc_feature: MA Experiment ID: 20001560 Result: Up-regulated in Transcription
  misc_feature: MA Experiment 20001560 PARAMETER Experiment Name: At_Drought_Soil_Dry_P Parameter: Age (day) Value: 28
  misc_feature: MA Experiment 20001560 PARAMETER Experiment Name: At_Drought_Soil_Dry_P Parameter: Organism Value: A. thaliana
  misc_feature: MA Experiment 20001560 PARAMETER Experiment Name: At_Drought_Soil_Dry_P Parameter: Plant Line Value: WS
  misc_feature: MA Experiment 20001560 PARAMETER Experiment Name: At_Drought_Soil_Dry_P Parameter: Post Timepoint (hr) Value: None
  misc_feature: MA Experiment 20001560 PARAMETER Experiment Name: At_Drought_Soil_Dry_P Parameter: Post-Treatment Value: None
  misc_feature: MA Experiment 20001560 PARAMETER Experiment Name: At_Drought_Soil_Dry_P Parameter: Timepoint (day) Value: 14
  misc_feature: MA Experiment 20001560 PARAMETER Experiment Name: At_Drought_Soil_Dry_P Parameter: Treatment Value: Drought vs. No Drought
  misc_feature: MA Experiment ID: 20001905 Result: Up-regulated in Transcription
  misc_feature: MA Experiment 20001905 PARAMETER Experiment Name: At_Drought_Reproduction_P Parameter: Age (day) Value: 40
  misc_feature: MA Experiment 20001905 PARAMETER Experiment Name: At_Drought_Reproduction_P Parameter: Organism Value: A. thaliana
  misc_feature: MA Experiment 20001905 PARAMETER Experiment Name: At_Drought_Reproduction_P Parameter: Plant Line Value: WS
  misc_feature: MA Experiment 20001905 PARAMETER Experiment Name: At_Drought_Reproduction_P Parameter: Timepoint (day) Value: 10
  misc_feature: MA Experiment 20001905 PARAMETER Experiment Name: At_Drought_Reproduction_P Parameter: Tissue Value: Rosettes
  misc_feature: MA Experiment 20001905 PARAMETER Experiment Name: At_Drought_Reproduction_P Parameter: Treatment Value: Drought vs. No Drought
  misc_feature: MA Experiment ID: 20001906 Result: Down-regulated in Transcription
  misc_feature: MA Experiment 20001906 PARAMETER Experiment Name: At_Drought_Reproduction_P Parameter: Age (day) Value: 35
  misc_feature: MA Experiment 20001906 PARAMETER Experiment Name: At_Drought_Reproduction_P Parameter: Organism Value: A. thaliana
  misc_feature: MA Experiment 20001906 PARAMETER Experiment Name: At_Drought_Reproduction_P Parameter: Plant Line Value: WS
  misc_feature: MA Experiment 20001906 PARAMETER Experiment Name: At_Drought_Reproduction_P Parameter: Timepoint (day) Value: 5
  misc_feature: MA Experiment 20001906 PARAMETER Experiment Name: At_Drought_Reproduction_P Parameter: Tissue Value: Siliques
  misc_feature: MA Experiment 20001906 PARAMETER Experiment Name: At_Drought_Reproduction_P Parameter: Treatment Value: Drought vs. No Drought
ataaatggcgcatttaattagaacccccaaaatctcttcacaactgtaaaaccccaatcacctctttacatgtgacttccttattactctcttcttcttattttcctcctcttcttcttcgctctagtttcccccaacaatcgccatggcagcttcgtctctcaatctcctcctcattctctctcttctcactttcatttctctccagagatctgaatctctttccgataatccatctctcactcttctacccgacggattcgactggccgatctctcactccgatgaattcgatatcatcgacggtgaagaaagcttcgaagttacggaggaagacgacggcgtaacagatcgacggtcattgtactggcggaggacgaagtattacatatcgtacggtgcattgtcggcgaatagagtgccatgtcctcccagatctggaagatcgtactacactcataactgcttcagagctagaggtcccgttcatccgtatagccgaggctgctcgtcgatcactcgatgccggagatagatgaagaaagcttaaaactccatgggcattttcgtaattttgccaaccatggtttattattatgatgtttgtatttgtaatgttcgatgtttgtttgtaaaccgtgattagttacgttcgttaaacggtaaacccggtgattataatttcgagttctgc

SEQ ID NO: 30885 - protein, 129 aa, Arabidopsis thaliana
  peptide (1)..(129): Ceres Seq. ID no. 12422744
  misc_feature (57)..(129): Pfam Name: Rapid ALkalinization Factor (RALF) Pfam Description: Rapid ALkalinization Factor (RALF)
  misc_feature (55)..(128): Homolog of NCBI NO: 34915062 NR Description: P0025H06.15 [Oryza sativa (japonica
  misc_feature (63)..(129): Homolog of NCBI NO: 18397246 NR Description: expressed protein
  misc_feature (70)..(129): Homolog of NCBI NO: 34903676 NR Description: B1015E06.23 [Oryza sativa (japonica
  misc_feature (50)..(128): Homolog of NCBI NO: 16566316 NR Description: RALF precursor [Nicotiana tabacum]
  misc_feature (48)..(129): Homolog of NCBI NO: 18414528 NR Description: Expressed protein
  misc_feature (2)..(129): Homolog of NCBI NO: 18401177 NR Description: expressed protein
  misc_feature (1)..(129): Homolog of NCBI NO: 21593826 NR Description: unknown [Arabidopsis thaliana]
  misc_feature (1)..(129): Homolog of NCBI NO: 15240191 NR Description: putative protein
MAASSLNLLLILSLLTFISLQRSESLSDNPSLTLLPDGFDWPISHSDEFDIIDGEESFEVTEEDDGVTDRRSLYWRRTKYYISYGALSANRVPCPPRSGRSYYTHNCFRARGPVHPYSRGCSSITRCRR

SEQ ID NO: 30886 - DNA, 1200 bp, Arabidopsis thaliana
  misc_feature (1)..(1200): Ceres Seq. ID no. 12371656
  misc_feature: MA Experiment ID: 108433 Result: Down-regulated in Transcription
  misc_feature: MA Experiment 108433 PARAMETER Experiment Name: At_rhl_Mutant2_cDNA_P Parameter: Age (day) Value: 7
  misc_feature: MA Experiment 108433 PARAMETER Experiment Name: At_rhl_Mutant2_cDNA_P Parameter: Organism Value: A. thaliana
  misc_feature: MA Experiment 108433 PARAMETER Experiment Name: At_rhl_Mutant2_cDNA_P Parameter: Plant Line Value: rhl Mutant vs. wt landsburg
  misc_feature: MA Experiment 108433 PARAMETER Experiment Name: At_rhl_Mutant2_cDNA_P Parameter: Tissue Value: Roots
  misc_feature: MA Experiment ID: 108434 Result: Up-regulated in Transcription
  misc_feature: MA Experiment 108434 PARAMETER Experiment Name: At_Root_Tips_cDNA_P Parameter: Tissue Value: Root Tips
  misc_feature: MA Experiment ID: 108595 Result: Down-regulated in Transcription
  misc_feature: MA Experiment 108595 PARAMETER Experiment Name: At_Ler-pi_Ovule_cDNA_P Parameter: Plant Line Value: null
  misc_feature: MA Experiment ID: 20000069 Result: Down-regulated in Transcription
  misc_feature: MA Experiment 20000069 PARAMETER Experiment Name: At_100uM_ABA_Mutants_cDNA_P Parameter: Plant Line Value: CS23
  misc_feature: MA Experiment 20000069 PARAMETER Experiment Name: At_100uM_ABA_Mutants_cDNA_P Parameter: Timepoint (hr) Value: 6
  misc_feature: MA Experiment 20000069 PARAMETER Experiment Name: At_100uM_ABA_Mutants_cDNA_P Parameter: Tissue Value: Aerial
  misc_feature: MA Experiment 20000069 PARAMETER Experiment Name: At_100uM_ABA_Mutants_cDNA_P Parameter: Treatment Value: 100uM ABA vs. No Treatment
  misc_feature: MA Experiment ID: 20000070 Result: Down-regulated in Transcription
  misc_feature: MA Experiment 20000070 PARAMETER Experiment Name: At_100uM_ABA_Mutants_cDNA_P Parameter: Plant Line Value: CS24
  misc_feature: MA Experiment 20000070 PARAMETER Experiment Name: At_100uM_ABA_Mutants_cDNA_P Parameter: Timepoint (hr) Value: 6
  misc_feature: MA Experiment 20000070 PARAMETER Experiment Name: At_100uM_ABA_Mutants_cDNA_P Parameter: Tissue Value: Aerial
  misc_feature: MA Experiment 20000070 PARAMETER Experiment Name: At_100uM_ABA_Mutants_cDNA_P Parameter: Treatment Value: 100uM ABA vs. No Treatment
  misc_feature: MA Experiment ID: 20000071 Result: Down-regulated in Transcription
  misc_feature: MA Experiment 20000071 PARAMETER Experiment Name: At_100uM_ABA_Mutants_cDNA_P Parameter: Plant Line Value: CS8104
  misc_feature: MA Experiment 20000071 PARAMETER Experiment Name: At_100uM_ABA_Mutants_cDNA_P Parameter: Timepoint (hr) Value: 6
  misc_feature: MA Experiment 20000071 PARAMETER Experiment Name: At_100uM_ABA_Mutants_cDNA_P Parameter: Tissue Value: Aerial
  misc_feature: MA Experiment 20000071 PARAMETER Experiment Name: At_100uM_ABA_Mutants_cDNA_P Parameter: Treatment Value: 100uM ABA vs. No Treatment
  misc_feature: MA Experiment ID: 20000072 Result: Down-regulated in Transcription
  misc_feature: MA Experiment 20000072 PARAMETER Experiment Name: At_100uM_ABA_Mutants_cDNA_P Parameter: Plant Line Value: CS8105
  misc_feature: MA Experiment 20000072 PARAMETER Experiment Name: At_100uM_ABA_Mutants_cDNA_P Parameter: Timepoint (hr) Value: 6
  misc_feature: MA Experiment 20000072 PARAMETER Experiment Name: At_100uM_ABA_Mutants_cDNA_P Parameter: Tissue Value: Aerial
  misc_feature: MA Experiment 20000072 PARAMETER Experiment Name: At_100uM_ABA_Mutants_cDNA_P Parameter: Treatment Value: 100uM ABA vs. No Treatment
  misc_feature: MA Experiment ID: 20000087 Result: Down-regulated in Transcription
  misc_feature: MA Experiment 20000087 PARAMETER Experiment Name: At_100uM_ABA_Mutants_cDNA_P Parameter: Plant Line Value: WS
  misc_feature: MA Experiment 20000087 PARAMETER Experiment Name: At_100uM_ABA_Mutants_cDNA_P Parameter: Timepoint (hr) Value: 6
  misc_feature: MA Experiment 20000087 PARAMETER Experiment Name: At_100uM_ABA_Mutants_cDNA_P Parameter: Tissue Value: Aerial
  misc_feature: MA Experiment 20000087 PARAMETER Experiment Name: At_100uM_ABA_Mutants_cDNA_P Parameter: Treatment Value: 100uM ABA vs. No Treatment
  misc_feature: MA Experiment ID: 20000088 Result: Down-regulated in Transcription
  misc_feature: MA Experiment 20000088 PARAMETER Experiment Name: At_100uM_ABA_Mutants_cDNA_P Parameter: Plant Line Value: Landsberg
  misc_feature: MA Experiment 20000088 PARAMETER Experiment Name: At_100uM_ABA_Mutants_cDNA_P Parameter: Timepoint (hr) Value: 6
  misc_feature: MA Experiment 20000088 PARAMETER Experiment Name: At_100uM_ABA_Mutants_cDNA_P Parameter: Tissue Value: Aerial
  misc_feature: MA Experiment 20000088 PARAMETER Experiment Name: At_100uM_ABA_Mutants_cDNA_P Parameter: Treatment Value: 100uM ABA vs. No Treatment
  misc_feature: MA Experiment ID: 20000089 Result: Down-regulated in Transcription
  misc_feature: MA Experiment ID: 20000090 Result: Down-regulated in Transcription
  misc_feature: MA Experiment ID: 20000111 Result: Up-regulated in Transcription
  misc_feature: MA Experiment 20000111 PARAMETER Experiment Name: At_42deg_Heat_cDNA_P Parameter: Temperature (deg C) Value: 42 vs. 22
  misc_feature: MA Experiment 20000111 PARAMETER Experiment Name: At_42deg_Heat_cDNA_P Parameter: Timepoint (hr) Value: 6
  misc_feature: MA Experiment 20000111 PARAMETER Experiment Name: At_42deg_Heat_cDNA_P Parameter: Tissue Value: Aerial
  misc_feature: MA Experiment ID: 20000113 Result: Up-regulated in Transcription
  misc_feature: MA Experiment 20000113 PARAMETER Experiment Name: At_42deg_Heat_cDNA_P Parameter: Temperature (deg C) Value: 42 vs. 22
  misc_feature: MA Experiment 20000113 PARAMETER Experiment Name: At_42deg_Heat_cDNA_P Parameter: Timepoint (hr) Value: 8
  misc_feature: MA Experiment 20000113 PARAMETER Experiment Name: At_42deg_Heat_cDNA_P Parameter: Tissue Value: Aerial
  misc_feature: MA Experiment ID: 20000117 Result: Down-regulated in Transcription
  misc_feature: MA Experiment 20000117 PARAMETER Experiment Name: At_100uM_ABA_Mutants_cDNA_P Parameter: Plant Line Value: Columbia
  misc_feature: MA Experiment 20000117 PARAMETER Experiment Name: At_100uM_ABA_Mutants_cDNA_P Parameter: Timepoint (hr) Value: 6
  misc_feature: MA Experiment 20000117 PARAMETER Experiment Name: At_100uM_ABA_Mutants_cDNA_P Parameter: Tissue Value: Aerial
  misc_feature: MA Experiment 20000117 PARAMETER Experiment Name: At_100uM_ABA_Mutants_cDNA_P Parameter: Treatment Value: 100uM ABA vs. No Treatment
  misc_feature: MA Experiment ID: 20000179 Result: Up-regulated in Transcription
  misc_feature: MA Experiment 20000179 PARAMETER Experiment Name: At_Germinating_Seeds_P Parameter: Age (hr) Value: 6 vs. 0
  misc_feature: MA Experiment 20000179 PARAMETER Experiment Name: At_Germinating_Seeds_P Parameter: Tissue Value: Germinating Seeds
  misc_feature: MA Experiment ID: 20000437 Result: Down-regulated in Transcription
  misc_feature: MA Experiment 20000437 PARAMETER Experiment Name: At_Drought_P Parameter: Age (day) Value: 8
  misc_feature: MA Experiment 20000437 PARAMETER Experiment Name: At_Drought_P Parameter: Organism Value: A. thaliana
  misc_feature: MA Experiment 20000437 PARAMETER Experiment Name: At_Drought_P Parameter: Plant Line Value: WS
  misc_feature: MA Experiment 20000437 PARAMETER Experiment Name: At_Drought_P Parameter: Timepoint (hr) Value: 24
  misc_feature: MA Experiment 20000437 PARAMETER Experiment Name: At_Drought_P Parameter: Tissue Value: Whole Plant
  misc_feature: MA Experiment 20000437 PARAMETER Experiment Name: At_Drought_P Parameter: Treatment Value: Drought vs. No Drought
gtctcctctccaccaagtgaatctctttctctctctctttttctccgcggaaggaatctcttcttctggttgcgtttgagtccgtacgaaaacaaaagaaaagagagagatggcggaagagaagaaagctccaatcagtgtctggactaccgtgaagcccttcgtcaatggcggtgcctctggtatgctcgctacttgcgttatccagccgatcgacatgattaaggtgaggattcaacttggtcagggatctgcagccagtataaccaccaacatgcttaagaatgagggcgttggtgccttctacaagggattatctgctgggttgctgaggcaagcaacttacacgacagcccgtcttggatcattcaagttgctgactgcaaaggcaattgagtctaatgatggaaagcctctaccgctgtatcagaaggcactatgtggtctgacagctggtgctattggtgcttgcgtcggtagtccagccgatctagcacttatcagaatgcaggccgataatactttgccgctagctcagcgcaggaattataccaatgctttccatgcgcttacccgtattagcgctgatgagggagttttagcactttggaaagggtgtgggcccactgtggtcagagctatggctttgaacatgggaatgcttgcatcttatgatcaaagtgctgaatacatgagagataatcttggtttcggggagatgtctacggtcgtaggagcaagtgctgtttctgggttctgcgctgcggcttgcagtctgccatttgactttgtcaaaactcagattcagaaaatgcaaccggatgctcaaggaaagtatccatacacaggttcgctcgattgtgcgatgaaaaccttaaaagaaggaggacctctgaaattttactcgggtttcccagtttactgtgtcaggattgcccctcacgtcatgatgacatggatcttcctaaaccagattacgaaatttcaaaagaagattggtatgtgaggaacaaatacagcagcaaaaaaataagatgagaagaacgaaaacacaattggaattgtgttcatttgctttttaatcatatacataacctgccttaaaagcatattattgtagctgtttgaactttaattttttgtttcggtcggtgattggtccggtgaattttaaattttcttctttggtggaagtttaag

SEQ ID NO: 30887 - protein, 298 aa, Arabidopsis thaliana
  peptide (1)..(298): Ceres Seq. ID no. 12371657
  misc_feature (81)..(298): Homolog of NCBI NO: 2331139 NR Description: 2-oxoglutarate/malate translocator [Oryza sativa]
  misc_feature (74)..(298): Homolog of NCBI NO: 19913111 NR Description: dicarboxylate/tricarboxylate carrier [Nicotiana
  misc_feature (3)..(298): Homolog of NCBI NO: 2130090 NR Description: 2-oxoglutarate/malate translocator (clones OMT134
  misc_feature (3)..(298): Homolog of NCBI NO: 2130089 NR Description: 2-oxoglutarate/malate translocator (clone
  misc_feature (4)..(298): Homolog of NCBI NO: 19913107 NR Description: dicarboxylate/tricarboxylate carrier [Nicotiana
  misc_feature (1)..(298): Homolog of NCBI NO: 10798640 NR Description: mitochondrial 2-oxoglutarate/malate carrier
  misc_feature (1)..(298): Homolog of NCBI NO: 19913105 NR Description: dicarboxylate/tricarboxylate carrier [Nicotiana
  misc_feature (4)..(298): Homolog of NCBI NO: 7489246 NR Description: oxoglutarate/malate translocator - potato
  misc_feature (1)..(298): Homolog of NCBI NO: 19913109 NR Description: dicarboxylate/tricarboxylate carrier [Nicotiana
  misc_feature (1)..(298): Homolog of NCBI NO: 15241167 NR Description: mitochondrial 2-oxoglutarate/malate translocator,
MAEEKKAPISVWTTVKPFVNGGASGMLATCVIQPIDMIKVRIQLGQGSAASITTNMLKNEGVGAFYKGLSAGLLRQATYTTARLGSFKLLTAKAIESNDGKPLPLYQKALCGLTAGAIGACVGSPADLALIRMQADNTLPLAQRRNYTNAFHALTRISADEGVLALWKGCGPTVVRAMALNMGMLASYDQSAEYMRDNLGFGEMSTVVGASAVSGFCAAACSLPFDFVKTQIQKMQPDAQGKYPYTGSLDCAMKTLKEGGPLKFYSGFPVYCVRIAPHVMMTWIFLNQITKFQKKIGM

SEQ ID NO: 30888 - protein, 273 aa, Arabidopsis thaliana
  peptide (1)..(273): Ceres Seq. ID no. 12371658
  misc_feature (56)..(273): Homolog of NCBI NO: 2331139 NR Description: 2-oxoglutarate/malate translocator [Oryza sativa]
  misc_feature (49)..(273): Homolog of NCBI NO: 19913111 NR Description: dicarboxylate/tricarboxylate carrier [Nicotiana
  misc_feature (1)..(273): Homolog of NCBI NO: 2130090 NR Description: 2-oxoglutarate/malate translocator (clones OMT134
  misc_feature (1)..(273): Homolog of NCBI NO: 2130089 NR Description: 2-oxoglutarate/malate translocator (clone
  misc_feature (1)..(273): Homolog of NCBI NO: 19913107 NR Description: dicarboxylate/tricarboxylate carrier [Nicotiana
  misc_feature (1)..(273): Homolog of NCBI NO: 10798640 NR Description: mitochondrial 2-oxoglutarate/malate carrier
  misc_feature (1)..(273): Homolog of NCBI NO: 19913105 NR Description: dicarboxylate/tricarboxylate carrier [Nicotiana
  misc_feature (1)..(273): Homolog of NCBI NO: 7489246 NR Description: oxoglutarate/malate translocator - potato
  misc_feature (1)..(273): Homolog of NCBI NO: 19913109 NR Description: dicarboxylate/tricarboxylate carrier [Nicotiana
  misc_feature (1)..(273): Homolog of NCBI NO: 15241167 NR Description: mitochondrial 2-oxoglutarate/malate translocator,
MLATCVIQPIDMIKVRIQLGQGSAASITTNMLKNEGVGAFYKGLSAGLLRQATYTTARLGSFKLLTAKAIESNDGKPLPLYQKALCGLTAGAIGACVGSPADLALIRMQADNTLPLAQRRNYTNAFHALTRISADEGVLALWKGCGPTVVRAMALNMGMLASYDQSAEYMRDNLGFGEMSTVVGASAVSGFCAAACSLPFDFVKTQIQKMQPDAQGKYPYTGSLDCAMKTLKEGGPLKFYSGFPVYCVRIAPHVMMTWIFLNQITKFQKKIGM

SEQ ID NO: 30889 - protein, 262 aa, Arabidopsis thaliana
  peptide (1)..(262): Ceres Seq. ID no. 12371659
  misc_feature (45)..(262): Homolog of NCBI NO: 2331139 NR Description: 2-oxoglutarate/malate translocator [Oryza sativa]
  misc_feature (38)..(262): Homolog of NCBI NO: 19913111 NR Description: dicarboxylate/tricarboxylate carrier [Nicotiana
  misc_feature (1)..(262): Homolog of NCBI NO: 2130090 NR Description: 2-oxoglutarate/malate translocator (clones OMT134
  misc_feature (1)..(262): Homolog of NCBI NO: 2130089 NR Description: 2-oxoglutarate/malate translocator (clone
  misc_feature (1)..(262): Homolog of NCBI NO: 19913107 NR Description: dicarboxylate/tricarboxylate carrier [Nicotiana
  misc_feature (1)..(262): Homolog of NCBI NO: 10798640 NR Description: mitochondrial 2-oxoglutarate/malate carrier
  misc_feature (1)..(262): Homolog of NCBI NO: 19913105 NR Description: dicarboxylate/tricarboxylate carrier [Nicotiana
  misc_feature (1)..(262): Homolog of NCBI NO: 7489246 NR Description: oxoglutarate/malate translocator - potato
  misc_feature (1)..(262): Homolog of NCBI NO: 19913109 NR Description: dicarboxylate/tricarboxylate carrier [Nicotiana
  misc_feature (1)..(262): Homolog of NCBI NO: 15241167 NR Description: mitochondrial 2-oxoglutarate/malate translocator,
MIKVRIQLGQGSAASITTNMLKNEGVGAFYKGLSAGLLRQATYTTARLGSFKLLTAKAIESNDGKPLPLYQKALCGLTAGAIGACVGSPADLALIRMQADNTLPLAQRRNYTNAFHALTRISADEGVLALWKGCGPTVVRAMALNMGMLASYDQSAEYMRDNLGFGEMSTVVGASAVSGFCAAACSLPFDFVKTQIQKMQPDAQGKYPYTGSLDCAMKTLKEGGPLKFYSGFPVYCVRIAPHVMMTWIFLNQITKFQKKIGM

SEQ ID NO: 30890 - DNA, 1501 bp, Arabidopsis thaliana
  misc_feature (1)..(1501): Ceres Seq. ID no. 12321354
  misc_feature: MA Experiment ID: 108473 Result: Up-regulated in Transcription
  misc_feature: MA Experiment 108473 PARAMETER Experiment Name: At_Drought_Flowers_cDNA_P Parameter: Timepoint (hr) Value: 7 d
  misc_feature: MA Experiment 108473 PARAMETER Experiment Name: At_Drought_Flowers_cDNA_P Parameter: Tissue Value: Flower
  misc_feature: MA Experiment 108473 PARAMETER Experiment Name: At_Drought_Flowers_cDNA_P Parameter: Treatment Value: Drought vs. No Drought
  misc_feature: MA Experiment ID: 108572 Result: Up-regulated in Transcription
  misc_feature: MA Experiment 108572 PARAMETER Experiment Name: At_Drought_cDNA_P Parameter: Timepoint (hr) Value: 1
  misc_feature: MA Experiment 108572 PARAMETER Experiment Name: At_Drought_cDNA_P Parameter: Tissue Value: Aerial
  misc_feature: MA Experiment 108572 PARAMETER Experiment Name: At_Drought_cDNA_P Parameter: Treatment Value: Drought vs. No Drought
  misc_feature: MA Experiment ID: 108573 Result: Up-regulated in Transcription
  misc_feature: MA Experiment 108573 PARAMETER Experiment Name: At_Drought_cDNA_P Parameter: Timepoint (hr) Value: 6
  misc_feature: MA Experiment 108573 PARAMETER Experiment Name: At_Drought_cDNA_P Parameter: Tissue Value: Aerial
  misc_feature: MA Experiment 108573 PARAMETER Experiment Name: At_Drought_cDNA_P Parameter: Treatment Value: Drought vs. No Drought
  misc_feature: MA Experiment ID: 108579 Result: Down-regulated in Transcription
  misc_feature: MA Experiment 108579 PARAMETER Experiment Name: At_4deg_Cold_cDNA_P Parameter: Temperature (deg C) Value: 4 vs. 22
  misc_feature: MA Experiment 108579 PARAMETER Experiment Name: At_4deg_Cold_cDNA_P Parameter: Timepoint (hr) Value: 6
  misc_feature: MA Experiment 108579 PARAMETER Experiment Name: At_4deg_Cold_cDNA_P Parameter: Tissue Value: Aerial
  misc_feature: MA Experiment ID: 108585 Result: Up-regulated in Transcription
  misc_feature: MA Experiment 108585 PARAMETER Experiment Name: At_5mM_NaNP_cDNA_P Parameter: Timepoint (hr) Value: 6
  misc_feature: MA Experiment 108585 PARAMETER Experiment Name: At_5mM_NaNP_cDNA_P Parameter: Tissue Value: Aerial
  misc_feature: MA Experiment 108585 PARAMETER Experiment Name: At_5mM_NaNP_cDNA_P Parameter: Treatment Value: null
  misc_feature: MA Experiment ID: 20000113 Result: Down-regulated in Transcription
  misc_feature: MA Experiment 20000113 PARAMETER Experiment Name: At_42deg_Heat_cDNA_P Parameter: Temperature (deg C) Value: 42 vs. 22
  misc_feature: MA Experiment 20000113 PARAMETER Experiment Name: At_42deg_Heat_cDNA_P Parameter: Timepoint (hr) Value: 8
  misc_feature: MA Experiment 20000113 PARAMETER Experiment Name: At_42deg_Heat_cDNA_P Parameter: Tissue Value: Aerial
accgctcttcttctatcgatctctgatctcctcttctctctgtcttctgagttctgtctacgcttcgtcgccgatcccggccagactccgtcttaccggcacaaaccctagattcccggaggacgaaattcgttttttcgccggaactaaattaaggagatttgagaggctatgggtacaacaacgacaacaagcgctgtgtatatccatgttatcgaggatgtcgtcaacaaagttcgtgaggagttcattaacaacggaggtcctggcgagagtgttctcagcgagcttcaaggaatttgggagacgaagatgatgcaagccggagtcttgaatggaccaatagagaggtcatcggctcagaagccaacacctggtggtccactgactcatgatttgaatgttccttatgaaggtacagaggagtacgagactcccactgctgaaatgctcttccctcctacaccattgcagactccccttccaacgccgcttcccggtactgctgataactcatccatgtataacatccctaccggctcaagtgattatcccactcctggaactgagaatggagtcaacattgatgttaaagcaagacctagtccttatatgccaccgccttctccgtggactaatcctagacttgatgtcaatgttgcttatgtggatggccgtgatgagcctgagagaggaaactctaatcagcagtttacgcaggatttatttgtgccatcttctgggaaacgaaaacgtgatgattcatctgcacactatcaaaatggtggatctatacctcaacaagatggtgcaagcgatgctatccctgaggcaaactttgaatgtgctgcactccgtataacctatgttggcgatagaaagatcccacgagatttgattggctcatcatcgaagattccccaagttgatgggccaatgcctgacccgtatgatgaaatgttgtccacacccaatatatacagttatcaaggacccaatgaagagtttaatgaggccagaactcctgctccaaacgaaatccaaacgagcactcctgttgctgtaccaaacgatatcattgaagatgatgaagagctgttgaacgaagatgatgatgatgacgagttggacgacctagaaagtggcgaggatatgaacacacaacacctggttttagctcaatttgacaaggtgacgcgcacaaagagcaggtggaagtgcagtctgaaagacgggatcatgcatataaacgataaggacattctcttcaacaaagcaacaggcgagttcgacttctgatcttgacactagtaatgcttctaggaaagtcagagtccttcaaatgtcggatgtctttctttgtaccttatgatttagaccgacctccgagtgagagacatgattatttatgggaatatgtactctggttggcttgttgtacaaaaagaacagatttttccggccgaagaaggcttatcaactttgacttgtttcatgagtt

SEQ ID NO: 30891 - protein, 375 aa, Arabidopsis thaliana
  peptide (1)..(375): Ceres Seq. ID no. 12321355
  misc_feature (1)..(375): Pfam Name: Transcription factor IIA, alpha/beta subunit Pfam Description: Transcription factor IIA, alpha/beta subunit
  misc_feature (303)..(375): Homolog of NCBI NO: 15237841 NR Description: putative protein; protein id: At5g59230.1
  misc_feature (1)..(327): Homolog of NCBI NO: 25406976 NR Description: protein F22G5.18 [imported] - Arabidopsis
  misc_feature (59)..(368): Homolog of NCBI NO: 25406978 NR Description: protein F22G5.14 [imported] - Arabidopsis
  misc_feature (163)..(375): Homolog of NCBI NO: 17065294 NR Description: similar to TFIIA [Arabidopsis thaliana]
  misc_feature (59)..(375): Homolog of NCBI NO: 25406976 NR Description: protein F22G5.18 [imported] - Arabidopsis
  misc_feature (1)..(341): Homolog of NCBI NO: 25406978 NR Description: protein F22G5.14 [imported] - Arabidopsis
  misc_feature (222)..(375): Homolog of NCBI NO: 1429226 NR Description: TFIIA [Arabidopsis thaliana]
  misc_feature (1)..(174): Homolog of NCBI NO: 1429226 NR Description: TFIIA [Arabidopsis thaliana]
  misc_feature (1)..(375): Homolog of NCBI NO: 30680148 NR Description: transcription factor IIA large subunit
  misc_feature (1)..(375): Homolog of NCBI NO: 18390773 NR Description: transcription factor IIA large subunit
MGTTTTTSAVYIHVIEDVVNKVREEFINNGGPGESVLSELQGIWETKMMQAGVLNGPIERSSAQKPTPGGPLTHDLNVPYEGTEEYETPTAEMLFPPTPLQTPLPTPLPGTADNSSMYNIPTGSSDYPTPGTENGVNIDVKARPSPYMPPPSPWTNPRLDVNVAYVDGRDEPERGNSNQQFTQDLFVPSSGKRKRDDSSAHYQNGGSIPQQDGASDAIPEANFECAALRITYVGDRKIPRDLIGSSSKIPQVDGPMPDPYDEMLSTPNIYSYQGPNEEFNEARTPAPNEIQTSTPVAVPNDIIEDDEELLNEDDDDDELDDLESGEDMNTQHLVLAQFDKVTRTKSRWKCSLKDGIMHINDKDILFNKATGEFDF

SEQ ID NO: 30892 - protein, 328 aa, Arabidopsis thaliana
  peptide (1)..(328): Ceres Seq. ID no. 12321356
  misc_feature (1)..(328): Pfam Name: Transcription factor IIA, alpha/beta subunit Pfam Description: Transcription factor IIA, alpha/beta subunit
  misc_feature (256)..(328): Homolog of NCBI NO: 15237841 NR Description: putative protein; protein id: At5g59230.1
  misc_feature (1)..(280): Homolog of NCBI NO: 25406976 NR Description: protein F22G5.18 [imported] - Arabidopsis
  misc_feature (12)..(321): Homolog of NCBI NO: 25406978 NR Description: protein F22G5.14 [imported] - Arabidopsis
  misc_feature (116)..(328): Homolog of NCBI NO: 17065294 NR Description: similar to TFIIA [Arabidopsis thaliana]
  misc_feature (12)..(328): Homolog of NCBI NO: 25406976 NR Description: protein F22G5.18 [imported] - Arabidopsis
  misc_feature (1)..(294): Homolog of NCBI NO: 25406978 NR Description: protein F22G5.14 [imported] - Arabidopsis
  misc_feature (175)..(328): Homolog of NCBI NO: 1429226 NR Description: TFIIA [Arabidopsis thaliana]
  misc_feature (1)..(127): Homolog of NCBI NO: 1429226 NR Description: TFIIA [Arabidopsis thaliana]
  misc_feature (1)..(328): Homolog of NCBI NO: 30680148 NR Description: transcription factor IIA large subunit
  misc_feature (1)..(328): Homolog of NCBI NO: 18390773 NR Description: transcription factor IIA large subunit
MMQAGVLNGPIERSSAQKPTPGGPLTHDLNVPYEGTEEYETPTAEMLFPPTPLQTPLPTPLPGTADNSSMYNIPTGSSDYPTPGTENGVNIDVKARPSPYMPPPSPWTNPRLDVNVAYVDGRDEPERGNSNQQFTQDLFVPSSGKRKRDDSSAHYQNGGSIPQQDGASDAIPEANFECAALRITYVGDRKIPRDLIGSSSKIPQVDGPMPDPYDEMLSTPNIYSYQGPNEEFNEARTPAPNEIQTSTPVAVPNDIIEDDEELLNEDDDDDELDDLESGEDMNTQHLVLAQFDKVTRTKSRWKCSLKDGIMHINDKDILFNKATGEFDF

SEQ ID NO: 30893 - protein, 327 aa, Arabidopsis thaliana
  peptide (1)..(327): Ceres Seq. ID no. 12321357
  misc_feature (1)..(327): Pfam Name: Transcription factor IIA, alpha/beta subunit Pfam Description: Transcription factor IIA, alpha/beta subunit
  misc_feature (255)..(327): Homolog of NCBI NO: 15237841 NR Description: putative protein; protein id: At5g59230.1
  misc_feature (1)..(279): Homolog of NCBI NO: 25406976 NR Description: protein F22G5.18 [imported] - Arabidopsis
  misc_feature (11)..(320): Homolog of NCBI NO: 25406978 NR Description: protein F22G5.14 [imported] - Arabidopsis
  misc_feature (115)..(327): Homolog of NCBI NO: 17065294 NR Description: similar to TFIIA [Arabidopsis thaliana]
  misc_feature (11)..(327): Homolog of NCBI NO: 25406976 NR Description: protein F22G5.18 [imported] - Arabidopsis
  misc_feature (1)..(293): Homolog of NCBI NO: 25406978 NR Description: protein F22G5.14 [imported] - Arabidopsis
  misc_feature (174)..(327): Homolog of NCBI NO: 1429226 NR Description: TFIIA [Arabidopsis thaliana]
  misc_feature (1)..(126): Homolog of NCBI NO: 1429226 NR Description: TFIIA [Arabidopsis thaliana]
  misc_feature (1)..(327): Homolog of NCBI NO: 30680148 NR Description: transcription factor IIA large subunit
  misc_feature (1)..(327): Homolog of NCBI NO: 18390773 NR Description: transcription factor IIA large subunit
MQAGVLNGPIERSSAQKPTPGGPLTHDLNVPYEGTEEYETPTAEMLFPPTPLQTPLPTPLPGTADNSSMYNIPTGSSDYPTPGTENGVNIDVKARPSPYMPPPSPWTNPRLDVNVAYVDGRDEPERGNSNQQFTQDLFVPSSGKRKRDDSSAHYQNGGSIPQQDGASDAIPEANFECAALRITYVGDRKIPRDLIGSSSKIPQVDGPMPDPYDEMLSTPNIYSYQGPNEEFNEARTPAPNEIQTSTPVAVPNDIIEDDEELLNEDDDDDELDDLESGEDMNTQHLVLAQFDKVTRTKSRWKCSLKDGIMHINDKDILFNKATGEFDF

SEQ ID NO: 30894 - DNA, 540 bp, Arabidopsis thaliana; identical to SEQ ID NO: 26058
  misc_feature (1)..(540): Ceres Seq. ID no. 12599931
  misc_feature: MA Experiment ID: 108595 Result: Up-regulated in Transcription
  misc_feature: MA Experiment 108595 PARAMETER Experiment Name: At_Ler-pi_Ovule_cDNA_P Parameter: Plant Line Value: null
  misc_feature: MA Experiment ID: 20000113 Result: Up-regulated in Transcription
  misc_feature: MA Experiment 20000113 PARAMETER Experiment Name: At_42deg_Heat_cDNA_P Parameter: Temperature (deg C) Value: 42 vs. 22
  misc_feature: MA Experiment 20000113 PARAMETER Experiment Name: At_42deg_Heat_cDNA_P Parameter: Timepoint (hr) Value: 8
  misc_feature: MA Experiment 20000113 PARAMETER Experiment Name: At_42deg_Heat_cDNA_P Parameter: Tissue Value: Aerial
  misc_feature: MA Experiment ID: 20001451 Result: Up-regulated in Transcription
  misc_feature: MA Experiment 20001451 PARAMETER Experiment Name: At_Far-red-induction_P Parameter: Age (day) Value: 7
  misc_feature: MA Experiment 20001451 PARAMETER Experiment Name: At_Far-red-induction_P Parameter: Light Value: Far-red vs. White
  misc_feature: MA Experiment 20001451 PARAMETER Experiment Name: At_Far-red-induction_P Parameter: Organism Value: A. thaliana
  misc_feature: MA Experiment 20001451 PARAMETER Experiment Name: At_Far-red-induction_P Parameter: Plant Line Value: Columbia
  misc_feature: MA Experiment 20001451 PARAMETER Experiment Name: At_Far-red-induction_P Parameter: Timepoint (hr) Value: 24
  misc_feature: MA Experiment 20001451 PARAMETER Experiment Name: At_Far-red-induction_P Parameter: Tissue Value: Whole Plant

SEQ ID NO: 30895 - protein, 93 aa, Arabidopsis thaliana; identical to SEQ ID NO: 26059
  peptide (1)..(93): Ceres Seq. ID no. 12599932
  misc_feature (5)..(80): Pfam Name: Uncharacterised protein family (UPF0185) Pfam Description: Uncharacterised protein family (UPF0185)
  misc_feature (5)..(80): Pfam Name: Uncharacterised protein family (UPF0185) Pfam Description: Uncharacterised protein family (UPF0185)
  misc_feature (6)..(80): Homolog of NCBI NO: 1235522 NR Description: ORF is homologous to hypothetical 9.8 kD protein
  misc_feature (6)..(86): Homolog of NCBI NO: 28277496 NR Description: Similar to RIKEN cDNA 1810045K17 gene [Danio
  misc_feature (6)..(86): Homolog of NCBI NO: 37595394 NR Description: hypothetical protein BM-002 [Danio rerio]
  misc_feature (6)..(87): Homolog of NCBI NO: 7705300 NR Description: hypothetical protein BM-002 [Homo sapiens]
  misc_feature (4)..(86): Homolog of NCBI NO: 17557033 NR Description: Eukaryotic protein similar to human bone marrow
  misc_feature (6)..(80): Homolog of NCBI NO: 1235522 NR Description: ORF is homologous to hypothetical 9.8 kD protein
  misc_feature (6)..(86): Homolog of NCBI NO: 37595394 NR Description: hypothetical protein BM-002 [Danio rerio]
  misc_feature (4)..(86): Homolog of NCBI NO: 17557033 NR Description: Eukaryotic protein similar to human bone marrow
  misc_feature (1)..(93): Homolog of NCBI NO: 15217447 NR Description: unknown protein
  misc_feature (2)..(88): Homolog of NCBI NO: 34905822 NR Description: P0483G10.15 [Oryza sativa (japonica
  misc_feature (1)..(88): Homolog of NCBI NO: 20140686 NR Description: Hypothetical protein pr46A
  misc_feature (1)..(87): Homolog of NCBI NO: 40889046 NR Description: Chain A, Solution Structure Of Mouse Hypothetical
  misc_feature (1)..(86): Homolog of NCBI NO: 39589640 NR Description: Hypothetical protein CBG12253 [Caenorhabditis
  misc_feature (6)..(87): Homolog of NCBI NO: 7705300 NR Description: hypothetical protein BM-002 [Homo sapiens]
  misc_feature (6)..(86): Homolog of NCBI NO: 28277496 NR Description: Similar to RIKEN cDNA 1810045K17 gene [Danio
  misc_feature (1)..(86): Homolog of NCBI NO: 39589640 NR Description: Hypothetical protein CBG12253 [Caenorhabditis
  misc_feature (1)..(87): Homolog of NCBI NO: 40889046 NR Description: Chain A, Solution Structure Of Mouse Hypothetical
  misc_feature (1)..(88): Homolog of NCBI NO: 20140686 NR Description: Hypothetical protein pr46A
  misc_feature (2)..(88): Homolog of NCBI NO: 34905822 NR Description: P0483G10.15 [Oryza sativa (japonica
  misc_feature (1)..(93): Homolog of NCBI NO: 15217447 NR Description: unknown protein

SEQ ID NO: 30896 - DNA, 844 bp, Arabidopsis thaliana
  misc_feature (1)..(844): Ceres Seq. ID no. 12337495
  misc_feature: MA Experiment ID: 108434 Result: Up-regulated in Transcription
  misc_feature: MA Experiment 108434 PARAMETER Experiment Name: At_Root_Tips_cDNA_P Parameter: Tissue Value: Root Tips
  misc_feature: MA Experiment ID: 108462 Result: Down-regulated in Transcription
  misc_feature: MA Experiment 108462 PARAMETER Experiment Name: At_Germinating_Seeds_cDNA_P Parameter: Age (day) Value: 2 vs. 0
  misc_feature: MA Experiment 108462 PARAMETER Experiment Name: At_Germinating_Seeds_cDNA_P Parameter: Tissue Value: Germinating Seeds
  misc_feature: MA Experiment ID: 108463 Result: Down-regulated in Transcription
  misc_feature: MA Experiment 108463 PARAMETER Experiment Name: At_Germinating_Seeds_cDNA_P Parameter: Age (day) Value: 3 vs. 0
  misc_feature: MA Experiment 108463 PARAMETER Experiment Name: At_Germinating_Seeds_cDNA_P Parameter: Tissue Value: Germinating Seeds
  misc_feature: MA Experiment ID: 108464 Result: Down-regulated in Transcription
  misc_feature: MA Experiment 108464 PARAMETER Experiment Name: At_Germinating_Seeds_cDNA_P Parameter: Age (day) Value: 4 vs. 0
  misc_feature: MA Experiment 108464 PARAMETER Experiment Name: At_Germinating_Seeds_cDNA_P Parameter: Tissue Value: Germinating Seeds
  misc_feature: MA Experiment ID: 20000180 Result: Down-regulated in Transcription
  misc_feature: MA Experiment 20000180 PARAMETER Experiment Name: At_Germinating_Seeds_P Parameter: Age (hr) Value: 24 vs. 0
  misc_feature: MA Experiment 20000180 PARAMETER Experiment Name: At_Germinating_Seeds_P Parameter: Tissue Value: Germinating Seeds
acggcggtggagaaaaaacaaaagagagcgagacaaagagagactacaatggctgttccaagaggaggaaatggtttgaatgaagaagaagatgttgacggagaaaacgctatctttgaggaaaacggtgttgactacgacaccgattccgagcttccctctcacctccgtgacttggccgccgctgctcaggccggagatgtcgccgccttgcgcaccgccatcgacaatttgaatgggagagtcgatgagccactcgaggataatgactcggcacttcacttggcatgtctatatggtcacctaccttgtgttcagctgctcttagaaagaggagctgatatggaagtgaaagatgaagacgaagcaattcctctacatgatgcttgtgctggaggatacttggaaatagtacagcttctttttagccgagctagtagtcctgaatgtgtgaagagaatgattgaaacagcagatatagaaggtgatactcctctgcatcacgcagcaagaggtgaacatgttgacgtggttaggtttttgctgggttccggggcttcaccaacgacacaaaactcctatgggaagacaccaggtgaattagctgatttaaacactgatgctaagaggatactcgaagaagcgataaacaactcaatgatctcctagtgatgctgcaaatctgcagagttcattggccagttttggcgactcagtgaagtagtagcaaaatgttaactttttcttaatcctgttttttggtggtttcatatacaaaaggtttcaaattttgatacctatggaattaagaacttccgtgtcggttttaatcatgaaattatta

SEQ ID NO: 30897 - protein, 222 aa, Arabidopsis thaliana
  peptide (1)..(222): Ceres Seq. ID no. 12337496
  misc_feature (88)..(120): Pfam Name: Ankyrin repeat Pfam Description: Ankyrin repeat
  misc_feature (58)..(221): Homolog of NCBI NO: 3929221 NR Description: TRF1-interacting ankyrin-related ADP-ribose
  misc_feature (31)..(221): Homolog of NCBI NO: 27461955 NR Description: tankyrase 1 [Gallus gallus]
  misc_feature (33)..(213): Homolog of NCBI NO: 28274854 NR Description: ankyrin repeat protein E4_8 [synthetic construct]
  misc_feature (58)..(214): Homolog of NCBI NO: 30684671 NR Description: ankyrin-related protein [Arabidopsis thaliana]
  misc_feature (57)..(213): Homolog of NCBI NO: 28373666 NR Description: Chain A, Sank E3_5: An Artificial Ankyrin Repeat
  misc_feature (93)..(215): Homolog of NCBI NO: 28373837 NR Description: Chain A, 4ank: A Designed Ankyrin Repeat Protein
  misc_feature (17)..(107): Homolog of NCBI NO: 27497215 NR Description: Unknown protein [Oryza sativa (japonica
  misc_feature (17)..(211): Homolog of NCBI NO: 15451616 NR Description: Hypothetical protein with similarity to ankyrins
  misc_feature (17)..(196): Homolog of NCBI NO: 6681330 NR Description: hypothetical protein [Arabidopsis thaliana]
  misc_feature (17)..(222): Homolog of NCBI NO: 18398673 NR Description: expressed protein
TAVEKKQKRARQRETTMAVPRGGNGLNEEEDVDGENAIFEENGVDYDTDSELPSHLRDLAAAAQAGDVAALRTAIDNLNGRVDEPLEDNDSALHLACLYGHLPCVQLLLERGADMEVKDEDEAIPLHDACAGGYLEIVQLLFSRASSPECVKRMIETADIEGDTPLHHAARGEHVDVVRFLLGSGASPTTQNSYGKTPGELADLNTDAKRILEEAINNSMIS

SEQ ID NO: 30898 - protein, 206 aa, Arabidopsis thaliana
  peptide (1)..(206): Ceres Seq. ID no. 12337497
  misc_feature (72)..(104): Pfam Name: Ankyrin repeat Pfam Description: Ankyrin repeat
  misc_feature (42)..(205): Homolog of NCBI NO: 3929221 NR Description: TRF1-interacting ankyrin-related ADP-ribose
  misc_feature (15)..(205): Homolog of NCBI NO: 27461955 NR Description: tankyrase 1 [Gallus gallus]
  misc_feature (17)..(197): Homolog of NCBI NO: 28274854 NR Description: ankyrin repeat protein E4_8 [synthetic construct]
  misc_feature (42)..(198): Homolog of NCBI NO: 30684671 NR Description: ankyrin-related protein [Arabidopsis thaliana]
  misc_feature (41)..(197): Homolog of NCBI NO: 28373666 NR Description: Chain A, Sank E3_5: An Artificial Ankyrin Repeat
  misc_feature (77)..(199): Homolog of NCBI NO: 28373837 NR Description: Chain A, 4ank: A Designed Ankyrin Repeat Protein
  misc_feature (1)..(91): Homolog of NCBI NO: 27497215 NR Description: Unknown protein [Oryza sativa (japonica
  misc_feature (1)..(195): Homolog of NCBI NO: 15451616 NR Description: Hypothetical protein with similarity to ankyrins
  misc_feature (1)..(180): Homolog of NCBI NO: 6681330 NR Description: hypothetical protein [Arabidopsis thaliana]
  misc_feature (1)..(206): Homolog of NCBI NO: 18398673 NR Description: expressed protein
MAVPRGGNGLNEEEDVDGENAIFEENGVDYDTDSELPSHLRDLAAAAQAGDVAALRTAIDNLNGRVDEPLEDNDSALHLACLYGHLPCVQLLLERGADMEVKDEDEAIPLHDACAGGYLEIVQLLFSRASSPECVKRMIETADIEGDTPLHHAARGEHVDVVRFLLGSGASPTTQNSYGKTPGELADLNTDAKRILEEAINNSMIS

SEQ ID NO: 30899 - DNA, 869 bp, Arabidopsis thaliana
  misc_feature (1)..(869): Ceres Seq. ID no. 12332915
  misc_feature: MA Experiment ID: 108434 Result: Down-regulated in Transcription
  misc_feature: MA Experiment 108434 PARAMETER Experiment Name: At_Root_Tips_cDNA_P Parameter: Tissue Value: Root Tips
  misc_feature: MA Experiment ID: 108488 Result: Down-regulated in Transcription
  misc_feature: MA Experiment ID: 108577 Result: Down-regulated in Transcription
  misc_feature: MA Experiment 108577 PARAMETER Experiment Name: At_42deg_Heat_cDNA_P Parameter: Temperature (deg C) Value: 42 vs. 22
  misc_feature: MA Experiment 108577 PARAMETER Experiment Name: At_42deg_Heat_cDNA_P Parameter: Timepoint (hr) Value: 6
  misc_feature: MA Experiment 108577 PARAMETER Experiment Name: At_42deg_Heat_cDNA_P Parameter: Tissue Value: Aerial
  misc_feature: MA Experiment ID: 108605 Result: Up-regulated in Transcription
  misc_feature: MA Experiment 108605 PARAMETER Experiment Name: At_100uM_ABA_cDNA_P Parameter: Timepoint (hr) Value: 6
  misc_feature: MA Experiment 108605 PARAMETER Experiment Name: At_100uM_ABA_cDNA_P Parameter: Tissue Value: Aerial
  misc_feature: MA Experiment 108605 PARAMETER Experiment Name: At_100uM_ABA_cDNA_P Parameter: Treatment Value: 100uM ABA vs. No Treatment
  misc_feature: MA Experiment ID: 108668 Result: Up-regulated in Transcription
  misc_feature: MA Experiment 108668 PARAMETER Experiment Name: At_2mM_SA_cDNA_P Parameter: Plant Line Value: WS
  misc_feature: MA Experiment 108668 PARAMETER Experiment Name: At_2mM_SA_cDNA_P Parameter: Timepoint (hr) Value: 6
  misc_feature: MA Experiment 108668 PARAMETER Experiment Name: At_2mM_SA_cDNA_P Parameter: Treatment Value: 2mM SA vs. No Treatment
  misc_feature: MA Experiment ID: 20000069 Result: Up-regulated in Transcription
  misc_feature: MA Experiment 20000069 PARAMETER Experiment Name: At_100uM_ABA_Mutants_cDNA_P Parameter: Plant Line Value: CS23
  misc_feature: MA Experiment 20000069 PARAMETER Experiment Name: At_100uM_ABA_Mutants_cDNA_P Parameter: Timepoint (hr) Value: 6
  misc_feature: MA Experiment 20000069 PARAMETER Experiment Name: At_100uM_ABA_Mutants_cDNA_P Parameter: Tissue Value: Aerial
  misc_feature: MA Experiment 20000069 PARAMETER Experiment Name: At_100uM_ABA_Mutants_cDNA_P Parameter: Treatment Value: 100uM ABA vs. No Treatment
  misc_feature: MA Experiment ID: 20000070 Result: Up-regulated in Transcription
  misc_feature: MA Experiment 20000070 PARAMETER Experiment Name: At_100uM_ABA_Mutants_cDNA_P Parameter: Plant Line Value: CS24
  misc_feature: MA Experiment 20000070 PARAMETER Experiment Name: At_100uM_ABA_Mutants_cDNA_P Parameter: Timepoint (hr) Value: 6
  misc_feature: MA Experiment 20000070 PARAMETER Experiment Name: At_100uM_ABA_Mutants_cDNA_P Parameter: Tissue Value: Aerial
  misc_feature: MA Experiment 20000070 PARAMETER Experiment Name: At_100uM_ABA_Mutants_cDNA_P Parameter: Treatment Value: 100uM ABA vs. No Treatment
  misc_feature: MA Experiment ID: 20000071 Result: Up-regulated in Transcription
  misc_feature: MA Experiment 20000071 PARAMETER Experiment Name: At_100uM_ABA_Mutants_cDNA_P Parameter: Plant Line Value: CS8104
  misc_feature: MA Experiment 20000071 PARAMETER Experiment Name: At_100uM_ABA_Mutants_cDNA_P Parameter: Timepoint (hr) Value: 6
  misc_feature: MA Experiment 20000071 PARAMETER Experiment Name: At_100uM_ABA_Mutants_cDNA_P Parameter: Tissue Value: Aerial
  misc_feature: MA Experiment 20000071 PARAMETER Experiment Name: At_100uM_ABA_Mutants_cDNA_P Parameter: Treatment Value: 100uM ABA vs. No Treatment
  misc_feature: MA Experiment ID: 20000086 Result: Up-regulated in Transcription
  misc_feature: MA Experiment 20000086 PARAMETER Experiment Name: At_100uM_ABA_Mutants_cDNA_P Parameter: Plant Line Value: CS22
  misc_feature: MA Experiment 20000086 PARAMETER Experiment Name: At_100uM_ABA_Mutants_cDNA_P Parameter: Timepoint (hr) Value: 6
  misc_feature: MA Experiment 20000086 PARAMETER Experiment Name: At_100uM_ABA_Mutants_cDNA_P Parameter: Tissue Value: Aerial
  misc_feature: MA Experiment 20000086 PARAMETER Experiment Name: At_100uM_ABA_Mutants_cDNA_P Parameter: Treatment Value: 100uM ABA vs. No Treatment
  misc_feature: MA Experiment ID: 20000087 Result: Up-regulated in Transcription
  misc_feature: MA Experiment 20000087 PARAMETER Experiment Name: At_100uM_ABA_Mutants_cDNA_P Parameter: Plant Line Value: WS
  misc_feature: MA Experiment 20000087 PARAMETER Experiment Name: At_100uM_ABA_Mutants_cDNA_P Parameter: Timepoint (hr) Value: 6
  misc_feature: MA Experiment 20000087 PARAMETER Experiment Name: At_100uM_ABA_Mutants_cDNA_P Parameter: Tissue Value: Aerial
  misc_feature: MA Experiment 20000087 PARAMETER Experiment Name: At_100uM_ABA_Mutants_cDNA_P Parameter: Treatment Value: 100uM ABA vs. No Treatment
  misc_feature: MA Experiment ID: 20000088 Result: Up-regulated in Transcription
  misc_feature: MA Experiment 20000088 PARAMETER Experiment Name: At_100uM_ABA_Mutants_cDNA_P Parameter: Plant Line Value: Landsberg
  misc_feature: MA Experiment 20000088 PARAMETER Experiment Name: At_100uM_ABA_Mutants_cDNA_P Parameter: Timepoint (hr) Value: 6
  misc_feature: MA Experiment 20000088 PARAMETER Experiment Name: At_100uM_ABA_Mutants_cDNA_P Parameter: Tissue Value: Aerial
  misc_feature: MA Experiment 20000088 PARAMETER Experiment Name: At_100uM_ABA_Mutants_cDNA_P Parameter: Treatment Value: 100uM ABA vs. No Treatment
  misc_feature: MA Experiment ID: 20000089 Result: Up-regulated in Transcription
  misc_feature: MA Experiment ID: 20000090 Result: Up-regulated in Transcription
  misc_feature: MA Experiment ID: 20000117 Result: Up-regulated in Transcription
  misc_feature: MA Experiment 20000117 PARAMETER Experiment Name: At_100uM_ABA_Mutants_cDNA_P Parameter: Plant Line Value: Columbia
  misc_feature: MA Experiment 20000117 PARAMETER Experiment Name: At_100uM_ABA_Mutants_cDNA_P Parameter: Timepoint (hr) Value: 6
  misc_feature: MA Experiment 20000117 PARAMETER Experiment Name: At_100uM_ABA_Mutants_cDNA_P Parameter: Tissue Value: Aerial
  misc_feature: MA Experiment 20000117 PARAMETER Experiment Name: At_100uM_ABA_Mutants_cDNA_P Parameter: Treatment Value: 100uM ABA vs. No Treatment
  misc_feature: MA Experiment ID: 20000166 Result: Up-regulated in Transcription
  misc_feature: MA Experiment 20000166 PARAMETER Experiment Name: At_100uM_ABA_P Parameter: Age (day) Value: 14
  misc_feature: MA Experiment 20000166 PARAMETER Experiment Name: At_100uM_ABA_P Parameter: Organism Value: A. thaliana
  misc_feature: MA Experiment 20000166 PARAMETER Experiment Name: At_100uM_ABA_P Parameter: Plant Line Value: WS
  misc_feature: MA Experiment 20000166 PARAMETER Experiment Name: At_100uM_ABA_P Parameter: Timepoint (hr) Value: 1
  misc_feature: MA Experiment 20000166 PARAMETER Experiment Name: At_100uM_ABA_P Parameter: Tissue Value: Aerial
  misc_feature: MA Experiment 20000166 PARAMETER Experiment Name: At_100uM_ABA_P Parameter: Treatment Value: 100uM ABA vs. No Treatment
  misc_feature: MA Experiment ID: 20000171 Result: Down-regulated in Transcription
  misc_feature: MA Experiment 20000171 PARAMETER Experiment Name: At_42deg_Heat_P Parameter: Age (day) Value: 14
  misc_feature: MA Experiment 20000171 PARAMETER Experiment Name: At_42deg_Heat_P Parameter: Organism Value: A. thaliana
  misc_feature: MA Experiment 20000171 PARAMETER Experiment Name: At_42deg_Heat_P Parameter: Plant Line Value: WS
  misc_feature: MA Experiment 20000171 PARAMETER Experiment Name: At_42deg_Heat_P Parameter: Temperature (deg C) Value: 42 vs. 22
  misc_feature: MA Experiment 20000171 PARAMETER Experiment Name: At_42deg_Heat_P Parameter: Timepoint (hr) Value: 1
  misc_feature: MA Experiment 20000171 PARAMETER Experiment Name: At_42deg_Heat_P Parameter: Tissue Value: Aerial
  misc_feature: MA Experiment ID: 20000173 Result: Down-regulated in Transcription
  misc_feature: MA Experiment 20000173 PARAMETER Experiment Name: At_42deg_Heat_P Parameter: Age (day) Value: 14
  misc_feature: MA Experiment 20000173 PARAMETER Experiment Name: At_42deg_Heat_P Parameter: Organism Value: A. thaliana
  misc_feature: MA Experiment 20000173 PARAMETER Experiment Name: At_42deg_Heat_P Parameter: Plant Line Value: WS
  misc_feature: MA Experiment 20000173 PARAMETER Experiment Name: At_42deg_Heat_P Parameter: Temperature (deg C) Value: 42 vs. 22
  misc_feature: MA Experiment 20000173 PARAMETER Experiment Name: At_42deg_Heat_P Parameter: Timepoint (hr) Value: 6
  misc_feature: MA Experiment 20000173 PARAMETER Experiment Name: At_42deg_Heat_P Parameter: Tissue Value: Aerial
  misc_feature: MA Experiment ID: 20000182 Result: Up-regulated in Transcription
  misc_feature: MA Experiment 20000182 PARAMETER Experiment Name: At_2mM_SA_P Parameter: Age (day) Value: 14
  misc_feature: MA Experiment 20000182 PARAMETER Experiment Name: At_2mM_SA_P Parameter: Organism Value: A. thaliana
  misc_feature: MA Experiment 20000182 PARAMETER Experiment Name: At_2mM_SA_P Parameter: Plant Line Value: WS
  misc_feature: MA Experiment 20000182 PARAMETER Experiment Name: At_2mM_SA_P Parameter: Timepoint (hr) Value: 6
  misc_feature: MA Experiment 20000182 PARAMETER Experiment Name: At_2mM_SA_P Parameter: Tissue Value: Aerial
  misc_feature: MA Experiment 20000182 PARAMETER Experiment Name: At_2mM_SA_P Parameter: Treatment Value: 2mM SA vs. No Treatment
  misc_feature: MA Experiment ID: 20000184 Result: Down-regulated in Transcription
  misc_feature: MA Experiment 20000184 PARAMETER Experiment Name: At_Shoots__P Parameter: Age (day) Value: 7
  misc_feature: MA Experiment 20000184 PARAMETER Experiment Name: At_Shoots__P Parameter: Tissue Value: Shoots vs. Whole Plant
  misc_feature: MA Experiment ID: 20000224 Result: Down-regulated in Transcription
  misc_feature: MA Experiment ID: 20000227 Result: Down-regulated in Transcription
  misc_feature: MA Experiment 20000227 PARAMETER Experiment Name: At_Root-Tips-vs-Tops_P Parameter: Tissue Value: Root Tips vs. Root Tops
  misc_feature: MA Experiment ID: 20000234 Result: Down-regulated in Transcription
  misc_feature: MA Experiment 20000234 PARAMETER Experiment Name: At_Siliques_P Parameter: Age (day) Value: 21
  misc_feature: MA Experiment 20000234 PARAMETER Experiment Name: At_Siliques_P Parameter: Organism Value: A. thaliana
  misc_feature: MA Experiment 20000234 PARAMETER Experiment Name: At_Siliques_P Parameter: Plant Line Value: WS
  misc_feature: MA Experiment 20000234 PARAMETER Experiment Name: At_Siliques_P Parameter: Tissue Value: Less Than 5mm Siliques vs. Whole Plant
  misc_feature: MA Experiment ID: 20000235 Result: Down-regulated in Transcription
  misc_feature: MA Experiment 20000235 PARAMETER Experiment Name: At_Siliques_P Parameter: Age (day) Value: 21
  misc_feature: MA Experiment 20000235 PARAMETER Experiment Name: At_Siliques_P Parameter: Organism Value: A. thaliana
  misc_feature: MA Experiment 20000235 PARAMETER Experiment Name: At_Siliques_P Parameter: Plant Line Value: WS
  misc_feature: MA Experiment 20000235 PARAMETER Experiment Name: At_Siliques_P Parameter: Tissue Value: 5-10mm Siliques vs. Whole Plant
  misc_feature: MA Experiment ID: 20000265 Result: Down-regulated in Transcription
  misc_feature: MA Experiment 20000265 PARAMETER Experiment Name: At_Open_Flower_P Parameter: Age (day) Value: 21
  misc_feature: MA Experiment 20000265 PARAMETER Experiment Name: At_Open_Flower_P Parameter: Plant Line Value: WS
  misc_feature: MA Experiment 20000265 PARAMETER Experiment Name: At_Open_Flower_P Parameter: Tissue Value: Closed Flower vs. Whole Plant
  misc_feature: MA Experiment ID: 20000438 Result: Down-regulated in Transcription
  misc_feature: MA Experiment 20000438 PARAMETER Experiment Name: At_Shoots__P Parameter: Age (day) Value: 14
  misc_feature: MA Experiment 20000438 PARAMETER Experiment Name: At_Shoots__P Parameter: Tissue Value: Shoots vs. Whole Plant
  misc_feature: MA Experiment ID: 20001248 Result: Up-regulated in Transcription
  misc_feature: MA Experiment 20001248 PARAMETER Experiment Name: At_Far-red-induction_P Parameter: Age (day) Value: 7
  misc_feature: MA Experiment 20001248 PARAMETER Experiment Name: At_Far-red-induction_P Parameter: Light Value: Far-red vs. White
  misc_feature: MA Experiment 20001248 PARAMETER Experiment Name: At_Far-red-induction_P Parameter: Organism Value: A. thaliana
  misc_feature: MA Experiment 20001248 PARAMETER Experiment Name: At_Far-red-induction_P Parameter: Plant Line Value: Columbia
  misc_feature: MA Experiment 20001248 PARAMETER Experiment Name: At_Far-red-induction_P Parameter: Timepoint (hr) Value: 4
  misc_feature: MA Experiment 20001248 PARAMETER Experiment Name: At_Far-red-induction_P Parameter: Tissue Value: Whole Plant
  misc_feature: MA Experiment ID: 20001558 Result: Down-regulated in Transcription
  misc_feature: MA Experiment 20001558 PARAMETER Experiment Name: At_Drought_Soil_Dry_P Parameter: Age (day) Value: 27
  misc_feature: MA Experiment 20001558 PARAMETER Experiment Name: At_Drought_Soil_Dry_P Parameter: Organism Value: A. thaliana
  misc_feature: MA Experiment 20001558 PARAMETER Experiment Name: At_Drought_Soil_Dry_P Parameter: Plant Line Value: WS
  misc_feature: MA Experiment 20001558 PARAMETER Experiment Name: At_Drought_Soil_Dry_P Parameter: Post Timepoint (hr) Value: 6
  misc_feature: MA Experiment 20001558 PARAMETER Experiment Name: At_Drought_Soil_Dry_P Parameter: Post-Treatment Value: Re-Water vs. No Drought
  misc_feature: MA Experiment 20001558 PARAMETER Experiment Name: At_Drought_Soil_Dry_P Parameter: Timepoint (day) Value: 13
  misc_feature: MA Experiment 20001558 PARAMETER Experiment Name: At_Drought_Soil_Dry_P Parameter: Treatment Value: Drought vs. No Drought
accattattacaaaaagtctacgacggcaaaacgaaaatccacaggcggagaaatcaaaaaaccaaaaatccaatctttggattcttacttctacgatttgtgtgtttcctcaaacccaaatgtctcgtctcccgattttaatcgcttcgtgtctcttcctctcttcactcaccgccgccgtcgtcaccgccgccgaatccgatactccgacggcttattcactcctccaaagctacaacttccccgtcggaatccttccaaaaggagtcgtagcttatgatttagacacaacaacaggcaaattccatgcgtatttcaacgattcatgtagcttcaatcttgttggttcttaccaattgaattacaaatcaacaatcagtggttacatctccgagaacaagctcaagaaattgactggtgttaaagtcaaagttttgttcttgtggcttaacatcgtcgaggttattagaaacggtgacgagatggagttttccgttgggatcacatcggcgaatttcgcgatccaagagtttttggaatcgcctcagtgtggttgtggctttgagtgcaaggattcgaaattggacatgattgagagaatcccttttctttcttcgtcttgaaattgaaaaaggtacaatctttttttgtaatttgtccccaaaaaatcttacctttcgaaaagatcgcatcttttatgtattgtccaataatatgagcgtagtgtctggaatttgtaattgtttactttagttctatttattggattcaagttctgtaatggtgaaaagaaaagatactgaagggagatgtgaacattgtgaagtgaacatttgtaatcttagattgaatgttttcatttttgttc

SEQ ID NO: 30900 - protein, 207 aa, Arabidopsis thaliana
  peptide (1)..(207): Ceres Seq. ID no. 12332916
  misc_feature (50)..(190): Pfam Name: Protein of unknown function, DUF538 Pfam Description: Protein of unknown function, DUF538
  misc_feature (41)..(200): Homolog of NCBI NO: 18420052 NR Description: unknown protein; protein id: At5g19860.1
  misc_feature (43)..(184): Homolog of NCBI NO: 15241137 NR Description: putative protein; protein id: At5g19590.1
  misc_feature (41)..(191): Homolog of NCBI NO: 28273408 NR Description: unknown protein [Oryza sativa (japonica
  misc_feature (37)..(184): Homolog of NCBI NO: 34912320 NR Description: P0451D05.23 [Oryza sativa (japonica
  misc_feature (52)..(190): Homolog of NCBI NO: 21553750 NR Description: unknown [Arabidopsis thaliana]
  misc_feature (52)..(190): Homolog of NCBI NO: 18379012 NR Description: Expressed protein
  misc_feature (50)..(195): Homolog of NCBI NO: 15235335 NR Description: putative protein; protein id: At4g02360.1
  misc_feature (41)..(206): Homolog of NCBI NO: 18379014 NR Description: Expressed protein
  misc_feature (41)..(207): Homolog of NCBI NO: 21554037 NR Description: unknown [Arabidopsis thaliana]
  misc_feature (41)..(207): Homolog of NCBI NO: 18411923 NR Description: coded for by A. thaliana cDNA R64991
TIITKSLRRQNENPQAEKSKNQKSNLWILTSTICVFPQTQMSRLPILIASCLFLSSLTAAVVTAAESDTPTAYSLLQSYNFPVGILPKGVVAYDLDTTTGKFHAYFNDSCSFNLVGSYQLNYKSTISGYISENKLKKLTGVKVKVLFLWLNIVEVIRNGDEMEFSVGITSANFAIQEFLESPQCGCGFECKDSKLDMIERIPFLSSS

SEQ ID NO: 30901 - protein, 167 aa, Arabidopsis thaliana
  peptide (1)..(167): Ceres Seq. ID no. 12332917
  misc_feature (10)..(150): Pfam Name: Protein of unknown function, DUF538 Pfam Description: Protein of unknown function, DUF538
  misc_feature (1)..(160): Homolog of NCBI NO: 18420052 NR Description: unknown protein; protein id: At5g19860.1
  misc_feature (3)..(144): Homolog of NCBI NO: 15241137 NR Description: putative protein; protein id: At5g19590.1
  misc_feature (1)..(151): Homolog of NCBI NO: 28273408 NR Description: unknown protein [Oryza sativa (japonica
  misc_feature (1)..(144): Homolog of NCBI NO: 34912320 NR Description: P0451D05.23 [Oryza sativa (japonica
  misc_feature (12)..(150): Homolog of NCBI NO: 21553750 NR Description: unknown [Arabidopsis thaliana]
  misc_feature (12)..(150): Homolog of NCBI NO: 18379012 NR Description: Expressed protein
  misc_feature (10)..(155): Homolog of NCBI NO: 15235335 NR Description: putative protein; protein id: At4g02360.1
  misc_feature (1)..(166): Homolog of NCBI NO: 18379014 NR Description: Expressed protein
  misc_feature (1)..(167): Homolog of NCBI NO: 21554037 NR Description: unknown [Arabidopsis thaliana]
  misc_feature (1)..(167): Homolog of NCBI NO: 18411923 NR Description: coded for by A. thaliana cDNA R64991
MSRLPILIASCLFLSSLTAAVVTAAESDTPTAYSLLQSYNFPVGILPKGVVAYDLDTTTGKFHAYFNDSCSFNLVGSYQLNYKSTISGYISENKLKKLTGVKVKVLFLWLNIVEVIRNGDEMEFSVGITSANFAIQEFLESPQCGCGFECKDSKLDMIERIPFLSSS

SEQ ID NO: 30902 - DNA, 856 bp, Arabidopsis thaliana
  misc_feature (1)..(856): Ceres Seq. ID no. 12421566
  misc_feature: MA Experiment ID: 108461 Result: Down-regulated in Transcription
  misc_feature: MA Experiment 108461 PARAMETER Experiment Name: At_Germinating_Seeds_cDNA_P Parameter: Age (day) Value: 1 vs. 0
  misc_feature: MA Experiment 108461 PARAMETER Experiment Name: At_Germinating_Seeds_cDNA_P Parameter: Tissue Value: Germinating Seeds
  misc_feature: MA Experiment ID: 108462 Result: Down-regulated in Transcription
  misc_feature: MA Experiment 108462 PARAMETER Experiment Name: At_Germinating_Seeds_cDNA_P Parameter: Age (day) Value: 2 vs. 0
  misc_feature: MA Experiment 108462 PARAMETER Experiment Name: At_Germinating_Seeds_cDNA_P Parameter: Tissue Value: Germinating Seeds
  misc_feature: MA Experiment ID: 108463 Result: Down-regulated in Transcription
  misc_feature: MA Experiment 108463 PARAMETER Experiment Name: At_Germinating_Seeds_cDNA_P Parameter: Age (day) Value: 3 vs. 0
  misc_feature: MA Experiment 108463 PARAMETER Experiment Name: At_Germinating_Seeds_cDNA_P Parameter: Tissue Value: Germinating Seeds
  misc_feature: MA Experiment ID: 108464 Result: Down-regulated in Transcription
  misc_feature: MA Experiment 108464 PARAMETER Experiment Name: At_Germinating_Seeds_cDNA_P Parameter: Age (day) Value: 4 vs. 0
  misc_feature: MA Experiment 108464 PARAMETER Experiment Name: At_Germinating_Seeds_cDNA_P Parameter: Tissue Value: Germinating Seeds
  misc_feature: MA Experiment ID: 108488 Result: Down-regulated in Transcription
  misc_feature: MA Experiment ID: 20000111 Result: Up-regulated in Transcription
  misc_feature: MA Experiment 20000111 PARAMETER Experiment Name: At_42deg_Heat_cDNA_P Parameter: Temperature (deg C) Value: 42 vs. 22
  misc_feature: MA Experiment 20000111 PARAMETER Experiment Name: At_42deg_Heat_cDNA_P Parameter: Timepoint (hr) Value: 6
  misc_feature: MA Experiment 20000111 PARAMETER Experiment Name: At_42deg_Heat_cDNA_P Parameter: Tissue Value: Aerial
  misc_feature: MA Experiment ID: 20000113 Result: Up-regulated in Transcription
  misc_feature: MA Experiment 20000113 PARAMETER Experiment Name: At_42deg_Heat_cDNA_P Parameter: Temperature (deg C) Value: 42 vs. 22
  misc_feature: MA Experiment 20000113 PARAMETER Experiment Name: At_42deg_Heat_cDNA_P Parameter: Timepoint (hr) Value: 8
  misc_feature: MA Experiment 20000113 PARAMETER Experiment Name: At_42deg_Heat_cDNA_P Parameter: Tissue Value: Aerial
  misc_feature: MA Experiment ID: 20000173 Result: Up-regulated in Transcription
  misc_feature: MA Experiment 20000173 PARAMETER Experiment Name: At_42deg_Heat_P Parameter: Age (day) Value: 14
  misc_feature: MA Experiment 20000173 PARAMETER Experiment Name: At_42deg_Heat_P Parameter: Organism Value: A. thaliana
  misc_feature: MA Experiment 20000173 PARAMETER Experiment Name: At_42deg_Heat_P Parameter: Plant Line Value: WS
  misc_feature: MA Experiment 20000173 PARAMETER Experiment Name: At_42deg_Heat_P Parameter: Temperature (deg C) Value: 42 vs. 22
  misc_feature: MA Experiment 20000173 PARAMETER Experiment Name: At_42deg_Heat_P Parameter: Timepoint (hr) Value: 6
  misc_feature: MA Experiment 20000173 PARAMETER Experiment Name: At_42deg_Heat_P Parameter: Tissue Value: Aerial
catttctcattaccaaaatcagcggagcaaaagttacttccgaaaccctaaaaaaaacacgatgatgctcaagcaagctgcgaagaaggccctagggcttacgtcacgtcaatcaacaccgtggtctgttggtatcctccgaacctaccatgagaacgtcatcgaccactacgataatccccgcaacgttgggtctttcgataagaatgatcccaacgttggtacgggactcgtaggagctcccgcttgtggtgatgtgatgaagcttcaaatcaaggtcgatgagaagactggtcaaatcgttgatgctcgctttaagacttttggttgtggttcagccatcgcttcttcatctgttgccactgaatgggtgaaaggcaaagctatggaggatgttctgaccatcaaaaacaccgaaatcgcaaagcatctttctctcccaccagtcaagctccactgcagtatgttggcggaggacgctatcaaggcagctgtgaaagactacaaggagaagcgtgtgaagacaaatggtgctgcagcagcaggagaaaccacacaggcttgattccttttactagtgtgtataccataatgtgtatatgatggtgaaaacaggggagaagtagaagaggatgatacatacaacctatggtatgttgtaatgttcaagacttaaggagtattttagaataaactctgttcacagaaacgtgtaagaatgattttgcttcggccctgtagtttttgctgttttatgcaccgatgtgatgtaatgttttctctcttctttgggaggtttataaattacaactttgacagacaaattttcaattttcaattttgacattataatttt

SEQ ID NO: 30903 - protein, 187 aa, Arabidopsis thaliana
  peptide (1)..(187): Ceres Seq. ID no. 12421567
  misc_feature (48)..(175): Pfam Name: NifU-like N terminal domain Pfam Description: NifU-like N terminal domain
  misc_feature (49)..(181): Homolog of NCBI NO: 33592862 NR Description: [Fe-S] cluster formation/repair protein
  misc_feature (47)..(172): Homolog of NCBI NO: 21313484 NR Description: RIKEN cDNA 2310020H20 [Mus musculus]
  misc_feature (47)..(172): Homolog of NCBI NO: 20381021 NR Description: RIKEN cDNA 2310020H20 gene [Mus musculus]
  misc_feature (47)..(179): Homolog of NCBI NO: 11545707 NR Description: ISCU2 [Homo sapiens]
  misc_feature (47)..(180): Homolog of NCBI NO: 16798388 NR Description: iron-sulfur cluster assembly protein IscU
  misc_feature (22)..(174): Homolog of NCBI NO: 34912076 NR Description: putative nifU-like protein
  misc_feature (21)..(187): Homolog of NCBI NO: 15232028 NR Description: unknown protein; protein id: At3g01020.1
  misc_feature (22)..(187): Homolog of NCBI NO: 15233385 NR Description: putative NifU-like metallocluster assembly factor
  misc_feature (22)..(187): Homolog of NCBI NO: 21595581 NR Description: nifU-like protein [Arabidopsis thaliana]
  misc_feature (21)..(187): Homolog of NCBI NO: 15235569 NR Description: nifU-like protein
ISHYQNQRSKSYFRNPKKNTMMLKQAAKKALGLTSRQSTPWSVGILRTYHENVIDHYDNPRNVGSFDKNDPNVGTGLVGAPACGDVMKLQIKVDEKTGQIVDARFKTFGCGSAIASSSVATEWVKGKAMEDVLTIKNTEIAKHLSLPPVKLHCSMLAEDAIKAAVKDYKEKRVKTNGAAAAGETTQA

SEQ ID NO: 30904 - protein, 167 aa, Arabidopsis thaliana
  peptide (1)..(167): Ceres Seq. ID no. 12421568
  misc_feature (28)..(155): Pfam Name: NifU-like N terminal domain Pfam Description: NifU-like N terminal domain
  misc_feature (29)..(161): Homolog of NCBI NO: 33592862 NR Description: [Fe-S] cluster formation/repair protein
  misc_feature (27)..(152): Homolog of NCBI NO: 21313484 NR Description: RIKEN cDNA 2310020H20 [Mus musculus]
  misc_feature (27)..(152): Homolog of NCBI NO: 20381021 NR Description: RIKEN cDNA 2310020H20 gene [Mus musculus]
  misc_feature (27)..(159): Homolog of NCBI NO: 11545707 NR Description: ISCU2 [Homo sapiens]
  misc_feature (27)..(160): Homolog of NCBI NO: 16798388 NR Description: iron-sulfur cluster assembly protein IscU
  misc_feature (2)..(154): Homolog of NCBI NO: 34912076 NR Description: putative nifU-like protein
  misc_feature (1)..(167): Homolog of NCBI NO: 15232028 NR Description: unknown protein; protein id: At3g01020.1
  misc_feature (2)..(167): Homolog of NCBI NO: 15233385 NR Description: putative NifU-like metallocluster assembly factor
  misc_feature (2)..(167): Homolog of NCBI NO: 21595581 NR Description: nifU-like protein [Arabidopsis thaliana]
  misc_feature (1)..(167): Homolog of NCBI NO: 15235569 NR Description: nifU-like protein
MMLKQAAKKALGLTSRQSTPWSVGILRTYHENVIDHYDNPRNVGSFDKNDPNVGTGLVGAPACGDVMKLQIKVDEKTGQIVDARFKTFGCGSAIASSSVATEWVKGKAMEDVLTIKNTEIAKHLSLPPVKLHCSMLAEDAIKAAVKDYKEKRVKTNGAAAAGETTQA

SEQ ID NO: 30905 - protein, 166 aa, Arabidopsis thaliana
  peptide (1)..(166): Ceres Seq. ID no. 12421569
  misc_feature (27)..(154): Pfam Name: NifU-like N terminal domain Pfam Description: NifU-like N terminal domain
  misc_feature (28)..(160): Homolog of NCBI NO: 33592862 NR Description: [Fe-S] cluster formation/repair protein
  misc_feature (26)..(151): Homolog of NCBI NO: 21313484 NR Description: RIKEN cDNA 2310020H20 [Mus musculus]
  misc_feature (26)..(151): Homolog of NCBI NO: 20381021 NR Description: RIKEN cDNA 2310020H20 gene [Mus musculus]
  misc_feature (26)..(158): Homolog of NCBI NO: 11545707 NR Description: ISCU2 [Homo sapiens]
  misc_feature (26)..(159): Homolog of NCBI NO: 16798388 NR Description: iron-sulfur cluster assembly protein IscU
  misc_feature (1)..(153): Homolog of NCBI NO: 34912076 NR Description: putative nifU-like protein
  misc_feature (1)..(166): Homolog of NCBI NO: 15232028 NR Description: unknown protein; protein id: At3g01020.1
  misc_feature (1)..(166): Homolog of NCBI NO: 15233385 NR Description: putative NifU-like metallocluster assembly factor
  misc_feature (1)..(166): Homolog of NCBI NO: 21595581 NR Description: nifU-like protein [Arabidopsis thaliana]
  misc_feature (1)..(166): Homolog of NCBI NO: 15235569 NR Description: nifU-like protein
MLKQAAKKALGLTSRQSTPWSVGILRTYHENVIDHYDNPRNVGSFDKNDPNVGTGLVGAPACGDVMKLQIKVDEKTGQIVDARFKTFGCGSAIASSSVATEWVKGKAMEDVLTIKNTEIAKHLSLPPVKLHCSMLAEDAIKAAVKDYKEKRVKTNGAAAAGETTQA

SEQ ID NO: 30906 - DNA, 1210 bp, Arabidopsis thaliana
  misc_feature (1)..(1210): Ceres Seq. ID no. 12482053
  misc_feature: MA Experiment ID: 108463 Result: Down-regulated in Transcription
  misc_feature: MA Experiment 108463 PARAMETER Experiment Name: At_Germinating_Seeds_cDNA_P Parameter: Age (day) Value: 3 vs. 0
  misc_feature: MA Experiment 108463 PARAMETER Experiment Name: At_Germinating_Seeds_cDNA_P Parameter: Tissue Value: Germinating Seeds
  misc_feature: MA Experiment ID: 108464 Result: Down-regulated in Transcription
  misc_feature: MA Experiment 108464 PARAMETER Experiment Name: At_Germinating_Seeds_cDNA_P Parameter: Age (day) Value: 4 vs. 0
  misc_feature: MA Experiment 108464 PARAMETER Experiment Name: At_Germinating_Seeds_cDNA_P Parameter: Tissue Value: Germinating Seeds
  misc_feature: MA Experiment ID: 20000070 Result: Down-regulated in Transcription
  misc_feature: MA Experiment 20000070 PARAMETER Experiment Name: At_100uM_ABA_Mutants_cDNA_P Parameter: Plant Line Value: CS24
  misc_feature: MA Experiment 20000070 PARAMETER Experiment Name: At_100uM_ABA_Mutants_cDNA_P Parameter: Timepoint (hr) Value: 6
  misc_feature: MA Experiment 20000070 PARAMETER Experiment Name: At_100uM_ABA_Mutants_cDNA_P Parameter: Tissue Value: Aerial
  misc_feature: MA Experiment 20000070 PARAMETER Experiment Name: At_100uM_ABA_Mutants_cDNA_P Parameter: Treatment Value: 100uM ABA vs. No Treatment
  misc_feature: MA Experiment ID: 20000071 Result: Down-regulated in Transcription
  misc_feature: MA Experiment 20000071 PARAMETER Experiment Name: At_100uM_ABA_Mutants_cDNA_P Parameter: Plant Line Value: CS8104
  misc_feature: MA Experiment 20000071 PARAMETER Experiment Name: At_100uM_ABA_Mutants_cDNA_P Parameter: Timepoint (hr) Value: 6
  misc_feature: MA Experiment 20000071 PARAMETER Experiment Name: At_100uM_ABA_Mutants_cDNA_P Parameter: Tissue Value: Aerial
  misc_feature: MA Experiment 20000071 PARAMETER Experiment Name: At_100uM_ABA_Mutants_cDNA_P Parameter: Treatment Value: 100uM ABA vs. No Treatment
  misc_feature: MA Experiment ID: 20000144 Result: Up-regulated in Transcription
  misc_feature: MA Experiment 20000144 PARAMETER Experiment Name: At_42deg_Heat_cDNA_P Parameter: Temperature (deg C) Value: 42 vs. 22
  misc_feature: MA Experiment 20000144 PARAMETER Experiment Name: At_42deg_Heat_cDNA_P Parameter: Timepoint (hr) Value: 1
  misc_feature: MA Experiment 20000144 PARAMETER Experiment Name: At_42deg_Heat_cDNA_P Parameter: Tissue Value: Aerial
gtgagaaaaagtaaataaaaaagagatggttttgatcaaagagagagagatggagattccagttattgattttgcagagttggatggagagaagagaagcaagaccatgtcacttcttgatcatgcatgtgataagtggggattcttcatggttgataatcatggaattgataaagagttgatggagaaagtgaagaagatgattaactctcactatgaggagcatttgaaagagaagttttaccagtcagagatggtcaaggctttgagtgaaggcaaaacctcagatgcagattgggaaagcagtttcttcatctcacataaaccaacttcaaatatctgtcagatcccaaacatttcagaggaactcagcaagacgatggatgaatatgtttgtcaactgcacaagtttgcagagagactctccaagctcatgtgtgagaatcttggtcttgatcaggaagacataatgaatgccttttctggtccaaaaggtccagcttttggaacaaaagtggctaaatacccagaatgcccacgtcctgagcttatgagagggctgagagaacatacggatgctgggggaatcatattactcctgcaggatgatcaagtgcctggtcttgagttctttaaagatgggaagtgggttcctataccgccatccaagaacaataccatttttgtcaataccggtgatcaactagagatactgagtaatgggaggtacaagagtgttgttcaccgtgtaatgacagtgaagcatggaagtagactgtcgattgctacgttttacaatccggctggtgatgccataatatctccagctccaaagctcttgtatccaagtggctaccgttttcaagactacctaaagctttattcaactaccaagtttggagacaaaggccccagacttgagaccatgaagaaaatgggaaatgcggattcagcctaggatgcatctggaatttgacgcttctgtactcacatcataaaaactttgtcttcttcttgtgtttccttataatttaaataaccagccatgtcagaatcttgctgattcagctatactacttcactcttctttcttcacttccacttgaaaagttccaaagccaaactgaagcagtctcatcaagctctgtgtcgaacttgagattagacaaagagcttgtaatctaagctctaagattgacagtcaatttca

SEQ ID NO: 30907 - protein, 310 aa, Arabidopsis thaliana
  peptide (1)..(310): Ceres Seq. ID no. 12482054
  misc_feature (158)..(259): Pfam Name: 2OG-Fe(II) oxygenase superfamily Pfam Description: 2OG-Fe(II) oxygenase superfamily
  misc_feature (9)..(304): Homolog of NCBI NO: 642062 NR Description: 1-aminocyclopropane-1-carboxylate oxidase
  misc_feature (6)..(310): Homolog of NCBI NO: 15221170 NR Description: putative amino-cyclopropane-carboxylic acid
  misc_feature (9)..(302): Homolog of NCBI NO: 1944152 NR Description: ACC-oxidase [Vigna angularis]
  misc_feature (6)..(307): Homolog of NCBI NO: 587086 NR Description: ACC oxidase [Brassica oleracea]
  misc_feature (6)..(304): Homolog of NCBI NO: 7433206 NR Description: probable 1-aminocyclopropane-1-carboxylate
  misc_feature (6)..(302): Homolog of NCBI NO: 7433194 NR Description: probable 1-aminocyclopropane-1-carboxylate
  misc_feature (9)..(304): Homolog of NCBI NO: 30060226 NR Description: 1-aminocyclopropane-1-carboxylic acid oxidase
  misc_feature (9)..(304): Homolog of NCBI NO: 2129503 NR Description: ACC oxidase (clone ACO2) oxidase - muskmelon
  misc_feature (11)..(306): Homolog of NCBI NO: 25989506 NR Description: ACC oxidase [Solanum tuberosum]
  misc_feature (1)..(310): Homolog of NCBI NO: 15224803 NR Description: 1-aminocyclopropane-1-carboxylate oxidase
MVLIKEREMEIPVIDFAELDGEKRSKTMSLLDHACDKWGFFMVDNHGIDKELMEKVKKMINSHYEEHLKEKFYQSEMVKALSEGKTSDADWESSFFISHKPTSNICQIPNISEELSKTMDEYVCQLHKFAERLSKLMCENLGLDQEDIMNAFSGPKGPAFGTKVAKYPECPRPELMRGLREHTDAGGIILLLQDDQVPGLEFFKDGKWVPIPPSKNNTIFVNTGDQLEILSNGRYKSVVHRVMTVKHGSRLSIATFYNPAGDAIISPAPKLLYPSGYRFQDYLKLYSTTKFGDKGPRLETMKKMGNADSA

SEQ ID NO: 30908 - protein, 302 aa, Arabidopsis thaliana
  peptide (1)..(302): Ceres Seq. ID no. 12482055
  misc_feature (150)..(251): Pfam Name: 2OG-Fe(II) oxygenase superfamily Pfam Description: 2OG-Fe(II) oxygenase superfamily
  misc_feature (1)..(296): Homolog of NCBI NO: 642062 NR Description: 1-aminocyclopropane-1-carboxylate oxidase
  misc_feature (1)..(302): Homolog of NCBI NO: 15221170 NR Description: putative amino-cyclopropane-carboxylic acid
  misc_feature (1)..(294): Homolog of NCBI NO: 1944152 NR Description: ACC-oxidase [Vigna angularis]
  misc_feature (1)..(299): Homolog of NCBI NO: 587086 NR Description: ACC oxidase [Brassica oleracea]
  misc_feature (1)..(296): Homolog of NCBI NO: 7433206 NR Description: probable 1-aminocyclopropane-1-carboxylate
  misc_feature (1)..(294): Homolog of NCBI NO: 7433194 NR Description: probable 1-aminocyclopropane-1-carboxylate
  misc_feature (1)..(296): Homolog of NCBI NO: 30060226 NR Description: 1-aminocyclopropane-1-carboxylic acid oxidase
  misc_feature (1)..(296): Homolog of NCBI NO: 2129503 NR Description: ACC oxidase (clone ACO2) oxidase - muskmelon
  misc_feature (3)..(298): Homolog of NCBI NO: 25989506 NR Description: ACC oxidase [Solanum tuberosum]
  misc_feature (1)..(302): Homolog of NCBI NO: 15224803 NR Description: 1-aminocyclopropane-1-carboxylate oxidase
MEIPVIDFAELDGEKRSKTMSLLDHACDKWGFFMVDNHGIDKELMEKVKKMINSHYEEHLKEKFYQSEMVKALSEGKTSDADWESSFFISHKPTSNICQIPNISEELSKTMDEYVCQLHKFAERLSKLMCENLGLDQEDIMNAFSGPKGPAFGTKVAKYPECPRPELMRGLREHTDAGGIILLLQDDQVPGLEFFKDGKWVPIPPSKNNTIFVNTGDQLEILSNGRYKSVVHRVMTVKHGSRLSIATFYNPAGDAIISPAPKLLYPSGYRFQDYLKLYSTTKFGDKGPRLETMKKMGNADSA

SEQ ID NO: 30909 - protein, 283 aa, Arabidopsis thaliana
  peptide (1)..(283): Ceres Seq. ID no. 12482056
  misc_feature (131)..(232): Pfam Name: 2OG-Fe(II) oxygenase superfamily Pfam Description: 2OG-Fe(II) oxygenase superfamily
  misc_feature (1)..(277): Homolog of NCBI NO: 642062 NR Description: 1-aminocyclopropane-1-carboxylate oxidase
  misc_feature (1)..(283): Homolog of NCBI NO: 15221170 NR Description: putative amino-cyclopropane-carboxylic acid
  misc_feature (1)..(275): Homolog of NCBI NO: 1944152 NR Description: ACC-oxidase [Vigna angularis]
  misc_feature (1)..(280): Homolog of NCBI NO: 587086 NR Description: ACC oxidase [Brassica oleracea]
  misc_feature (1)..(277): Homolog of NCBI NO: 7433206 NR Description: probable 1-aminocyclopropane-1-carboxylate
  misc_feature (1)..(275): Homolog of NCBI NO: 7433194 NR Description: probable 1-aminocyclopropane-1-carboxylate
  misc_feature (1)..(277): Homolog of NCBI NO: 30060226 NR Description: 1-aminocyclopropane-1-carboxylic acid oxidase
  misc_feature (1)..(277): Homolog of NCBI NO: 2129503 NR Description: ACC oxidase (clone ACO2) oxidase - muskmelon
  misc_feature (1)..(279): Homolog of NCBI NO: 25989506 NR Description: ACC oxidase [Solanum tuberosum]
  misc_feature (1)..(283): Homolog of NCBI NO: 15224803 NR Description: 1-aminocyclopropane-1-carboxylate oxidase
MSLLDHACDKWGFFMVDNHGIDKELMEKVKKMINSHYEEHLKEKFYQSEMVKALSEGKTSDADWESSFFISHKPTSNICQIPNISEELSKTMDEYVCQLHKFAERLSKLMCENLGLDQEDIMNAFSGPKGPAFGTKVAKYPECPRPELMRGLREHTDAGGIILLLQDDQVPGLEFFKDGKWVPIPPSKNNTIFVNTGDQLEILSNGRYKSVVHRVMTVKHGSRLSIATFYNPAGDAIISPAPKLLYPSGYRFQDYLKLYSTTKFGDKGPRLETMKKMGNADSA

SEQ ID NO: 30910 - DNA, 1333 bp, Arabidopsis thaliana
  misc_feature (1)..(1333): Ceres Seq. ID no. 12370509
  misc_feature: MA Experiment ID: 108434 Result: Down-regulated in Transcription
  misc_feature: MA Experiment 108434 PARAMETER Experiment Name: At_Root_Tips_cDNA_P Parameter: Tissue Value: Root Tips
  misc_feature: MA Experiment ID: 108435 Result: Down-regulated in Transcription
  misc_feature: MA Experiment 108435 PARAMETER Experiment Name: At_stm_Mutants_cDNA_P Parameter: Plant Line Value: wt Landsburg vs stm
  misc_feature: MA Experiment 108435 PARAMETER Experiment Name: At_stm_Mutants_cDNA_P Parameter: Tissue Value: Shoot Apical Meristem Region
  misc_feature: MA Experiment ID: 108461 Result: Up-regulated in Transcription
  misc_feature: MA Experiment 108461 PARAMETER Experiment Name: At_Germinating_Seeds_cDNA_P Parameter: Age (day) Value: 1 vs. 0
  misc_feature: MA Experiment 108461 PARAMETER Experiment Name: At_Germinating_Seeds_cDNA_P Parameter: Tissue Value: Germinating Seeds
  misc_feature: MA Experiment ID: 108462 Result: Up-regulated in Transcription
  misc_feature: MA Experiment 108462 PARAMETER Experiment Name: At_Germinating_Seeds_cDNA_P Parameter: Age (day) Value: 2 vs. 0
  misc_feature: MA Experiment 108462 PARAMETER Experiment Name: At_Germinating_Seeds_cDNA_P Parameter: Tissue Value: Germinating Seeds
  misc_feature: MA Experiment ID: 108463 Result: Up-regulated in Transcription
  misc_feature: MA Experiment 108463 PARAMETER Experiment Name: At_Germinating_Seeds_cDNA_P Parameter: Age (day) Value: 3 vs. 0
  misc_feature: MA Experiment 108463 PARAMETER Experiment Name: At_Germinating_Seeds_cDNA_P Parameter: Tissue Value: Germinating Seeds
  misc_feature: MA Experiment ID: 108464 Result: Up-regulated in Transcription
  misc_feature: MA Experiment 108464 PARAMETER Experiment Name: At_Germinating_Seeds_cDNA_P Parameter: Age (day) Value: 4 vs. 0
  misc_feature: MA Experiment 108464 PARAMETER Experiment Name: At_Germinating_Seeds_cDNA_P Parameter: Tissue Value: Germinating Seeds
  misc_feature: MA Experiment ID: 108488 Result: Down-regulated in Transcription
  misc_feature: MA Experiment ID: 108501 Result: Down-regulated in Transcription
  misc_feature: MA Experiment 108501 PARAMETER Experiment Name: At_ap2_floral_buds_cDNA_P Parameter: Plant Line Value: ap2 (Ler.)
  misc_feature: MA Experiment 108501 PARAMETER Experiment Name: At_ap2_floral_buds_cDNA_P Parameter: Tissue Value: Closed Flower
  misc_feature: MA Experiment ID: 108572 Result: Down-regulated in Transcription
  misc_feature: MA Experiment 108572 PARAMETER Experiment Name: At_Drought_cDNA_P Parameter: Timepoint (hr) Value: 1
  misc_feature: MA Experiment 108572 PARAMETER Experiment Name: At_Drought_cDNA_P Parameter: Tissue Value: Aerial
  misc_feature: MA Experiment 108572 PARAMETER Experiment Name: At_Drought_cDNA_P Parameter: Treatment Value: Drought vs. No Drought
  misc_feature: MA Experiment ID: 108594 Result: Up-regulated in Transcription
  misc_feature: MA Experiment 108594 PARAMETER Experiment Name: At_Ler-rhl_Root_cDNA_P Parameter: Plant Line Value: null
  misc_feature: MA Experiment ID: 108595 Result: Down-regulated in Transcription
  misc_feature: MA Experiment 108595 PARAMETER Experiment Name: At_Ler-pi_Ovule_cDNA_P Parameter: Plant Line Value: null
  misc_feature: MA Experiment ID: 108607 Result: Down-regulated in Transcription
  misc_feature: MA Experiment 108607 PARAMETER Experiment Name: At_100uM_ABA_cDNA_P Parameter: Timepoint (hr) Value: 4
  misc_feature: MA Experiment 108607 PARAMETER Experiment Name: At_100uM_ABA_cDNA_P Parameter: Tissue Value: Aerial
  misc_feature: MA Experiment 108607 PARAMETER Experiment Name: At_100uM_ABA_cDNA_P Parameter: Treatment Value: 100uM ABA vs. No Treatment
  misc_feature: MA Experiment ID: 108608 Result: Down-regulated in Transcription
  misc_feature: MA Experiment 108608 PARAMETER Experiment Name: At_100uM_ABA_cDNA_P Parameter: Timepoint (hr) Value: 1
  misc_feature: MA Experiment 108608 PARAMETER Experiment Name: At_100uM_ABA_cDNA_P Parameter: Tissue Value: Aerial
  misc_feature: MA Experiment 108608 PARAMETER Experiment Name: At_100uM_ABA_cDNA_P Parameter: Treatment Value: 100uM ABA vs. No Treatment
  misc_feature: MA Experiment ID: 108609 Result: Down-regulated in Transcription
  misc_feature: MA Experiment 108609 PARAMETER Experiment Name: At_100uM_ABA_cDNA_P Parameter: Timepoint (hr) Value: 24
  misc_feature: MA Experiment 108609 PARAMETER Experiment Name: At_100uM_ABA_cDNA_P Parameter: Tissue Value: Aerial
  misc_feature: MA Experiment 108609 PARAMETER Experiment Name: At_100uM_ABA_cDNA_P Parameter: Treatment Value: 100uM ABA vs. No Treatment
  misc_feature: MA Experiment ID: 20000071 Result: Down-regulated in Transcription
  misc_feature: MA Experiment 20000071 PARAMETER Experiment Name: At_100uM_ABA_Mutants_cDNA_P Parameter: Plant Line Value: CS8104
  misc_feature: MA Experiment 20000071 PARAMETER Experiment Name: At_100uM_ABA_Mutants_cDNA_P Parameter: Timepoint (hr) Value: 6
  misc_feature: MA Experiment 20000071 PARAMETER Experiment Name: At_100uM_ABA_Mutants_cDNA_P Parameter: Tissue Value: Aerial
  misc_feature: MA Experiment 20000071 PARAMETER Experiment Name: At_100uM_ABA_Mutants_cDNA_P Parameter: Treatment Value: 100uM ABA vs. No Treatment
  misc_feature: MA Experiment ID: 20000089 Result: Down-regulated in Transcription
  misc_feature: MA Experiment ID: 20000090 Result: Down-regulated in Transcription
  misc_feature: MA Experiment ID: 20000117 Result: Down-regulated in Transcription
  misc_feature: MA Experiment 20000117 PARAMETER Experiment Name: At_100uM_ABA_Mutants_cDNA_P Parameter: Plant Line Value: Columbia
  misc_feature: MA Experiment 20000117 PARAMETER Experiment Name: At_100uM_ABA_Mutants_cDNA_P Parameter: Timepoint (hr) Value: 6
  misc_feature: MA Experiment 20000117 PARAMETER Experiment Name: At_100uM_ABA_Mutants_cDNA_P Parameter: Tissue Value: Aerial
  misc_feature: MA Experiment 20000117 PARAMETER Experiment Name: At_100uM_ABA_Mutants_cDNA_P Parameter: Treatment Value: 100uM ABA vs. No Treatment
  misc_feature: MA Experiment ID: 20000166 Result: Down-regulated in Transcription
  misc_feature: MA Experiment 20000166 PARAMETER Experiment Name: At_100uM_ABA_P Parameter: Age (day) Value: 14
  misc_feature: MA Experiment 20000166 PARAMETER Experiment Name: At_100uM_ABA_P Parameter: Organism Value: A. thaliana
  misc_feature: MA Experiment 20000166 PARAMETER Experiment Name: At_100uM_ABA_P Parameter: Plant Line Value: WS
  misc_feature: MA Experiment 20000166 PARAMETER Experiment Name: At_100uM_ABA_P Parameter: Timepoint (hr) Value: 1
  misc_feature: MA Experiment 20000166 PARAMETER Experiment Name: At_100uM_ABA_P Parameter: Tissue Value: Aerial
  misc_feature: MA Experiment 20000166 PARAMETER Experiment Name: At_100uM_ABA_P Parameter: Treatment Value: 100uM ABA vs. No Treatment
  misc_feature: MA Experiment ID: 20000180 Result: Up-regulated in Transcription
  misc_feature: MA Experiment 20000180 PARAMETER Experiment Name: At_Germinating_Seeds_P Parameter: Age (hr) Value: 24 vs. 0
  misc_feature: MA Experiment 20000180 PARAMETER Experiment Name: At_Germinating_Seeds_P Parameter: Tissue Value: Germinating Seeds
  misc_feature: MA Experiment ID: 20000184 Result: Up-regulated in Transcription
  misc_feature: MA Experiment 20000184 PARAMETER Experiment Name: At_Shoots__P Parameter: Age (day) Value: 7
  misc_feature: MA Experiment 20000184 PARAMETER Experiment Name: At_Shoots__P Parameter: Tissue Value: Shoots vs. Whole Plant
  misc_feature: MA Experiment ID: 20000214 Result: Down-regulated in Transcription
  misc_feature: MA Experiment 20000214 PARAMETER Experiment Name: At_4deg_Cold_P Parameter: Timepoint (hr) Value: 6
  misc_feature: MA Experiment ID: 20000234 Result: Down-regulated in Transcription
  misc_feature: MA Experiment 20000234 PARAMETER Experiment Name: At_Siliques_P Parameter: Age (day) Value: 21
  misc_feature: MA Experiment 20000234 PARAMETER Experiment Name: At_Siliques_P Parameter: Organism Value: A. thaliana
  misc_feature: MA Experiment 20000234 PARAMETER Experiment Name: At_Siliques_P Parameter: Plant Line Value: WS
  misc_feature: MA Experiment 20000234 PARAMETER Experiment Name: At_Siliques_P Parameter: Tissue Value: Less Than 5mm Siliques vs. Whole Plant
  misc_feature: MA Experiment ID: 20000235 Result: Down-regulated in Transcription
  misc_feature: MA Experiment 20000235 PARAMETER Experiment Name: At_Siliques_P Parameter: Age (day) Value: 21
  misc_feature: MA Experiment 20000235 PARAMETER Experiment Name: At_Siliques_P Parameter: Organism Value: A. thaliana
  misc_feature: MA Experiment 20000235 PARAMETER Experiment Name: At_Siliques_P Parameter: Plant Line Value: WS
  misc_feature: MA Experiment 20000235 PARAMETER Experiment Name: At_Siliques_P Parameter: Tissue Value: 5-10mm Siliques vs. Whole Plant
  misc_feature: MA Experiment ID: 20000264 Result: Down-regulated in Transcription
  misc_feature: MA Experiment 20000264 PARAMETER Experiment Name: At_Open_Flower_P Parameter: Age (day) Value: 21
  misc_feature: MA Experiment 20000264 PARAMETER Experiment Name: At_Open_Flower_P Parameter: Plant Line Value: WS
  misc_feature: MA Experiment 20000264 PARAMETER Experiment Name: At_Open_Flower_P Parameter: Tissue Value: Open Flower vs. Whole Plant
  misc_feature: MA Experiment ID: 20000265 Result: Down-regulated in Transcription
  misc_feature: MA Experiment 20000265 PARAMETER Experiment Name: At_Open_Flower_P Parameter: Age (day) Value: 21
  misc_feature: MA Experiment 20000265 PARAMETER Experiment Name: At_Open_Flower_P Parameter: Plant Line Value: WS
  misc_feature: MA Experiment 20000265 PARAMETER Experiment Name: At_Open_Flower_P Parameter: Tissue Value: Closed Flower vs. Whole Plant
  misc_feature: MA Experiment ID: 20000267 Result: Down-regulated in Transcription
  misc_feature: MA Experiment 20000267 PARAMETER Experiment Name: At_Drought_P Parameter: Age (day) Value: 7
  misc_feature: MA Experiment 20000267 PARAMETER Experiment Name: At_Drought_P Parameter: Organism Value: A. thaliana
  misc_feature: MA Experiment 20000267 PARAMETER Experiment Name: At_Drought_P Parameter: Plant Line Value: WS
  misc_feature: MA Experiment 20000267 PARAMETER Experiment Name: At_Drought_P Parameter: Timepoint (hr) Value: 6
  misc_feature: MA Experiment 20000267 PARAMETER Experiment Name: At_Drought_P Parameter: Tissue Value: Whole Plant
  misc_feature: MA Experiment 20000267 PARAMETER Experiment Name: At_Drought_P Parameter: Treatment Value: Drought vs. No Drought
  misc_feature: MA Experiment ID: 20000268 Result: Down-regulated in Transcription
  misc_feature: MA Experiment 20000268 PARAMETER Experiment Name: At_100mM_NaCl__P Parameter: Age (day) Value: 14
  misc_feature: MA Experiment 20000268 PARAMETER Experiment Name: At_100mM_NaCl__P Parameter: Organism Value: A. thaliana
  misc_feature: MA Experiment 20000268 PARAMETER Experiment Name: At_100mM_NaCl__P Parameter: Plant Line Value: WS
  misc_feature: MA Experiment 20000268 PARAMETER Experiment Name: At_100mM_NaCl__P Parameter: Timepoint (hr) Value: 6
  misc_feature: MA Experiment 20000268 PARAMETER Experiment Name: At_100mM_NaCl__P Parameter: Tissue Value: Whole Plant
  misc_feature: MA Experiment 20000268 PARAMETER Experiment Name: At_100mM_NaCl__P Parameter: Treatment Value: 100mM NaCl vs. No Treatment
  misc_feature: MA Experiment ID: 20000286 Result: Down-regulated in Transcription
  misc_feature: MA Experiment 20000286 PARAMETER Experiment Name: At_Open_Flower_P Parameter: Age (day) Value: 21
  misc_feature: MA Experiment 20000286 PARAMETER Experiment Name: At_Open_Flower_P Parameter: Plant Line Value: WS
  misc_feature: MA Experiment 20000286 PARAMETER Experiment Name: At_Open_Flower_P Parameter: Tissue Value: Half Open vs. Whole Plant
  misc_feature: MA Experiment ID: 20000308 Result: Down-regulated in Transcription
  misc_feature: MA Experiment 20000308 PARAMETER Experiment Name: At_100mM_NaCl__P Parameter: Age (day) Value: 17
  misc_feature: MA Experiment 20000308 PARAMETER Experiment Name: At_100mM_NaCl__P Parameter: Organism Value: A. thaliana
  misc_feature: MA Experiment 20000308 PARAMETER Experiment Name: At_100mM_NaCl__P Parameter: Plant Line Value: WS
  misc_feature: MA Experiment 20000308 PARAMETER Experiment Name: At_100mM_NaCl__P Parameter: Timepoint (hr) Value: 72
  misc_feature: MA Experiment 20000308 PARAMETER Experiment Name: At_100mM_NaCl__P Parameter: Tissue Value: Whole Plant
  misc_feature: MA Experiment 20000308 PARAMETER Experiment Name: At_100mM_NaCl__P Parameter: Treatment Value: 100mM NaCl vs. No Treatment
  misc_feature: MA Experiment ID: 20000436 Result: Down-regulated in Transcription
  misc_feature: MA Experiment 20000436 PARAMETER Experiment Name: At_Drought_P Parameter: Age (day) Value: 7
  misc_feature: MA Experiment 20000436 PARAMETER Experiment Name: At_Drought_P Parameter: Organism Value: A. thaliana
  misc_feature: MA Experiment 20000436 PARAMETER Experiment Name: At_Drought_P Parameter: Plant Line Value: WS
  misc_feature: MA Experiment 20000436 PARAMETER Experiment Name: At_Drought_P Parameter: Timepoint (hr) Value: 12
  misc_feature: MA Experiment 20000436 PARAMETER Experiment Name: At_Drought_P Parameter: Tissue Value: Whole Plant
  misc_feature: MA Experiment 20000436 PARAMETER Experiment Name: At_Drought_P Parameter: Treatment Value: Drought vs. No Drought
  misc_feature: MA Experiment ID: 20000437 Result: Down-regulated in Transcription
  misc_feature: MA Experiment 20000437 PARAMETER Experiment Name: At_Drought_P Parameter: Age (day) Value: 8
  misc_feature: MA Experiment 20000437 PARAMETER Experiment Name: At_Drought_P Parameter: Organism Value: A. thaliana
  misc_feature: MA Experiment 20000437 PARAMETER Experiment Name: At_Drought_P Parameter: Plant Line Value: WS
  misc_feature: MA Experiment 20000437 PARAMETER Experiment Name: At_Drought_P Parameter: Timepoint (hr) Value: 24
  misc_feature: MA Experiment 20000437 PARAMETER Experiment Name: At_Drought_P Parameter: Tissue Value: Whole Plant
  misc_feature: MA Experiment 20000437 PARAMETER Experiment Name: At_Drought_P Parameter: Treatment Value: Drought vs. No Drought
  misc_feature: MA Experiment ID: 20000438 Result: Up-regulated in Transcription
  misc_feature: MA Experiment 20000438 PARAMETER Experiment Name: At_Shoots__P Parameter: Age (day) Value: 14
  misc_feature: MA Experiment 20000438 PARAMETER Experiment Name: At_Shoots__P Parameter: Tissue Value: Shoots vs. Whole Plant
  misc_feature: MA Experiment ID: 20000441 Result: Up-regulated in Transcription
  misc_feature: MA Experiment 20000441 PARAMETER Experiment Name: At_1uM_BR-BRZ__P Parameter: Tissue Value: Shoot Apices
  misc_feature: MA Experiment 20000441 PARAMETER Experiment Name: At_1uM_BR-BRZ__P Parameter: Treatment Value: 1uM BR vs. No Treatment
  misc_feature: MA Experiment ID: 20000443 Result: Up-regulated in Transcription
  misc_feature: MA Experiment 20000443 PARAMETER Experiment Name: At_1uM_BR-BRZ__P Parameter: Tissue Value: Shoot Apices
  misc_feature: MA Experiment 20000443 PARAMETER Experiment Name: At_1uM_BR-BRZ__P Parameter: Treatment Value: 1uM BRZ vs. No Treatment
  misc_feature: MA Experiment ID: 20000453 Result: Down-regulated in Transcription
  misc_feature: MA Experiment 20000453 PARAMETER Experiment Name: At_100uM_ABA_P Parameter: Age (day) Value: 15
  misc_feature: MA Experiment 20000453 PARAMETER Experiment Name: At_100uM_ABA_P Parameter: Organism Value: A. thaliana
  misc_feature: MA Experiment 20000453 PARAMETER Experiment Name: At_100uM_ABA_P Parameter: Plant Line Value: WS
  misc_feature: MA Experiment 20000453 PARAMETER Experiment Name: At_100uM_ABA_P Parameter: Timepoint (hr) Value: 24
  misc_feature: MA Experiment 20000453 PARAMETER Experiment Name: At_100uM_ABA_P Parameter: Tissue Value: Aerial
  misc_feature: MA Experiment 20000453 PARAMETER Experiment Name: At_100uM_ABA_P Parameter: Treatment Value: 100uM ABA vs. No Treatment
  misc_feature: MA Experiment ID: 20000455 Result: Down-regulated in Transcription
  misc_feature: MA Experiment 20000455 PARAMETER Experiment Name: At_100uM_ABA_P Parameter: Age (day) Value: 16
  misc_feature: MA Experiment 20000455 PARAMETER Experiment Name: At_100uM_ABA_P Parameter: Organism Value: A. thaliana
  misc_feature: MA Experiment 20000455 PARAMETER Experiment Name: At_100uM_ABA_P Parameter: Plant Line Value: WS
  misc_feature: MA Experiment 20000455 PARAMETER Experiment Name: At_100uM_ABA_P Parameter: Timepoint (hr) Value: 48
  misc_feature: MA Experiment 20000455 PARAMETER Experiment Name: At_100uM_ABA_P Parameter: Tissue Value: Aerial
  misc_feature: MA Experiment 20000455 PARAMETER Experiment Name: At_100uM_ABA_P Parameter: Treatment Value: 100uM ABA vs. No Treatment
  misc_feature: MA Experiment ID: 20000573 Result: Down-regulated in Transcription
  misc_feature: MA Experiment 20000573 PARAMETER Experiment Name: At_100uM_ABA_Mutants__P Parameter: Organism Value: A. thaliana
  misc_feature: MA Experiment 20000573 PARAMETER Experiment Name: At_100uM_ABA_Mutants__P Parameter: Plant Line Value: CS22 vs. Ler wt
  misc_feature: MA Experiment 20000573 PARAMETER Experiment Name: At_100uM_ABA_Mutants__P Parameter: Timepoint (hr) Value: N/A
  misc_feature: MA Experiment 20000573 PARAMETER Experiment Name: At_100uM_ABA_Mutants__P Parameter: Tissue Value: Whole Plant
  misc_feature: MA Experiment 20000573 PARAMETER Experiment Name: At_100uM_ABA_Mutants__P Parameter: Treatment Value: None
  misc_feature: MA Experiment ID: 20000574 Result: Down-regulated in Transcription
  misc_feature: MA Experiment 20000574 PARAMETER Experiment Name: At_100uM_ABA_Mutants__P Parameter: Organism Value: A. thaliana
  misc_feature: MA Experiment 20000574 PARAMETER Experiment Name: At_100uM_ABA_Mutants__P Parameter: Plant Line Value: CS23 vs. Ler wt
  misc_feature: MA Experiment 20000574 PARAMETER Experiment Name: At_100uM_ABA_Mutants__P Parameter: Timepoint (hr) Value: N/A
  misc_feature: MA Experiment 20000574 PARAMETER Experiment Name: At_100uM_ABA_Mutants__P Parameter: Tissue Value: Whole Plant
  misc_feature: MA Experiment 20000574 PARAMETER Experiment Name: At_100uM_ABA_Mutants__P Parameter: Treatment Value: None
  misc_feature: MA Experiment ID: 20000794 Result: Down-regulated in Transcription
  misc_feature: MA Experiment 20000794 PARAMETER Experiment Name: At_Petals_P Parameter: Age (day) Value: 23-25 days
  misc_feature: MA Experiment 20000794 PARAMETER Experiment Name: At_Petals_P Parameter: Plant Line Value: WS
  misc_feature: MA Experiment 20000794 PARAMETER Experiment Name: At_Petals_P Parameter: Tissue Value: Petals vs. Whole plant
  misc_feature: MA Experiment ID: 20001247 Result: Up-regulated in Transcription
  misc_feature: MA Experiment 20001247 PARAMETER Experiment Name: At_Far-red-induction_P Parameter: Age (day) Value: 7
  misc_feature: MA Experiment 20001247 PARAMETER Experiment Name: At_Far-red-induction_P Parameter: Light Value: Far-red vs. White
  misc_feature: MA Experiment 20001247 PARAMETER Experiment Name: At_Far-red-induction_P Parameter: Organism Value: A. thaliana
  misc_feature: MA Experiment 20001247 PARAMETER Experiment Name: At_Far-red-induction_P Parameter: Plant Line Value: Columbia
  misc_feature: MA Experiment 20001247 PARAMETER Experiment Name: At_Far-red-induction_P Parameter: Timepoint (hr) Value: 1
  misc_feature: MA Experiment 20001247 PARAMETER Experiment Name: At_Far-red-induction_P Parameter: Tissue Value: Whole Plant
  misc_feature: MA Experiment ID: 20001248 Result: Up-regulated in Transcription
  misc_feature: MA Experiment 20001248 PARAMETER Experiment Name: At_Far-red-induction_P Parameter: Age (day) Value: 7
  misc_feature: MA Experiment 20001248 PARAMETER Experiment Name: At_Far-red-induction_P Parameter: Light Value: Far-red vs. White
  misc_feature: MA Experiment 20001248 PARAMETER Experiment Name: At_Far-red-induction_P Parameter: Organism Value: A. thaliana
  misc_feature: MA Experiment 20001248 PARAMETER Experiment Name: At_Far-red-induction_P Parameter: Plant Line Value: Columbia
  misc_feature: MA Experiment 20001248 PARAMETER Experiment Name: At_Far-red-induction_P Parameter: Timepoint (hr) Value: 4
  misc_feature: MA Experiment 20001248 PARAMETER Experiment Name: At_Far-red-induction_P Parameter: Tissue Value: Whole Plant
  misc_feature: MA Experiment ID: 20001450 Result: Up-regulated in Transcription
  misc_feature: MA Experiment 20001450 PARAMETER Experiment Name: At_Far-red-induction_P Parameter: Age (day) Value: 7
  misc_feature: MA Experiment 20001450 PARAMETER Experiment Name: At_Far-red-induction_P Parameter: Light Value: Far-red vs. White
  misc_feature: MA Experiment 20001450 PARAMETER Experiment Name: At_Far-red-induction_P Parameter: Organism Value: A. thaliana
  misc_feature: MA Experiment 20001450 PARAMETER Experiment Name: At_Far-red-induction_P Parameter: Plant Line Value: Columbia
  misc_feature: MA Experiment 20001450 PARAMETER Experiment Name: At_Far-red-induction_P Parameter: Timepoint (hr) Value: 8
  misc_feature: MA Experiment 20001450 PARAMETER Experiment Name: At_Far-red-induction_P Parameter: Tissue Value: Whole Plant
  misc_feature: MA Experiment ID: 20001451 Result: Up-regulated in Transcription
  misc_feature: MA Experiment 20001451 PARAMETER Experiment Name: At_Far-red-induction_P Parameter: Age (day) Value: 7
  misc_feature: MA Experiment 20001451 PARAMETER Experiment Name: At_Far-red-induction_P Parameter: Light Value: Far-red vs. White
  misc_feature: MA Experiment 20001451 PARAMETER Experiment Name: At_Far-red-induction_P Parameter: Organism Value: A. thaliana
  misc_feature: MA Experiment 20001451 PARAMETER Experiment Name: At_Far-red-induction_P Parameter: Plant Line Value: Columbia
  misc_feature: MA Experiment 20001451 PARAMETER Experiment Name: At_Far-red-induction_P Parameter: Timepoint (hr) Value: 24
  misc_feature: MA Experiment 20001451 PARAMETER Experiment Name: At_Far-red-induction_P Parameter: Tissue Value: Whole Plant
  misc_feature: MA Experiment ID: 20001504 Result: Down-regulated in Transcription
  misc_feature: MA Experiment 20001504 PARAMETER Experiment Name: At_Far-red-enriched_P Parameter: Age (day) Value: 10
  misc_feature: MA Experiment 20001504 PARAMETER Experiment Name: At_Far-red-enriched_P Parameter: Light Value: Far-red enriched vs. White
  misc_feature: MA Experiment 20001504 PARAMETER Experiment Name: At_Far-red-enriched_P Parameter: Organism Value: A. thaliana
  misc_feature: MA Experiment 20001504 PARAMETER Experiment Name: At_Far-red-enriched_P Parameter: Plant Line Value: Columbia
  misc_feature: MA Experiment 20001504 PARAMETER Experiment Name: At_Far-red-enriched_P Parameter: Timepoint (day) Value: 6
  misc_feature: MA Experiment 20001504 PARAMETER Experiment Name: At_Far-red-enriched_P Parameter: Tissue Value: Whole Plant
  misc_feature: MA Experiment ID: 20001554 Result: Down-regulated in Transcription
  misc_feature: MA Experiment 20001554 PARAMETER Experiment Name: At_Drought_Soil_Dry_P Parameter: Age (day) Value: 21
  misc_feature: MA Experiment 20001554 PARAMETER Experiment Name: At_Drought_Soil_Dry_P Parameter: Organism Value: A. thaliana
  misc_feature: MA Experiment 20001554 PARAMETER Experiment Name: At_Drought_Soil_Dry_P Parameter: Plant Line Value: WS
  misc_feature: MA Experiment 20001554 PARAMETER Experiment Name: At_Drought_Soil_Dry_P Parameter: Post Timepoint (hr) Value: None
  misc_feature: MA Experiment 20001554 PARAMETER Experiment Name: At_Drought_Soil_Dry_P Parameter: Post-Treatment Value: None
  misc_feature: MA Experiment 20001554 PARAMETER Experiment Name: At_Drought_Soil_Dry_P Parameter: Timepoint (day) Value: 7
  misc_feature: MA Experiment 20001554 PARAMETER Experiment Name: At_Drought_Soil_Dry_P Parameter: Treatment Value: Drought vs. No Drought
  misc_feature: MA Experiment ID: 20001556 Result: Down-regulated in Transcription
  misc_feature: MA Experiment 20001556 PARAMETER Experiment Name: At_Drought_Soil_Dry_P Parameter: Age (day) Value: 26
  misc_feature: MA Experiment 20001556 PARAMETER Experiment Name: At_Drought_Soil_Dry_P Parameter: Organism Value: A. thaliana
  misc_feature: MA Experiment 20001556 PARAMETER Experiment Name: At_Drought_Soil_Dry_P Parameter: Plant Line Value: WS
  misc_feature: MA Experiment 20001556 PARAMETER Experiment Name: At_Drought_Soil_Dry_P Parameter: Post Timepoint (hr) Value: None
  misc_feature: MA Experiment 20001556 PARAMETER Experiment Name: At_Drought_Soil_Dry_P Parameter: Post-Treatment Value: None
  misc_feature: MA Experiment 20001556 PARAMETER Experiment Name: At_Drought_Soil_Dry_P Parameter: Timepoint (day) Value: 12
  misc_feature: MA Experiment 20001556 PARAMETER Experiment Name: At_Drought_Soil_Dry_P Parameter: Treatment Value: Drought vs. No Drought
  misc_feature: MA Experiment ID: 20001560 Result: Down-regulated in Transcription
  misc_feature: MA Experiment 20001560 PARAMETER Experiment Name: At_Drought_Soil_Dry_P Parameter: Age (day) Value: 28
  misc_feature: MA Experiment 20001560 PARAMETER Experiment Name: At_Drought_Soil_Dry_P Parameter: Organism Value: A. thaliana
  misc_feature: MA Experiment 20001560 PARAMETER Experiment Name: At_Drought_Soil_Dry_P Parameter: Plant Line Value: WS
  misc_feature: MA Experiment 20001560 PARAMETER Experiment Name: At_Drought_Soil_Dry_P Parameter: Post Timepoint (hr) Value: None
  misc_feature: MA Experiment 20001560 PARAMETER Experiment Name: At_Drought_Soil_Dry_P Parameter: Post-Treatment Value: None
  misc_feature: MA Experiment 20001560 PARAMETER Experiment Name: At_Drought_Soil_Dry_P Parameter: Timepoint (day) Value: 14
  misc_feature: MA Experiment 20001560 PARAMETER Experiment Name: At_Drought_Soil_Dry_P Parameter: Treatment Value: Drought vs. No Drought
  misc_feature: MA Experiment ID: 20001760 Result: Down-regulated in Transcription
  misc_feature: MA Experiment 20001760 PARAMETER Experiment Name: At_50mM_NH4NO3_L-to-H_P Parameter: Timepoint (hr) Value: 2
  misc_feature: MA Experiment 20001760 PARAMETER Experiment Name: At_50mM_NH4NO3_L-to-H_P Parameter: Tissue Value: Siliques
  misc_feature: MA Experiment 20001760 PARAMETER Experiment Name: At_50mM_NH4NO3_L-to-H_P Parameter: Treatment Value: 50mM NH4NO3 vs 100mM Mannitol
  misc_feature: MA Experiment ID: 20001774 Result: Down-regulated in Transcription
  misc_feature: MA Experiment 20001774 PARAMETER Experiment Name: At_Far-red-enriched-adult_P Parameter: Age (day) Value: 31
  misc_feature: MA Experiment 20001774 PARAMETER Experiment Name: At_Far-red-enriched-adult_P Parameter: Light Value: Far-red enriched vs. White
  misc_feature: MA Experiment 20001774 PARAMETER Experiment Name: At_Far-red-enriched-adult_P Parameter: Organism Value: A. thaliana
  misc_feature: MA Experiment 20001774 PARAMETER Experiment Name: At_Far-red-enriched-adult_P Parameter: Plant Line Value: Columbia
  misc_feature: MA Experiment 20001774 PARAMETER Experiment Name: At_Far-red-enriched-adult_P Parameter: Timepoint (hr) Value: 72
  misc_feature: MA Experiment 20001774 PARAMETER Experiment Name: At_Far-red-enriched-adult_P Parameter: Tissue Value: Aerial
  misc_feature: MA Experiment ID: 20001904 Result: Down-regulated in Transcription
  misc_feature: MA Experiment 20001904 PARAMETER Experiment Name: At_Drought_Reproduction_P Parameter: Age (day) Value: 37
  misc_feature: MA Experiment 20001904 PARAMETER Experiment Name: At_Drought_Reproduction_P Parameter: Organism Value: A. thaliana
  misc_feature: MA Experiment 20001904 PARAMETER Experiment Name: At_Drought_Reproduction_P Parameter: Plant Line Value: WS
  misc_feature: MA Experiment 20001904 PARAMETER Experiment Name: At_Drought_Reproduction_P Parameter: Timepoint (day) Value: 7
  misc_feature: MA Experiment 20001904 PARAMETER Experiment Name: At_Drought_Reproduction_P Parameter: Tissue Value: Rosettes
  misc_feature: MA Experiment 20001904 PARAMETER Experiment Name: At_Drought_Reproduction_P Parameter: Treatment Value: Drought vs. No Drought
  misc_feature: MA Experiment ID: 20001905 Result: Down-regulated in Transcription
  misc_feature: MA Experiment 20001905 PARAMETER Experiment Name: At_Drought_Reproduction_P Parameter: Age (day) Value: 40
  misc_feature: MA Experiment 20001905 PARAMETER Experiment Name: At_Drought_Reproduction_P Parameter: Organism Value: A. thaliana
  misc_feature: MA Experiment 20001905 PARAMETER Experiment Name: At_Drought_Reproduction_P Parameter: Plant Line Value: WS
  misc_feature: MA Experiment 20001905 PARAMETER Experiment Name: At_Drought_Reproduction_P Parameter: Timepoint (day) Value: 10
  misc_feature: MA Experiment 20001905 PARAMETER Experiment Name: At_Drought_Reproduction_P Parameter: Tissue Value: Rosettes
  misc_feature: MA Experiment 20001905 PARAMETER Experiment Name: At_Drought_Reproduction_P Parameter: Treatment Value: Drought vs. No Drought
aacaacgtcacctaaatctctctcacccaatttgtgtttcttctttctgctaaaaggttataatttttgtttcttggtttggtgagaatcttcaagaaactgaaacaaagaaaatggattctagttgcatagacgagataagttcctccacttcagaatctttctccgccaccaccgccaagaagctctctcctcctcccgcggcggcgttacgcctctaccggatgggaagcggcgggagcagcgtcgtgttggatcccgagaacggcctagagacggagtcacgaaagctaccatcttcaaaatacaaaggtgttgttcctcagcctaacggaagatggggagctcagatctacgagaagcaccaacgagtatggctcgggactttcaacgagcaagaagaagctgctcgttcctacgacatcgcagcttgtagattccgtggccgcgacgccgtcgtcaacttcaagaacgttctggaagacggcgatttagcttttcttgaagctcactcaaaggccgagatcgtcgacatgttgagaaaacacacttacgccgacgagcttgaacagaacaataaacggcagttgtttctctccgtcgacgctaacggaaaacgtaacggatcgagtactactcaaaacgacaaagttttaaagacgcgtgaagttcttttcgagaaggctgttacacctagcgacgttgggaagctaaaccgtctcgtgatacctaaacaacacgccgagaaacactttccgttaccgtcaccgtcaccggcagtgactaaaggagttttgatcaacttcgaagacgttaacggtaaagtgtggaggttccgttactcatactggaacagtagtcaaagttacgtgttgaccaagggatggagtcgattcgtcaaggagaagaatcttcgagccggtgatgttgttactttcgagagatcgaccggactagagcggcagttatatattgattggaaagttcggtctggtccgagagaaaacccggttcaggtggtggttcggcttttcggagttgatatctttaatgtgaccaccgtgaagccaaacgacgtcgtggccgtttgcggtggaaagagatctcgagatgttgatgatatgtttgcgttacggtgttccaagaagcaggcgataatcaatgctttgtgacatatttccttttccgattttatgctttcgttttttaatttttttttttgtcaagttgtgtaggttgtgattcatgctaggttgtatttaggaaaagagataagaccaaaaaataaattggaacaatggttttgtggaaaagtggtaaatagacctacctc

SEQ ID NO: 30911 - protein, 352 aa, Arabidopsis thaliana
  peptide (1)..(352): Ceres Seq. ID no. 12370510
  misc_feature (187)..(295): Pfam Name: B3 DNA binding domain Pfam Description: B3 DNA binding domain
  misc_feature (39)..(293): Homolog of NCBI NO: 34911404 NR Description: DNA-binding protein RAV2-like
  misc_feature (10)..(311): Homolog of NCBI NO: 34895690 NR Description: putative DNA binding protein RAV2
  misc_feature (61)..(311): Homolog of NCBI NO: 34895676 NR Description: putative DNA binding protein RAV2
  misc_feature (1)..(349): Homolog of NCBI NO: 21593532 NR Description: AP2 domain transcription factor [Arabidopsis
  misc_feature (1)..(349): Homolog of NCBI NO: 15230871 NR Description: AP2 domain transcription factor RAV, putative
  misc_feature (1)..(351): Homolog of NCBI NO: 15222217 NR Description: DNA-binding protein (RAV1)
  misc_feature (1)..(352): Homolog of NCBI NO: 15222622 NR Description: DNA-binding protein RAV2, putative
  misc_feature (19)..(352): Homolog of NCBI NO: 2281641 NR Description: AP2 domain containing protein RAP2.8 [Arabidopsis
  misc_feature (1)..(352): Homolog of NCBI NO: 21554039 NR Description: putative RAV2-like DNA-binding protein
  misc_feature (1)..(352): Homolog of NCBI NO: 18409138 NR Description: AP2 domain protein RAP2.8 (RAV2)
MDSSCIDEISSSTSESFSATTAKKLSPPPAAALRLYRMGSGGSSVVLDPENGLETESRKLPSSKYKGVVPQPNGRWGAQIYEKHQRVWLGTFNEQEEAARSYDIAACRFRGRDAVVNFKNVLEDGDLAFLEAHSKAEIVDMLRKHTYADELEQNNKRQLFLSVDANGKRNGSSTTQNDKVLKTREVLFEKAVTPSDVGKLNRLVIPKQHAEKHFPLPSPSPAVTKGVLINFEDVNGKVWRFRYSYWNSSQSYVLTKGWSRFVKEKNLRAGDVVTFERSTGLERQLYIDWKVRSGPRENPVQVVVRLFGVDIFNVTTVKPNDVVAVCGGKRSRDVDDMFALRCSKKQAIINAL

SEQ ID NO: 30912 - protein, 315 aa, Arabidopsis thaliana
  peptide (1)..(315): Ceres Seq. ID no. 12370511
  misc_feature (150)..(258): Pfam Name: B3 DNA binding domain Pfam Description: B3 DNA binding domain
  misc_feature (2)..(256): Homolog of NCBI NO: 34911404 NR Description: DNA-binding protein RAV2-like
  misc_feature (1)..(274): Homolog of NCBI NO: 34895690 NR Description: putative DNA binding protein RAV2
  misc_feature (24)..(274): Homolog of NCBI NO: 34895676 NR Description: putative DNA binding protein RAV2
  misc_feature (1)..(312): Homolog of NCBI NO: 21593532 NR Description: AP2 domain transcription factor [Arabidopsis
  misc_feature (1)..(312): Homolog of NCBI NO: 15230871 NR Description: AP2 domain transcription factor RAV, putative
  misc_feature (1)..(314): Homolog of NCBI NO: 15222217 NR Description: DNA-binding protein (RAV1)
  misc_feature (1)..(315): Homolog of NCBI NO: 15222622 NR Description: DNA-binding protein RAV2, putative
  misc_feature (1)..(315): Homolog of NCBI NO: 2281641 NR Description: AP2 domain containing protein RAP2.8 [Arabidopsis
  misc_feature (1)..(315): Homolog of NCBI NO: 21554039 NR Description: putative RAV2-like DNA-binding protein
  misc_feature (1)..(315): Homolog of NCBI NO: 18409138 NR Description: AP2 domain protein RAP2.8 (RAV2)
MGSGGSSVVLDPENGLETESRKLPSSKYKGVVPQPNGRWGAQIYEKHQRVWLGTFNEQEEAARSYDIAACRFRGRDAVVNFKNVLEDGDLAFLEAHSKAEIVDMLRKHTYADELEQNNKRQLFLSVDANGKRNGSSTTQNDKVLKTREVLFEKAVTPSDVGKLNRLVIPKQHAEKHFPLPSPSPAVTKGVLINFEDVNGKVWRFRYSYWNSSQSYVLTKGWSRFVKEKNLRAGDVVTFERSTGLERQLYIDWKVRSGPRENPVQVVVRLFGVDIFNVTTVKPNDVVAVCGGKRSRDVDDMFALRCSKKQAIINAL

SEQ ID NO: 30913 - protein, 212 aa, Arabidopsis thaliana
  peptide (1)..(212): Ceres Seq. ID no. 12370512
  misc_feature (47)..(155): Pfam Name: B3 DNA binding domain Pfam Description: B3 DNA binding domain
  misc_feature (1)..(153): Homolog of NCBI NO: 34911404 NR Description: DNA-binding protein RAV2-like
  misc_feature (1)..(171): Homolog of NCBI NO: 34895690 NR Description: putative DNA binding protein RAV2
  misc_feature (1)..(171): Homolog of NCBI NO: 34895676 NR Description: putative DNA binding protein RAV2
  misc_feature (1)..(209): Homolog of NCBI NO: 21593532 NR Description: AP2 domain transcription factor [Arabidopsis
  misc_feature (1)..(209): Homolog of NCBI NO: 15230871 NR Description: AP2 domain transcription factor RAV, putative
  misc_feature (1)..(211): Homolog of NCBI NO: 15222217 NR Description: DNA-binding protein (RAV1)
  misc_feature (1)..(212): Homolog of NCBI NO: 15222622 NR Description: DNA-binding protein RAV2, putative
  misc_feature (1)..(212): Homolog of NCBI NO: 2281641 NR Description: AP2 domain containing protein RAP2.8 [Arabidopsis
  misc_feature (1)..(212): Homolog of NCBI NO: 21554039 NR Description: putative RAV2-like DNA-binding protein
  misc_feature (1)..(212): Homolog of NCBI NO: 18409138 NR Description: AP2 domain protein RAP2.8 (RAV2)
MLRKHTYADELEQNNKRQLFLSVDANGKRNGSSTTQNDKVLKTREVLFEKAVTPSDVGKLNRLVIPKQHAEKHFPLPSPSPAVTKGVLINFEDVNGKVWRFRYSYWNSSQSYVLTKGWSRFVKEKNLRAGDVVTFERSTGLERQLYIDWKVRSGPRENPVQVVVRLFGVDIFNVTTVKPNDVVAVCGGKRSRDVDDMFALRCSKKQAIINAL

SEQ ID NO: 30914 - DNA, 1903 bp, Arabidopsis thaliana
  misc_feature (1)..(1903): Ceres Seq. ID no. 12384905
  misc_feature: MA Experiment ID: 108434 Result: Down-regulated in Transcription
  misc_feature: MA Experiment 108434 PARAMETER Experiment Name: At_Root_Tips_cDNA_P Parameter: Tissue Value: Root Tips
  misc_feature: MA Experiment ID: 108463 Result: Down-regulated in Transcription
  misc_feature: MA Experiment 108463 PARAMETER Experiment Name: At_Germinating_Seeds_cDNA_P Parameter: Age (day) Value: 3 vs. 0
  misc_feature: MA Experiment 108463 PARAMETER Experiment Name: At_Germinating_Seeds_cDNA_P Parameter: Tissue Value: Germinating Seeds
  misc_feature: MA Experiment ID: 108464 Result: Down-regulated in Transcription
  misc_feature: MA Experiment 108464 PARAMETER Experiment Name: At_Germinating_Seeds_cDNA_P Parameter: Age (day) Value: 4 vs. 0
  misc_feature: MA Experiment 108464 PARAMETER Experiment Name: At_Germinating_Seeds_cDNA_P Parameter: Tissue Value: Germinating Seeds
  misc_feature: MA Experiment ID: 20000088 Result: Up-regulated in Transcription
  misc_feature: MA Experiment 20000088 PARAMETER Experiment Name: At_100uM_ABA_Mutants_cDNA_P Parameter: Plant Line Value: Landsberg
  misc_feature: MA Experiment 20000088 PARAMETER Experiment Name: At_100uM_ABA_Mutants_cDNA_P Parameter: Timepoint (hr) Value: 6
  misc_feature: MA Experiment 20000088 PARAMETER Experiment Name: At_100uM_ABA_Mutants_cDNA_P Parameter: Tissue Value: Aerial
  misc_feature: MA Experiment 20000088 PARAMETER Experiment Name: At_100uM_ABA_Mutants_cDNA_P Parameter: Treatment Value: 100uM ABA vs. No Treatment
acatcaaaaccgcctccatttctcattctctctctctctaaaaaaccaaatccagagtcagagaaaatctgtgatggctctttccaacgcctcctctctctccaccagatctatctacggcggtgatctttctcaccgtccaagcaaccgtcaatcatccttcacatttcatcccgccgtcaacaccaagcctaaatccgttaacctcgtcacggctgtacacgcggctgagccagctagaaacgctgtttcagtcaaagaatccgttgcgtcttcttcgtctggtgcattgaaatggactccagagagctggaaactgaagaaggctctgcaacttcctgattatcctaacgccaatgagcttgagtctgtgcttaaaacgatagaggcttttcctccgattgtgttcgccggagaagctaggaatcttgaagagagattggctgatgctgctgttggtaaagcttttcttctccaaggaggtgattgtgctgagagtttcaaggagttcaatgctactaatatcagagacaccttcagggttctgcttcagatgagtattgttcttacattcggtggccaggttccggtcattaaggttgggaggatggctggtcaatttgcaaagcctagatctgatgcatttgaggagaaggatggagtgaaattaccaagctacaagggagataacatcaatggtgatacttttgatgagaaatccaggattcctgatcctaataggatgattcgagcttacactcaatctgcagctactttgaatcttcttagagcctttgccactggaggttacgctgctattcaaagagttactcaatggaaccttgattttgttgaacaaagtgagcaagctgacaggtaccaggaattagctaatagggttgatgaggccttggggttcatgtctgcatgtggacttggcacggatcatccacttatgactacaactgatttctacacatcccatgagtgtttgcttctgccttatgaacagtcccttacaaggttggattcaacttctggtctctactatgattgttctgcacacatggtctggtgcggagagcgtaccagacaattggatggcgctcatgtcgagtttctcagggggattgctaatcctctgggcattaaggtgagcaacaaaatggatccctttgagctggttaagctagtagaaatcctgaatcctaataacaagcctggaagaatcactgtaattgtgagaatgggtgccgagaacatgagagttaagcttccccacctgatcagagcagtccgcagatcaggccagattgtgacatgggtctgcgatccaatgcatggaaacaccatcaaagcaccttgcggtcttaaaacacgtgcctttgactcaatactggctgaagtccgagcattccttgatgtgcacgagcaagaaggaagccacgcgggcggtatccatctcgagatgacaggtcagaacgtgacagaatgcattggagggtcccgcactgtgacctacgatgacctcagttctcgctaccacacacactgtgacccaaggctgaacgcgtcacagtctcttgaacttgccttcattgttgcagaacggctcaggaagagaagaacgggtagccagcgtgtgtcttgagtccggttcttcccttttatacactttttgattccaaacaaatcttttctctttgtcctgtgactgtgagttggtgtctttatgacctaagttaaaagccccaaaagcctctctaggaggagtaaacctgtttctgctgtggacagaccatgtcatgtcattgttctttatgttaactttaatgtcaaaccgtgtcacttacactagtgtatatttatttttacgtatctacacaaacatgaaacttgttct

SEQ ID NO: 30915 - protein, 549 aa, Arabidopsis thaliana
  peptide (1)..(549): Ceres Seq. ID no. 12384906
  misc_feature (98)..(535): Pfam Name: Class-II DAHP synthetase family Pfam Description: Class-II DAHP synthetase family
  misc_feature (3)..(548): Homolog of NCBI NO: 7488957 NR Description: probable 2-dehydro-3-deoxy-phosphoheptonate
  misc_feature (25)..(547): Homolog of NCBI NO: 2398679 NR Description: 3-deoxy-D-arabino-heptulosonate 7-phosphate
  misc_feature (25)..(548): Homolog of NCBI NO: 114193 NR Description: Phospho-2-dehydro-3-deoxyheptonate aldolase 1, precursor (Phospho-2-keto-3-deoxyheptonate aldolase 1) (DAHP
  misc_feature (25)..(547): Homolog of NCBI NO: 15219878 NR Description: 3-deoxy-D-arabino-heptulosonate 7-phosphate,
  misc_feature (25)..(548): Homolog of NCBI NO: 584776 NR Description: Phospho-2-dehydro-3-deoxyheptonate aldolase 1, precursor (Phospho-2-keto-3-deoxyheptonate aldolase 1) (DAHP
  misc_feature (25)..(548): Homolog of NCBI NO: 584779 NR Description: Phospho-2-dehydro-3-deoxyheptonate aldolase 2, precursor (Phospho-2-keto-3-deoxyheptonate aldolase 2) (DAHP
  misc_feature (25)..(547): Homolog of NCBI NO: 2546988 NR Description: 2-dehydro-3-deoxyphosphoheptonate aldolase
  misc_feature (25)..(549): Homolog of NCBI NO: 99742 NR Description: 2-dehydro-3-deoxy-phosphoheptonate aldolase (EC
  misc_feature (25)..(549): Homolog of NCBI NO: 166688 NR Description: 3-deoxy-D-arabino-heptulosonate y-phosphate
  misc_feature (25)..(549): Homolog of NCBI NO: 15236093 NR Description: 2-dehydro-3-deoxyphosphoheptonate aldolase
HQNRLHFSFSLSLKNQIQSQRKSVMALSNASSLSTRSIYGGDLSHRPSNRQSSFTFHPAVNTKPKSVNLVTAVHAAEPARNAVSVKESVASSSSGALKWTPESWKLKKALQLPDYPNANELESVLKTIEAFPPIVFAGEARNLEERLADAAVGKAFLLQGGDCAESFKEFNATNIRDTFRVLLQMSIVLTFGGQVPVIKVGRMAGQFAKPRSDAFEEKDGVKLPSYKGDNINGDTFDEKSRIPDPNRMIRAYTQSAATLNLLRAFATGGYAAIQRVTQWNLDFVEQSEQADRYQELANRVDEALGFMSACGLGTDHPLMTTTDFYTSHECLLLPYEQSLTRLDSTSGLYYDCSAHMVWCGERTRQLDGAHVEFLRGIANPLGIKVSNKMDPFELVKLVEILNPNNKPGRITVIVRMGAENMRVKLPHLIRAVRRSGQIVTWVCDPMHGNTIKAPCGLKTRAFDSILAEVRAFLDVHEQEGSHAGGIHLEMTGQNVTECIGGSRTVTYDDLSSRYHTHCDPRLNASQSLELAFIVAERLRKRRTGSQRVS

SEQ ID NO: 30916 - protein, 525 aa, Arabidopsis thaliana
  peptide (1)..(525): Ceres Seq. ID no. 12384907
  misc_feature (74)..(511): Pfam Name: Class-II DAHP synthetase family Pfam Description: Class-II DAHP synthetase family
  misc_feature (1)..(524): Homolog of NCBI NO: 7488957 NR Description: probable 2-dehydro-3-deoxy-phosphoheptonate
  misc_feature (1)..(523): Homolog of NCBI NO: 2398679 NR Description: 3-deoxy-D-arabino-heptulosonate 7-phosphate
  misc_feature (1)..(524): Homolog of NCBI NO: 114193 NR Description: Phospho-2-dehydro-3-deoxyheptonate aldolase 1, precursor (Phospho-2-keto-3-deoxyheptonate aldolase 1) (DAHP
  misc_feature (1)..(523): Homolog of NCBI NO: 15219878 NR Description: 3-deoxy-D-arabino-heptulosonate 7-phosphate,
  misc_feature (1)..(524): Homolog of NCBI NO: 584776 NR Description: Phospho-2-dehydro-3-deoxyheptonate aldolase 1, precursor (Phospho-2-keto-3-deoxyheptonate aldolase 1) (DAHP
  misc_feature (1)..(524): Homolog of NCBI NO: 584779 NR Description: Phospho-2-dehydro-3-deoxyheptonate aldolase 2, precursor (Phospho-2-keto-3-deoxyheptonate aldolase 2) (DAHP
  misc_feature (1)..(523): Homolog of NCBI NO: 2546988 NR Description: 2-dehydro-3-deoxyphosphoheptonate aldolase
  misc_feature (1)..(525): Homolog of NCBI NO: 99742 NR Description: 2-dehydro-3-deoxy-phosphoheptonate aldolase (EC
  misc_feature (1)..(525): Homolog of NCBI NO: 166688 NR Description: 3-deoxy-D-arabino-heptulosonate y-phosphate
  misc_feature (1)..(525): Homolog of NCBI NO: 15236093 NR Description: 2-dehydro-3-deoxyphosphoheptonate aldolase
MALSNASSLSTRSIYGGDLSHRPSNRQSSFTFHPAVNTKPKSVNLVTAVHAAEPARNAVSVKESVASSSSGALKWTPESWKLKKALQLPDYPNANELESVLKTIEAFPPIVFAGEARNLEERLADAAVGKAFLLQGGDCAESFKEFNATNIRDTFRVLLQMSIVLTFGGQVPVIKVGRMAGQFAKPRSDAFEEKDGVKLPSYKGDNINGDTFDEKSRIPDPNRMIRAYTQSAATLNLLRAFATGGYAAIQRVTQWNLDFVEQSEQADRYQELANRVDEALGFMSACGLGTDHPLMTTTDFYTSHECLLLPYEQSLTRLDSTSGLYYDCSAHMVWCGERTRQLDGAHVEFLRGIANPLGIKVSNKMDPFELVKLVEILNPNNKPGRITVIVRMGAENMRVKLPHLIRAVRRSGQIVTWVCDPMHGNTIKAPCGLKTRAFDSILAEVRAFLDVHEQEGSHAGGIHLEMTGQNVTECIGGSRTVTYDDLSSRYHTHCDPRLNASQSLELAFIVAERLRKRRTGSQRVS

SEQ ID NO: 30917 - protein, 365 aa, Arabidopsis thaliana
  peptide (1)..(365): Ceres Seq. ID no. 12384908
  misc_feature (1)..(351): Pfam Name: Class-II DAHP synthetase family Pfam Description: Class-II DAHP synthetase family
  misc_feature (1)..(364): Homolog of NCBI NO: 7488957 NR Description: probable 2-dehydro-3-deoxy-phosphoheptonate
  misc_feature (1)..(363): Homolog of NCBI NO: 2398679 NR Description: 3-deoxy-D-arabino-heptulosonate 7-phosphate
  misc_feature (1)..(364): Homolog of NCBI NO: 114193 NR Description: Phospho-2-dehydro-3-deoxyheptonate aldolase 1, precursor (Phospho-2-keto-3-deoxyheptonate aldolase 1) (DAHP
  misc_feature (1)..(363): Homolog of NCBI NO: 15219878 NR Description: 3-deoxy-D-arabino-heptulosonate 7-phosphate,
  misc_feature (1)..(364): Homolog of NCBI NO: 584776 NR Description: Phospho-2-dehydro-3-deoxyheptonate aldolase 1, precursor (Phospho-2-keto-3-deoxyheptonate aldolase 1) (DAHP
  misc_feature (1)..(364): Homolog of NCBI NO: 584779 NR Description: Phospho-2-dehydro-3-deoxyheptonate aldolase 2, precursor (Phospho-2-keto-3-deoxyheptonate aldolase 2) (DAHP
  misc_feature (1)..(363): Homolog of NCBI NO: 2546988 NR Description: 2-dehydro-3-deoxyphosphoheptonate aldolase
  misc_feature (1)..(365): Homolog of NCBI NO: 99742 NR Description: 2-dehydro-3-deoxy-phosphoheptonate aldolase (EC
  misc_feature (1)..(365): Homolog of NCBI NO: 166688 NR Description: 3-deoxy-D-arabino-heptulosonate y-phosphate
  misc_feature (1)..(365): Homolog of NCBI NO: 15236093 NR Description: 2-dehydro-3-deoxyphosphoheptonate aldolase
MSIVLTFGGQVPVIKVGRMAGQFAKPRSDAFEEKDGVKLPSYKGDNINGDTFDEKSRIPDPNRMIRAYTQSAATLNLLRAFATGGYAAIQRVTQWNLDFVEQSEQADRYQELANRVDEALGFMSACGLGTDHPLMTTTDFYTSHECLLLPYEQSLTRLDSTSGLYYDCSAHMVWCGERTRQLDGAHVEFLRGIANPLGIKVSNKMDPFELVKLVEILNPNNKPGRITVIVRMGAENMRVKLPHLIRAVRRSGQIVTWVCDPMHGNTIKAPCGLKTRAFDSILAEVRAFLDVHEQEGSHAGGIHLEMTGQNVTECIGGSRTVTYDDLSSRYHTHCDPRLNASQSLELAFIVAERLRKRRTGSQRVS

SEQ ID NO: 30918 - DNA, 1132 bp, Arabidopsis thaliana
  misc_feature (1)..(1132): Ceres Seq. ID no. 12326010
  misc_feature: MA Experiment ID: 108462 Result: Up-regulated in Transcription
  misc_feature: MA Experiment 108462 PARAMETER Experiment Name: At_Germinating_Seeds_cDNA_P Parameter: Age (day) Value: 2 vs. 0
  misc_feature: MA Experiment 108462 PARAMETER Experiment Name: At_Germinating_Seeds_cDNA_P Parameter: Tissue Value: Germinating Seeds
  misc_feature: MA Experiment ID: 108464 Result: Up-regulated in Transcription
  misc_feature: MA Experiment 108464 PARAMETER Experiment Name: At_Germinating_Seeds_cDNA_P Parameter: Age (day) Value: 4 vs. 0
  misc_feature: MA Experiment 108464 PARAMETER Experiment Name: At_Germinating_Seeds_cDNA_P Parameter: Tissue Value: Germinating Seeds
  misc_feature: MA Experiment ID: 108488 Result: Up-regulated in Transcription
  misc_feature: MA Experiment ID: 108595 Result: Down-regulated in Transcription
  misc_feature: MA Experiment 108595 PARAMETER Experiment Name: At_Ler-pi_Ovule_cDNA_P Parameter: Plant Line Value: null
  misc_feature: MA Experiment ID: 20000185 Result: Down-regulated in Transcription
  misc_feature: MA Experiment 20000185 PARAMETER Experiment Name: At_Roots__P Parameter: Age (day) Value: 7 vs. 21
  misc_feature: MA Experiment 20000185 PARAMETER Experiment Name: At_Roots__P Parameter: Organism Value: A. thaliana
  misc_feature: MA Experiment 20000185 PARAMETER Experiment Name: At_Roots__P Parameter: Tissue Value: Roots vs. Whole Plant
  misc_feature: MA Experiment ID: 20000437 Result: Down-regulated in Transcription
  misc_feature: MA Experiment 20000437 PARAMETER Experiment Name: At_Drought_P Parameter: Age (day) Value: 8
  misc_feature: MA Experiment 20000437 PARAMETER Experiment Name: At_Drought_P Parameter: Organism Value: A. thaliana
  misc_feature: MA Experiment 20000437 PARAMETER Experiment Name: At_Drought_P Parameter: Plant Line Value: WS
  misc_feature: MA Experiment 20000437 PARAMETER Experiment Name: At_Drought_P Parameter: Timepoint (hr) Value: 24
  misc_feature: MA Experiment 20000437 PARAMETER Experiment Name: At_Drought_P Parameter: Tissue Value: Whole Plant
  misc_feature: MA Experiment 20000437 PARAMETER Experiment Name: At_Drought_P Parameter: Treatment Value: Drought vs. No Drought
  misc_feature: MA Experiment ID: 20000439 Result: Down-regulated in Transcription
  misc_feature: MA Experiment 20000439 PARAMETER Experiment Name: At_Roots__P Parameter: Age (day) Value: 14 vs. 21
  misc_feature: MA Experiment 20000439 PARAMETER Experiment Name: At_Roots__P Parameter: Organism Value: A. thaliana
  misc_feature: MA Experiment 20000439 PARAMETER Experiment Name: At_Roots__P Parameter: Tissue Value: Roots vs. Whole Plant
  misc_feature: MA Experiment ID: 20000573 Result: Down-regulated in Transcription
  misc_feature: MA Experiment 20000573 PARAMETER Experiment Name: At_100uM_ABA_Mutants__P Parameter: Organism Value: A. thaliana
  misc_feature: MA Experiment 20000573 PARAMETER Experiment Name: At_100uM_ABA_Mutants__P Parameter: Plant Line Value: CS22 vs. Ler wt
  misc_feature: MA Experiment 20000573 PARAMETER Experiment Name: At_100uM_ABA_Mutants__P Parameter: Timepoint (hr) Value: N/A
  misc_feature: MA Experiment 20000573 PARAMETER Experiment Name: At_100uM_ABA_Mutants__P Parameter: Tissue Value: Whole Plant
  misc_feature: MA Experiment 20000573 PARAMETER Experiment Name: At_100uM_ABA_Mutants__P Parameter: Treatment Value: None
  misc_feature: MA Experiment ID: 20000574 Result: Down-regulated in Transcription
  misc_feature: MA Experiment 20000574 PARAMETER Experiment Name: At_100uM_ABA_Mutants__P Parameter: Organism Value: A. thaliana
  misc_feature: MA Experiment 20000574 PARAMETER Experiment Name: At_100uM_ABA_Mutants__P Parameter: Plant Line Value: CS23 vs. Ler wt
  misc_feature: MA Experiment 20000574 PARAMETER Experiment Name: At_100uM_ABA_Mutants__P Parameter: Timepoint (hr) Value: N/A
  misc_feature: MA Experiment 20000574 PARAMETER Experiment Name: At_100uM_ABA_Mutants__P Parameter: Tissue Value: Whole Plant
  misc_feature: MA Experiment 20000574 PARAMETER Experiment Name: At_100uM_ABA_Mutants__P Parameter: Treatment Value: None
  misc_feature: MA Experiment ID: 20001248 Result: Down-regulated in Transcription
  misc_feature: MA Experiment 20001248 PARAMETER Experiment Name: At_Far-red-induction_P Parameter: Age (day) Value: 7
  misc_feature: MA Experiment 20001248 PARAMETER Experiment Name: At_Far-red-induction_P Parameter: Light Value: Far-red vs. White
  misc_feature: MA Experiment 20001248 PARAMETER Experiment Name: At_Far-red-induction_P Parameter: Organism Value: A. thaliana
  misc_feature: MA Experiment 20001248 PARAMETER Experiment Name: At_Far-red-induction_P Parameter: Plant Line Value: Columbia
  misc_feature: MA Experiment 20001248 PARAMETER Experiment Name: At_Far-red-induction_P Parameter: Timepoint (hr) Value: 4
  misc_feature: MA Experiment 20001248 PARAMETER Experiment Name: At_Far-red-induction_P Parameter: Tissue Value: Whole Plant
  misc_feature: MA Experiment ID: 20001450 Result: Down-regulated in Transcription
  misc_feature: MA Experiment 20001450 PARAMETER Experiment Name: At_Far-red-induction_P Parameter: Age (day) Value: 7
  misc_feature: MA Experiment 20001450 PARAMETER Experiment Name: At_Far-red-induction_P Parameter: Light Value: Far-red vs. White
  misc_feature: MA Experiment 20001450 PARAMETER Experiment Name: At_Far-red-induction_P Parameter: Organism Value: A. thaliana
  misc_feature: MA Experiment 20001450 PARAMETER Experiment Name: At_Far-red-induction_P Parameter: Plant Line Value: Columbia
  misc_feature: MA Experiment 20001450 PARAMETER Experiment Name: At_Far-red-induction_P Parameter: Timepoint (hr) Value: 8
  misc_feature: MA Experiment 20001450 PARAMETER Experiment Name: At_Far-red-induction_P Parameter: Tissue Value: Whole Plant
  misc_feature: MA Experiment ID: 20001905 Result: Down-regulated in Transcription
  misc_feature: MA Experiment 20001905 PARAMETER Experiment Name: At_Drought_Reproduction_P Parameter: Age (day) Value: 40
  misc_feature: MA Experiment 20001905 PARAMETER Experiment Name: At_Drought_Reproduction_P Parameter: Organism Value: A. thaliana
  misc_feature: MA Experiment 20001905 PARAMETER Experiment Name: At_Drought_Reproduction_P Parameter: Plant Line Value: WS
  misc_feature: MA Experiment 20001905 PARAMETER Experiment Name: At_Drought_Reproduction_P Parameter: Timepoint (day) Value: 10
  misc_feature: MA Experiment 20001905 PARAMETER Experiment Name: At_Drought_Reproduction_P Parameter: Tissue Value: Rosettes
  misc_feature: MA Experiment 20001905 PARAMETER Experiment Name: At_Drought_Reproduction_P Parameter: Treatment Value: Drought vs. No Drought
aacaagatacaatgagaatgttagttcttcgcactcccaccggacctgtctccgccgtcagattcatcaccaaatccaaaccttctcctttctcttctcccgattcatggctcctccctgcaccaaacactcaccggagtcgtccccgcgtcgtcctcgctctctctaaccccgacggaagcgtcaactcaaaaccctcaacctcagcttctcaaatcccttcttcaggagatgaaacagttttcgtgggtcaagataatgttcctctcgagggcgtgattcaattcgataaaccgtcatctacttcatcttctaacattaccaaatggggtcgtgtggctttacttgcgggtggtgatgttttagctctgcttatcttctctgccattgggagatttagccatggtttccctgttttttctcttgatactctccacacagctgaccctttcattgcgggatggtttctgagtgcttatttcttggggggttatgcggaggaaggacgaggaatgaagggaaagtctaaagctgtggttgcagctgcgaaatcttggattgtcggaactccgcttggaattatcattaggtcagcttcatcaggtcacattccggcatatagctttgtgttggtgacaatgggaagtactgctgttttacttataggatggagagcattgttattcagtgtgcttcctacagagtccaagaagaaagatgatacgtatcggaagggtagtgcattcgagctatttgagttgcttacttcattgataagacgatggtgaaggagcatccatgaatattcggtcggttggaggttgagatttaagtatgcacaacaaaaatgtaaatgtactttgtcacaagtcacaaccgctaacagatcatataaatatgtgtgttgagaagttccaggaccaagtgtaatatcgatatagttgcagtggccagtggaggaggaaagcaatgatgagagatgatttgtctcaagtcaaacaataaacagaggaagtaaactccagtactcttttttgggtggtttttctccattgacagtagaatcaaagattttcagtatatatccaattaacagagaaatgaaatgaaaacaaaaatatcattacagtgg

SEQ ID NO: 30919 - protein, 261 aa, Arabidopsis thaliana
  peptide (1)..(261): Ceres Seq. ID no. 12326011
  misc_feature (106)..(226): Homolog of NCBI NO: 25029256 NR Description: conserved hypothetical protein [Corynebacterium
  misc_feature (109)..(224): Homolog of NCBI NO: 22970530 NR Description: hypothetical protein [Chloroflexus aurantiacus]
  misc_feature (6)..(261): Homolog of NCBI NO: 28273393 NR Description: unknown protein [Oryza sativa (japonica
  misc_feature (4)..(259): Homolog of NCBI NO: 25405875 NR Description: protein F27F5.3 [imported] - Arabidopsis thaliana
  misc_feature (4)..(261): Homolog of NCBI NO: 18401414 NR Description: expressed protein
QDTMRMLVLRTPTGPVSAVRFITKSKPSPFSSPDSWLLPAPNTHRSRPRVVLALSNPDGSVNSKPSTSASQIPSSGDETVFVGQDNVPLEGVIQFDKPSSTSSSNITKWGRVALLAGGDVLALLIFSAIGRFSHGFPVFSLDTLHTADPFIAGWFLSAYFLGGYAEEGRGMKGKSKAVVAAAKSWIVGTPLGIIIRSASSGHIPAYSFVLVTMGSTAVLLIGWRALLFSVLPTESKKKDDTYRKGSAFELFELLTSLIRRW

SEQ ID NO: 30920 - protein, 258 aa, Arabidopsis thaliana
  peptide (1)..(258): Ceres Seq. ID no. 12326012
  misc_feature (103)..(223): Homolog of NCBI NO: 25029256 NR Description: conserved hypothetical protein [Corynebacterium
  misc_feature (106)..(221): Homolog of NCBI NO: 22970530 NR Description: hypothetical protein [Chloroflexus aurantiacus]
  misc_feature (3)..(258): Homolog of NCBI NO: 28273393 NR Description: unknown protein [Oryza sativa (japonica
  misc_feature (1)..(256): Homolog of NCBI NO: 25405875 NR Description: protein F27F5.3 [imported] - Arabidopsis thaliana
  misc_feature (1)..(258): Homolog of NCBI NO: 18401414 NR Description: expressed protein
MRMLVLRTPTGPVSAVRFITKSKPSPFSSPDSWLLPAPNTHRSRPRVVLALSNPDGSVNSKPSTSASQIPSSGDETVFVGQDNVPLEGVIQFDKPSSTSSSNITKWGRVALLAGGDVLALLIFSAIGRFSHGFPVFSLDTLHTADPFIAGWFLSAYFLGGYAEEGRGMKGKSKAVVAAAKSWIVGTPLGIIIRSASSGHIPAYSFVLVTMGSTAVLLIGWRALLFSVLPTESKKKDDTYRKGSAFELFELLTSLIRRW

SEQ ID NO: 30921 - protein, 256 aa, Arabidopsis thaliana
  peptide (1)..(256): Ceres Seq. ID no. 12326013
  misc_feature (101)..(221): Homolog of NCBI NO: 25029256 NR Description: conserved hypothetical protein [Corynebacterium
  misc_feature (104)..(219): Homolog of NCBI NO: 22970530 NR Description: hypothetical protein [Chloroflexus aurantiacus]
  misc_feature (1)..(256): Homolog of NCBI NO: 28273393 NR Description: unknown protein [Oryza sativa (japonica
  misc_feature (1)..(254): Homolog of NCBI NO: 25405875 NR Description: protein F27F5.3 [imported] - Arabidopsis thaliana
  misc_feature (1)..(256): Homolog of NCBI NO: 18401414 NR Description: expressed protein
MLVLRTPTGPVSAVRFITKSKPSPFSSPDSWLLPAPNTHRSRPRVVLALSNPDGSVNSKPSTSASQIPSSGDETVFVGQDNVPLEGVIQFDKPSSTSSSNITKWGRVALLAGGDVLALLIFSAIGRFSHGFPVFSLDTLHTADPFIAGWFLSAYFLGGYAEEGRGMKGKSKAVVAAAKSWIVGTPLGIIIRSASSGHIPAYSFVLVTMGSTAVLLIGWRALLFSVLPTESKKKDDTYRKGSAFELFELLTSLIRRW

SEQ ID NO: 30922 - DNA, 1337 bp, Arabidopsis thaliana
  misc_feature (1)..(1337): Ceres Seq. ID no. 12321402
  misc_feature: MA Experiment ID: 108434 Result: Down-regulated in Transcription
  misc_feature: MA Experiment 108434 PARAMETER Experiment Name: At_Root_Tips_cDNA_P Parameter: Tissue Value: Root Tips
  misc_feature: MA Experiment ID: 108435 Result: Down-regulated in Transcription
  misc_feature: MA Experiment 108435 PARAMETER Experiment Name: At_stm_Mutants_cDNA_P Parameter: Plant Line Value: wt Landsburg vs stm
  misc_feature: MA Experiment 108435 PARAMETER Experiment Name: At_stm_Mutants_cDNA_P Parameter: Tissue Value: Shoot Apical Meristem Region
  misc_feature: MA Experiment ID: 108464 Result: Up-regulated in Transcription
  misc_feature: MA Experiment 108464 PARAMETER Experiment Name: At_Germinating_Seeds_cDNA_P Parameter: Age (day) Value: 4 vs. 0
  misc_feature: MA Experiment 108464 PARAMETER Experiment Name: At_Germinating_Seeds_cDNA_P Parameter: Tissue Value: Germinating Seeds
  misc_feature: MA Experiment ID: 108488 Result: Down-regulated in Transcription
  misc_feature: MA Experiment ID: 108489 Result: Up-regulated in Transcription
  misc_feature: MA Experiment ID: 108561 Result: Up-regulated in Transcription
  misc_feature: MA Experiment 108561 PARAMETER Experiment Name: At_100uM_ABA_cDNA_P Parameter: Timepoint (hr) Value: 6
  misc_feature: MA Experiment 108561 PARAMETER Experiment Name: At_100uM_ABA_cDNA_P Parameter: Tissue Value: Aerial
  misc_feature: MA Experiment 108561 PARAMETER Experiment Name: At_100uM_ABA_cDNA_P Parameter: Treatment Value: 100uM ABA vs. No Treatment
  misc_feature: MA Experiment ID: 108576 Result: Up-regulated in Transcription
  misc_feature: MA Experiment 108576 PARAMETER Experiment Name: At_42deg_Heat_cDNA_P Parameter: Temperature (deg C) Value: 42 vs. 22
  misc_feature: MA Experiment 108576 PARAMETER Experiment Name: At_42deg_Heat_cDNA_P Parameter: Timepoint (hr) Value: 1
  misc_feature: MA Experiment 108576 PARAMETER Experiment Name: At_42deg_Heat_cDNA_P Parameter: Tissue Value: Aerial
  misc_feature: MA Experiment ID: 108585 Result: Up-regulated in Transcription
  misc_feature: MA Experiment 108585 PARAMETER Experiment Name: At_5mM_NaNP_cDNA_P Parameter: Timepoint (hr) Value: 6
  misc_feature: MA Experiment 108585 PARAMETER Experiment Name: At_5mM_NaNP_cDNA_P Parameter: Tissue Value: Aerial
  misc_feature: MA Experiment 108585 PARAMETER Experiment Name: At_5mM_NaNP_cDNA_P Parameter: Treatment Value: null
  misc_feature: MA Experiment ID: 108667 Result: Up-regulated in Transcription
  misc_feature: MA Experiment 108667 PARAMETER Experiment Name: At_2mM_SA_cDNA_P Parameter: Plant Line Value: WS
  misc_feature: MA Experiment 108667 PARAMETER Experiment Name: At_2mM_SA_cDNA_P Parameter: Timepoint (hr) Value: 1
  misc_feature: MA Experiment 108667 PARAMETER Experiment Name: At_2mM_SA_cDNA_P Parameter: Treatment Value: 2mM SA vs. No Treatment
  misc_feature: MA Experiment ID: 20000090 Result: Down-regulated in Transcription
  misc_feature: MA Experiment ID: 20000112 Result: Up-regulated in Transcription
  misc_feature: MA Experiment 20000112 PARAMETER Experiment Name: At_42deg_Heat_cDNA_P Parameter: Temperature (deg C) Value: 42 vs. 22
  misc_feature: MA Experiment 20000112 PARAMETER Experiment Name: At_42deg_Heat_cDNA_P Parameter: Timepoint (hr) Value: 2
  misc_feature: MA Experiment 20000112 PARAMETER Experiment Name: At_42deg_Heat_cDNA_P Parameter: Tissue Value: Aerial
  misc_feature: MA Experiment ID: 20000113 Result: Up-regulated in Transcription
  misc_feature: MA Experiment 20000113 PARAMETER Experiment Name: At_42deg_Heat_cDNA_P Parameter: Temperature (deg C) Value: 42 vs. 22
  misc_feature: MA Experiment 20000113 PARAMETER Experiment Name: At_42deg_Heat_cDNA_P Parameter: Timepoint (hr) Value: 8
  misc_feature: MA Experiment 20000113 PARAMETER Experiment Name: At_42deg_Heat_cDNA_P Parameter: Tissue Value: Aerial
  misc_feature: MA Experiment ID: 20000224 Result: Up-regulated in Transcription
  misc_feature: MA Experiment ID: 20000328 Result: Up-regulated in Transcription
  misc_feature: MA Experiment 20000328 PARAMETER Experiment Name: At_42deg_Heat_Sub_P Parameter: Age (day) Value: 14
  misc_feature: MA Experiment 20000328 PARAMETER Experiment Name: At_42deg_Heat_Sub_P Parameter: Organism Value: A. thaliana
  misc_feature: MA Experiment 20000328 PARAMETER Experiment Name: At_42deg_Heat_Sub_P Parameter: Plant Line Value: WS
  misc_feature: MA Experiment 20000328 PARAMETER Experiment Name: At_42deg_Heat_Sub_P Parameter: Temperature (deg C) Value: 42 vs. 22
  misc_feature: MA Experiment 20000328 PARAMETER Experiment Name: At_42deg_Heat_Sub_P Parameter: Timepoint (hr) Value: 6
  misc_feature: MA Experiment 20000328 PARAMETER Experiment Name: At_42deg_Heat_Sub_P Parameter: Tissue Value: Aerial
  misc_feature: MA Experiment ID: 20000346 Result: Up-regulated in Transcription
  misc_feature: MA Experiment 20000346 PARAMETER Experiment Name: At_2mM_SA_Sub_P Parameter: Age (day) Value: 14
  misc_feature: MA Experiment 20000346 PARAMETER Experiment Name: At_2mM_SA_Sub_P Parameter: Organism Value: A. thaliana
  misc_feature: MA Experiment 20000346 PARAMETER Experiment Name: At_2mM_SA_Sub_P Parameter: Plant Line Value: WS
  misc_feature: MA Experiment 20000346 PARAMETER Experiment Name: At_2mM_SA_Sub_P Parameter: Timepoint (hr) Value: 1
  misc_feature: MA Experiment 20000346 PARAMETER Experiment Name: At_2mM_SA_Sub_P Parameter: Tissue Value: Aerial
  misc_feature: MA Experiment 20000346 PARAMETER Experiment Name: At_2mM_SA_Sub_P Parameter: Treatment Value: 2mM SA vs. No Treatment
  misc_feature: MA Experiment ID: 20000355 Result: Down-regulated in Transcription
  misc_feature: MA Experiment 20000355 PARAMETER Experiment Name: At_Siliques_Sub_P Parameter: Age (day) Value: 21
  misc_feature: MA Experiment 20000355 PARAMETER Experiment Name: At_Siliques_Sub_P Parameter: Organism Value: A. thaliana
  misc_feature: MA Experiment 20000355 PARAMETER Experiment Name: At_Siliques_Sub_P Parameter: Plant Line Value: WS
  misc_feature: MA Experiment 20000355 PARAMETER Experiment Name: At_Siliques_Sub_P Parameter: Tissue Value: Less Than 5mm Siliques vs. Whole Plant
  misc_feature: MA Experiment ID: 20000440 Result: Down-regulated in Transcription
  misc_feature: MA Experiment 20000440 PARAMETER Experiment Name: At_Closed-Flower__Sub_P Parameter: Tissue Value: Closed Flower vs. Whole Plant
agttcaaacaattcttcgtcctattaaatacaaaaaataaaaatccttaaaaatatatccttatcttcaaccaagaatgggagaggtccaagaaggtcccaaagttgaacaagagaagaagccggctgccaccgtagtcccagttgagactactgacggcaagccaaagagcggcggaggagattccgcggcagcagcagcaccaccggtcgccgcggttgtctctgcctttgtttacaaagtggatatgcactgtgaaggctgcgctaagaagataaagcgaatggttaagcactttgatggagtgaaagatgtgacggcggatactggtggaaataagcttttggtggtcggaaagattgatccagtgaaactccaggagaagttggaggagaaaaccaagagaaaggtggttctcgcgaatccaccgccaaaggtagagggacctgttgctgccgccgttggagagaagaaagccgatggtggagataaggaggcggctcctcctgctcctgctccggcgactccaaaagagagcgtggtgcctttaaagatcagactacattgcgaaggatgtattcagaaaatcaagaaaataatattgaaaatcaaaggagtcgaaacagtggctattgacggagctaaagacgtggtgacggttaaaggaacgatagacgttaaagaacttgtgcctctactcactaagaagctcaaaagaaccgtcgagcctcttgttcccgccaaaaaagatgacggagccgccgagataagaagaacggaacgtgccgctcctgacgcaaagaaagaggctccgtccgccggagttaacgaagcaaagaaggaaggaagtgacggtggagagaagaaaaaagaggttggagacggcggagagaagaagaaagaaggtggtgacggcggagagaaaaagaaagaagccggagacggaggagagaagaagaaagatggcggaggtgtgccggccccggtggcgatggtgaataagatggattattatgggtactcagcttatccaacggctcctatgcattggcaagaaggacacgtgtacggtcagagttattcgatgacaggtcagaattatccagtgggaggtcagagttatccaggttcaggatacaactacgcaagtgagagttacgtgccgtacgcgcagccaaacgtgaacgctcctggaatgttcagcgacgagaatcccaatggttgctctgttatgtaataatgcgttaactgtaaatataagaaactataaggttaaaacataattgtgggaacacaaaacttatgttaaaattttgaaagtctactttgagtcagcg

SEQ ID NO: 30923 - protein, 386 aa, Arabidopsis thaliana
  peptide (1)..(386): Ceres Seq. ID no. 12321403
  misc_feature (5)..(385): Homolog of NCBI NO: 31193908 NR Description: putative heavy-metal-associated protein
  misc_feature (1)..(331): Homolog of NCBI NO: 9758294 NR Description: contains similarity to ATFP3~gene_id:MLE2.16
  misc_feature (1)..(331): Homolog of NCBI NO: 18424719 NR Description: copper chaperone (CCH)-related
  misc_feature (28)..(362): Homolog of NCBI NO: 15242741 NR Description: expressed protein
  misc_feature (27)..(261): Homolog of NCBI NO: 22327990 NR Description: expressed protein; protein id: At5g60800.1
  misc_feature (1)..(350): Homolog of NCBI NO: 38344582 NR Description: OSJNBa0053B21.14 [Oryza sativa (japonica
  misc_feature (77)..(386): Homolog of NCBI NO: 15242741 NR Description: expressed protein
  misc_feature (142)..(386): Homolog of NCBI NO: 4097545 NR Description: ATFP2 [Arabidopsis thaliana]
  misc_feature (58)..(386): Homolog of NCBI NO: 25408515 NR Description: probable farnesylated protein [imported] -
  misc_feature (1)..(386): Homolog of NCBI NO: 18404283 NR Description: expressed protein
MGEVQEGPKVEQEKKPAATVVPVETTDGKPKSGGGDSAAAAAPPVAAVVSAFVYKVDMHCEGCAKKIKRMVKHFDGVKDVTADTGGNKLLVVGKIDPVKLQEKLEEKTKRKVVLANPPPKVEGPVAAAVGEKKADGGDKEAAPPAPAPATPKESVVPLKIRLHCEGCIQKIKKIILKIKGVETVAIDGAKDVVTVKGTIDVKELVPLLTKKLKRTVEPLVPAKKDDGAAEIRRTERAAPDAKKEAPSAGVNEAKKEGSDGGEKKKEVGDGGEKKKEGGDGGEKKKEAGDGGEKKKDGGGVPAPVAMVNKMDYYGYSAYPTAPMHWQEGHVYGQSYSMTGQNYPVGGQSYPGSGYNYASESYVPYAQPNVNAPGMFSDENPNGCSVM

SEQ ID NO: 30924 - protein, 329 aa, Arabidopsis thaliana
  peptide (1)..(329): Ceres Seq. ID no. 12321404
  misc_feature (1)..(328): Homolog of NCBI NO: 31193908 NR Description: putative heavy-metal-associated protein
  misc_feature (1)..(274): Homolog of NCBI NO: 9758294 NR Description: contains similarity to ATFP3~gene_id:MLE2.16
  misc_feature (1)..(274): Homolog of NCBI NO: 18424719 NR Description: copper chaperone (CCH)-related
  misc_feature (1)..(305): Homolog of NCBI NO: 15242741 NR Description: expressed protein
  misc_feature (1)..(204): Homolog of NCBI NO: 22327990 NR Description: expressed protein; protein id: At5g60800.1
  misc_feature (1)..(293): Homolog of NCBI NO: 38344582 NR Description: OSJNBa0053B21.14 [Oryza sativa (japonica
  misc_feature (20)..(329): Homolog of NCBI NO: 15242741 NR Description: expressed protein
  misc_feature (85)..(329): Homolog of NCBI NO: 4097545 NR Description: ATFP2 [Arabidopsis thaliana]
  misc_feature (1)..(329): Homolog of NCBI NO: 25408515 NR Description: probable farnesylated protein [imported] -
  misc_feature (1)..(329): Homolog of NCBI NO: 18404283 NR Description: expressed protein
MHCEGCAKKIKRMVKHFDGVKDVTADTGGNKLLVVGKIDPVKLQEKLEEKTKRKVVLANPPPKVEGPVAAAVGEKKADGGDKEAAPPAPAPATPKESVVPLKIRLHCEGCIQKIKKIILKIKGVETVAIDGAKDVVTVKGTIDVKELVPLLTKKLKRTVEPLVPAKKDDGAAEIRRTERAAPDAKKEAPSAGVNEAKKEGSDGGEKKKEVGDGGEKKKEGGDGGEKKKEAGDGGEKKKDGGGVPAPVAMVNKMDYYGYSAYPTAPMHWQEGHVYGQSYSMTGQNYPVGGQSYPGSGYNYASESYVPYAQPNVNAPGMFSDENPNGCSVM

SEQ ID NO: 30925 - protein, 317 aa, Arabidopsis thaliana
  peptide (1)..(317): Ceres Seq. ID no. 12321405
  misc_feature (1)..(316): Homolog of NCBI NO: 31193908 NR Description: putative heavy-metal-associated protein
  misc_feature (1)..(262): Homolog of NCBI NO: 9758294 NR Description: contains similarity to ATFP3~gene_id:MLE2.16
  misc_feature (1)..(262): Homolog of NCBI NO: 18424719 NR Description: copper chaperone (CCH)-related
  misc_feature (1)..(293): Homolog of NCBI NO: 15242741 NR Description: expressed protein
  misc_feature (1)..(192): Homolog of NCBI NO: 22327990 NR Description: expressed protein; protein id: At5g60800.1
  misc_feature (1)..(281): Homolog of NCBI NO: 38344582 NR Description: OSJNBa0053B21.14 [Oryza sativa (japonica
  misc_feature (8)..(317): Homolog of NCBI NO: 15242741 NR Description: expressed protein
  misc_feature (73)..(317): Homolog of NCBI NO: 4097545 NR Description: ATFP2 [Arabidopsis thaliana]
  misc_feature (1)..(317): Homolog of NCBI NO: 25408515 NR Description: probable farnesylated protein [imported] -
  misc_feature (1)..(317): Homolog of NCBI NO: 18404283 NR Description: expressed protein
MVKHFDGVKDVTADTGGNKLLVVGKIDPVKLQEKLEEKTKRKVVLANPPPKVEGPVAAAVGEKKADGGDKEAAPPAPAPATPKESVVPLKIRLHCEGCIQKIKKIILKIKGVETVAIDGAKDVVTVKGTIDVKELVPLLTKKLKRTVEPLVPAKKDDGAAEIRRTERAAPDAKKEAPSAGVNEAKKEGSDGGEKKKEVGDGGEKKKEGGDGGEKKKEAGDGGEKKKDGGGVPAPVAMVNKMDYYGYSAYPTAPMHWQEGHVYGQSYSMTGQNYPVGGQSYPGSGYNYASESYVPYAQPNVNAPGMFSDENPNGCSVM

SEQ ID NO: 30926 - DNA, 1373 bp, Arabidopsis thaliana
  misc_feature (1)..(1373): Ceres Seq. ID no. 12372173
  misc_feature: MA Experiment ID: 108595 Result: Down-regulated in Transcription
  misc_feature: MA Experiment 108595 PARAMETER Experiment Name: At_Ler-pi_Ovule_cDNA_P Parameter: Plant Line Value: null
cttctctatcaacactttctttcatctctcgccggaaaaacccataaccacaacaatggccaccgaaacccaaatccgaatcggagtaatgggttgcgccgatatcgctcgaaaagtctctcgagcaatccacctcgctcccaacgccacaatctccggcgtagcaagccggtctttagaaaaagccaaagcctttgccaccgccaataactacccagaatcaaccaaaatccacggctcttacgaatctcttctcgaagatccagagatcgatgcgctctatgttcctctccccactagtctccacgttgagtgggctattaaagcagctgagaaagggaaacatatccttttggagaagcctgttgctatgaacgtaactgagtttgataagattgttgatgcttgtgaagctaatggtgttcagattatggatggtactatgtgggttcataatcctagaactgctttgcttaaagagtttctttctgattctgaacgttttggtcagcttaaaactgtacagagttgtttctcatttgctggagatgaagattttcttaaaaacgatatccgtgtgaaacctggtcttgacgggcttggtgcgctaggagatgcggggtggtacgcgatcagagcaactcttttagctaataactttgagcttccgaaaactgtgactgctttccccggtgctgtgttgaatgaagcaggagtgatactttcctgtggagcatctttgagttgggaagatggacgaactgcaactatatattgttcattcttggctaacttaacaatggagataactgccattggaacgaaaggcacactccgtgtacacgacttcattatcccgtataaggagactgaggcgtcgtttaccacgagcactaaagcttggttcaatgaccttgtgactgcgtgggttagtcccccgagtgagcatacggttaagacagagcttccacaagaggcatgtatggtgagagagtttgctcgattggttggagaaatcaagaacaatggtgcaaagcctgatgggtactggcctagtattagccgaaagacgcagctagtggttgatgctgttaaagagtctgttgataaaaactatcaacagattagtctctctggtcgttgaaggaaaggactcagactataaatgttgtcgtgtgttctctcctctctcgctctctatgttcaaacttcgatcaaccgtttaagtgtttgttaccacttaccaatatgttctgtcttctgctgtgtccgcctgtatgtatgttaattgttttagactccaattactagccttcaattactaagtaagtcaatactaaaagttacagtttataaaaatcgtatgttttggt

SEQ ID NO: 30927 - protein, 380 aa, Arabidopsis thaliana
  peptide (1)..(380): Ceres Seq. ID no. 12372174
  misc_feature (25)..(147): Pfam Name: Oxidoreductase family, NAD-binding Rossmann fold Pfam Description: Oxidoreductase family, NAD-binding Rossmann fold
  misc_feature (25)..(287): Homolog of NCBI NO: 15616405 NR Description: oxidoreductase [Bacillus halodurans]
  misc_feature (9)..(364): Homolog of NCBI NO: 17549134 NR Description: CONSERVED HYPOTHETICAL PROTEIN [Ralstonia
  misc_feature (21)..(367): Homolog of NCBI NO: 32474689 NR Description: putative oxidoreductase [Pirellula sp.]
  misc_feature (21)..(377): Homolog of NCBI NO: 15218937 NR Description: oxidoreductase, putative; protein id: At1g66130.1
  misc_feature (10)..(333): Homolog of NCBI NO: 37534168 NR Description: putative oxidoreductase [Oryza sativa (japonica
  misc_feature (25)..(368): Homolog of NCBI NO: 7488933 NR Description: protein AX110P - carrot
  misc_feature (19)..(380): Homolog of NCBI NO: 25518452 NR Description: hypothetical protein F23M19.12 [imported] -
  misc_feature (19)..(380): Homolog of NCBI NO: 18399170 NR Description: expressed protein
  misc_feature (43)..(380): Homolog of NCBI NO: 21954073 NR Description: putative AX110P protein [Arabidopsis thaliana]
  misc_feature (19)..(380): Homolog of NCBI NO: 15233990 NR Description: AX110P -like protein
FSINTFFHLSPEKPITTTMATETQIRIGVMGCADIARKVSRAIHLAPNATISGVASRSLEKAKAFATANNYPESTKIHGSYESLLEDPEIDALYVPLPTSLHVEWAIKAAEKGKHILLEKPVAMNVTEFDKIVDACEANGVQIMDGTMWVHNPRTALLKEFLSDSERFGQLKTVQSCFSFAGDEDFLKNDIRVKPGLDGLGALGDAGWYAIRATLLANNFELPKTVTAFPGAVLNEAGVILSCGASLSWEDGRTATIYCSFLANLTMEITAIGTKGTLRVHDFIIPYKETEASFTTSTKAWFNDLVTAWVSPPSEHTVKTELPQEACMVREFARLVGEIKNNGAKPDGYWPSISRKTQLVVDAVKESVDKNYQQISLSGR

SEQ ID NO: 30928 - protein, 362 aa, Arabidopsis thaliana
  peptide (1)..(362): Ceres Seq. ID no. 12372175
  misc_feature (7)..(129): Pfam Name: Oxidoreductase family, NAD-binding Rossmann fold Pfam Description: Oxidoreductase family, NAD-binding Rossmann fold
  misc_feature (7)..(269): Homolog of NCBI NO: 15616405 NR Description: oxidoreductase [Bacillus halodurans]
  misc_feature (1)..(346): Homolog of NCBI NO: 17549134 NR Description: CONSERVED HYPOTHETICAL PROTEIN [Ralstonia
  misc_feature (3)..(349): Homolog of NCBI NO: 32474689 NR Description: putative oxidoreductase [Pirellula sp.]
  misc_feature (3)..(359): Homolog of NCBI NO: 15218937 NR Description: oxidoreductase, putative; protein id: At1g66130.1
  misc_feature (1)..(315): Homolog of NCBI NO: 37534168 NR Description: putative oxidoreductase [Oryza sativa (japonica
  misc_feature (7)..(350): Homolog of NCBI NO: 7488933 NR Description: protein AX110P - carrot
  misc_feature (1)..(362): Homolog of NCBI NO: 25518452 NR Description: hypothetical protein F23M19.12 [imported] -
  misc_feature (1)..(362): Homolog of NCBI NO: 18399170 NR Description: expressed protein
  misc_feature (25)..(362): Homolog of NCBI NO: 21954073 NR Description: putative AX110P protein [Arabidopsis thaliana]
  misc_feature (1)..(362): Homolog of NCBI NO: 15233990 NR Description: AX110P -like protein
MATETQIRIGVMGCADIARKVSRAIHLAPNATISGVASRSLEKAKAFATANNYPESTKIHGSYESLLEDPEIDALYVPLPTSLHVEWAIKAAEKGKHILLEKPVAMNVTEFDKIVDACEANGVQIMDGTMWVHNPRTALLKEFLSDSERFGQLKTVQSCFSFAGDEDFLKNDIRVKPGLDGLGALGDAGWYAIRATLLANNFELPKTVTAFPGAVLNEAGVILSCGASLSWEDGRTATIYCSFLANLTMEITAIGTKGTLRVHDFIIPYKETEASFTTSTKAWFNDLVTAWVSPPSEHTVKTELPQEACMVREFARLVGEIKNNGAKPDGYWPSISRKTQLVVDAVKESVDKNYQQISLSGR

SEQ ID NO: 30929 - protein, 351 aa, Arabidopsis thaliana
  peptide (1)..(351): Ceres Seq. ID no. 12372176
  misc_feature (1)..(118): Pfam Name: Oxidoreductase family, NAD-binding Rossmann fold Pfam Description: Oxidoreductase family, NAD-binding Rossmann fold
  misc_feature (1)..(258): Homolog of NCBI NO: 15616405 NR Description: oxidoreductase [Bacillus halodurans]
  misc_feature (1)..(335): Homolog of NCBI NO: 17549134 NR Description: CONSERVED HYPOTHETICAL PROTEIN [Ralstonia
  misc_feature (1)..(338): Homolog of NCBI NO: 32474689 NR Description: putative oxidoreductase [Pirellula sp.]
  misc_feature (1)..(348): Homolog of NCBI NO: 15218937 NR Description: oxidoreductase, putative; protein id: At1g66130.1
  misc_feature (1)..(304): Homolog of NCBI NO: 37534168 NR Description: putative oxidoreductase [Oryza sativa (japonica
  misc_feature (1)..(339): Homolog of NCBI NO: 7488933 NR Description: protein AX110P - carrot
  misc_feature (1)..(351): Homolog of NCBI NO: 25518452 NR Description: hypothetical protein F23M19.12 [imported] -
  misc_feature (1)..(351): Homolog of NCBI NO: 18399170 NR Description: expressed protein
  misc_feature (14)..(351): Homolog of NCBI NO: 21954073 NR Description: putative AX110P protein [Arabidopsis thaliana]
  misc_feature (1)..(351): Homolog of NCBI NO: 15233990 NR Description: AX110P -like protein
MGCADIARKVSRAIHLAPNATISGVASRSLEKAKAFATANNYPESTKIHGSYESLLEDPEIDALYVPLPTSLHVEWAIKAAEKGKHILLEKPVAMNVTEFDKIVDACEANGVQIMDGTMWVHNPRTALLKEFLSDSERFGQLKTVQSCFSFAGDEDFLKNDIRVKPGLDGLGALGDAGWYAIRATLLANNFELPKTVTAFPGAVLNEAGVILSCGASLSWEDGRTATIYCSFLANLTMEITAIGTKGTLRVHDFIIPYKETEASFTTSTKAWFNDLVTAWVSPPSEHTVKTELPQEACMVREFARLVGEIKNNGAKPDGYWPSISRKTQLVVDAVKESVDKNYQQISLSGR

SEQ ID NO: 30930 - DNA, 1571 bp, Arabidopsis thaliana
  misc_feature (1)..(1571): Ceres Seq. ID no. 13486971
  misc_feature: MA Experiment ID: 108434 Result: Up-regulated in Transcription
  misc_feature: MA Experiment 108434 PARAMETER Experiment Name: At_Root_Tips_cDNA_P Parameter: Tissue Value: Root Tips
  misc_feature: MA Experiment ID: 108595 Result: Down-regulated in Transcription
  misc_feature: MA Experiment 108595 PARAMETER Experiment Name: At_Ler-pi_Ovule_cDNA_P Parameter: Plant Line Value: null
  misc_feature: MA Experiment ID: 20000224 Result: Up-regulated in Transcription
  misc_feature: MA Experiment ID: 20000234 Result: Up-regulated in Transcription
  misc_feature: MA Experiment 20000234 PARAMETER Experiment Name: At_Siliques_P Parameter: Age (day) Value: 21
  misc_feature: MA Experiment 20000234 PARAMETER Experiment Name: At_Siliques_P Parameter: Organism Value: A. thaliana
  misc_feature: MA Experiment 20000234 PARAMETER Experiment Name: At_Siliques_P Parameter: Plant Line Value: WS
  misc_feature: MA Experiment 20000234 PARAMETER Experiment Name: At_Siliques_P Parameter: Tissue Value: Less Than 5mm Siliques vs. Whole Plant
  misc_feature: MA Experiment ID: 20000794 Result: Up-regulated in Transcription
  misc_feature: MA Experiment 20000794 PARAMETER Experiment Name: At_Petals_P Parameter: Age (day) Value: 23-25 days
  misc_feature: MA Experiment 20000794 PARAMETER Experiment Name: At_Petals_P Parameter: Plant Line Value: WS
  misc_feature: MA Experiment 20000794 PARAMETER Experiment Name: At_Petals_P Parameter: Tissue Value: Petals vs. Whole plant
  misc_feature: MA Experiment ID: 20001905 Result: Down-regulated in Transcription
  misc_feature: MA Experiment 20001905 PARAMETER Experiment Name: At_Drought_Reproduction_P Parameter: Age (day) Value: 40
  misc_feature: MA Experiment 20001905 PARAMETER Experiment Name: At_Drought_Reproduction_P Parameter: Organism Value: A. thaliana
  misc_feature: MA Experiment 20001905 PARAMETER Experiment Name: At_Drought_Reproduction_P Parameter: Plant Line Value: WS
  misc_feature: MA Experiment 20001905 PARAMETER Experiment Name: At_Drought_Reproduction_P Parameter: Timepoint (day) Value: 10
  misc_feature: MA Experiment 20001905 PARAMETER Experiment Name: At_Drought_Reproduction_P Parameter: Tissue Value: Rosettes
  misc_feature: MA Experiment 20001905 PARAMETER Experiment Name: At_Drought_Reproduction_P Parameter: Treatment Value: Drought vs. No Drought
attttgtcttaacgactctttattgtcccgacacacgaaaatggcgtctcttagccaaatcaccctgccacgcgcgccgtcgtcggagattggcctcttacgccgtcgattggagcggccgatcatcagaacccggatcggattcaacggccggattgcgagcgtattgactaacgcaggggaccaagcggtgtcggtaaaagcgagtgtgagccagaaggtgattgaagaggaagccaaagttattgtgggtacctacgcgcgagctccagtggttctctcgagtgggaaaggttgtaaattgttcgaccctgaaggaaaagagtatctggattgtgcatctggaatcgctgtgaatgctcttggtcatggagatcctgattggcttcgagctgtcactgagcaagctggtgttcttgcccatgtcagcaatgtttattacacgatccctcagatagagctcgcaaaacgcttggtggcgagttcttttgcagaccgtgtattcttttgtaactcgggaacggaagccaatgaagcagccattaagttttcaagaaaattccagagattcacccatccagaagacaaagaagtcgcgacaggtttcatcgcctttacaaacagcttccatggaagaaccttaggagctcttgccttgacaagcaaagaacaatacagaactcctttcgaacccatcatgcctggtgtaaccttcttagaatatggtaacattcaagcagccacagaccttatccgctcaggtaaaatagctgcagtttttgtggaaccaattcaaggagaaggcgggatttactctgctacaaaagagtttctgcaatctctgcgctctgcttgtgatgccgctggatctcttctcgtcttcgatgaggttcaatgtggtttgggtcgaacgggtctcatgtgggcttatgaagccttcggtgtgactcctgacataatgacggttgcaaagcctttagctggtggtttacctattggagcggtgctggtgactgaaaaggttgcagagaccataaactacggagatcatggaagtacatttgcaggcagccctcttgtgtgcagtgcagccattgcagttatggataaagtatcgaaaccctctttcttgtccagtgtctcaaataaaggtcgatactttagagacctgttggtgaaaaaacttggaggaaactcgcacgtgaaggaagtgagaggcgaagggcttatcataggagtggagctcgatgtgccggcaagctcactggttgatgcttgccgagattcgggtcttctgatcttgacagcggggaaaggaaatgtcgtcaggattgttcctccgttggttatatcagaggaggaaatcgaacgtgcggttgagatcatgtctcaaaatttgactgcgcttgattgaagttcttggaagagaaatgatgtggtgttgaagaagagctaatgttttatattcgatcttgtcttaaattagcctcaagtgtaccggtaaagatgctctgcacaattgaaaagaaataaaatttgacacaaaacttgatgaactaattgttcaatct

SEQ ID NO: 30931 - protein, 470 aa, Arabidopsis thaliana
  peptide (1)..(470): Ceres Seq. ID no. 13486972
  misc_feature (80)..(470): Pfam Name: Aminotransferase class-III Pfam Description: Aminotransferase class-III
  misc_feature (74)..(469): Homolog of NCBI NO: 20808850 NR Description: PLP-dependent aminotransferases
  misc_feature (82)..(469): Homolog of NCBI NO: 15644529 NR Description: acetylornithine aminotransferase [Thermotoga
  misc_feature (74)..(464): Homolog of NCBI NO: 23112365 NR Description: hypothetical protein [Desulfitobacterium
  misc_feature (71)..(469): Homolog of NCBI NO: 15679337 NR Description: N-acetylornithine aminotransferase
  misc_feature (75)..(469): Homolog of NCBI NO: 15668902 NR Description: acetylornithine aminotransferase (argD)
  misc_feature (73)..(468): Homolog of NCBI NO: 22972847 NR Description: hypothetical protein [Chloroflexus aurantiacus]
  misc_feature (203)..(443): Homolog of NCBI NO: 34394063 NR Description: putative acetylornithine aminotransferase
  misc_feature (37)..(470): Homolog of NCBI NO: 2811029 NR Description: Acetylornithine aminotransferase, mitochondrial
  misc_feature (14)..(470): Homolog of NCBI NO: 21554043 NR Description: putative acetylornithine transaminase
  misc_feature (14)..(470): Homolog of NCBI NO: 15220176 NR Description: acetylornithine aminotransferase, mitochondrial
FCLNDSLLSRHTKMASLSQITLPRAPSSEIGLLRRRLERPIIRTRIGFNGRIASVLTNAGDQAVSVKASVSQKVIEEEAKVIVGTYARAPVVLSSGKGCKLFDPEGKEYLDCASGIAVNALGHGDPDWLRAVTEQAGVLAHVSNVYYTIPQIELAKRLVASSFADRVFFCNSGTEANEAAIKFSRKFQRFTHPEDKEVATGFIAFTNSFHGRTLGALALTSKEQYRTPFEPIMPGVTFLEYGNIQAATDLIRSGKIAAVFVEPIQGEGGIYSATKEFLQSLRSACDAAGSLLVFDEVQCGLGRTGLMWAYEAFGVTPDIMTVAKPLAGGLPIGAVLVTEKVAETINYGDHGSTFAGSPLVCSAAIAVMDKVSKPSFLSSVSNKGRYFRDLLVKKLGGNSHVKEVRGEGLIIGVELDVPASSLVDACRDSGLLILTAGKGNVVRIVPPLVISEEEIERAVEIMSQNLTALD

SEQ ID NO: 30932 - protein, 457 aa, Arabidopsis thaliana
  peptide (1)..(457): Ceres Seq. ID no. 13486973
  misc_feature (67)..(457): Pfam Name: Aminotransferase class-III Pfam Description: Aminotransferase class-III
  misc_feature (61)..(456): Homolog of NCBI NO: 20808850 NR Description: PLP-dependent aminotransferases
  misc_feature (69)..(456): Homolog of NCBI NO: 15644529 NR Description: acetylornithine aminotransferase [Thermotoga
  misc_feature (61)..(451): Homolog of NCBI NO: 23112365 NR Description: hypothetical protein [Desulfitobacterium
  misc_feature (58)..(456): Homolog of NCBI NO: 15679337 NR Description: N-acetylornithine aminotransferase
  misc_feature (62)..(456): Homolog of NCBI NO: 15668902 NR Description: acetylornithine aminotransferase (argD)
  misc_feature (60)..(455): Homolog of NCBI NO: 22972847 NR Description: hypothetical protein [Chloroflexus aurantiacus]
  misc_feature (190)..(430): Homolog of NCBI NO: 34394063 NR Description: putative acetylornithine aminotransferase
  misc_feature (24)..(457): Homolog of NCBI NO: 2811029 NR Description: Acetylornithine aminotransferase, mitochondrial
  misc_feature (1)..(457): Homolog of NCBI NO: 21554043 NR Description: putative acetylornithine transaminase
  misc_feature (1)..(457): Homolog of NCBI NO: 15220176 NR Description: acetylornithine aminotransferase, mitochondrial
MASLSQITLPRAPSSEIGLLRRRLERPIIRTRIGFNGRIASVLTNAGDQAVSVKASVSQKVIEEEAKVIVGTYARAPVVLSSGKGCKLFDPEGKEYLDCASGIAVNALGHGDPDWLRAVTEQAGVLAHVSNVYYTIPQIELAKRLVASSFADRVFFCNSGTEANEAAIKFSRKFQRFTHPEDKEVATGFIAFTNSFHGRTLGALALTSKEQYRTPFEPIMPGVTFLEYGNIQAATDLIRSGKIAAVFVEPIQGEGGIYSATKEFLQSLRSACDAAGSLLVFDEVQCGLGRTGLMWAYEAFGVTPDIMTVAKPLAGGLPIGAVLVTEKVAETINYGDHGSTFAGSPLVCSAAIAVMDKVSKPSFLSSVSNKGRYFRDLLVKKLGGNSHVKEVRGEGLIIGVELDVPASSLVDACRDSGLLILTAGKGNVVRIVPPLVISEEEIERAVEIMSQNLTALD

SEQ ID NO: 30933 - protein, 238 aa, Arabidopsis thaliana
  peptide (1)..(238): Ceres Seq. ID no. 13486974
  misc_feature (1)..(238): Pfam Name: Aminotransferase class-III Pfam Description: Aminotransferase class-III
  misc_feature (1)..(237): Homolog of NCBI NO: 20808850 NR Description: PLP-dependent aminotransferases
  misc_feature (1)..(237): Homolog of NCBI NO: 15644529 NR Description: acetylornithine aminotransferase [Thermotoga
  misc_feature (1)..(232): Homolog of NCBI NO: 23112365 NR Description: hypothetical protein [Desulfitobacterium
  misc_feature (1)..(237): Homolog of NCBI NO: 15679337 NR Description: N-acetylornithine aminotransferase
  misc_feature (1)..(237): Homolog of NCBI NO: 15668902 NR Description: acetylornithine aminotransferase (argD)
  misc_feature (1)..(236): Homolog of NCBI NO: 22972847 NR Description: hypothetical protein [Chloroflexus aurantiacus]
  misc_feature (1)..(211): Homolog of NCBI NO: 34394063 NR Description: putative acetylornithine aminotransferase
  misc_feature (1)..(238): Homolog of NCBI NO: 2811029 NR Description: Acetylornithine aminotransferase, mitochondrial
  misc_feature (1)..(238): Homolog of NCBI NO: 21554043 NR Description: putative acetylornithine transaminase
  misc_feature (1)..(238): Homolog of NCBI NO: 15220176 NR Description: acetylornithine aminotransferase, mitochondrial
MPGVTFLEYGNIQAATDLIRSGKIAAVFVEPIQGEGGIYSATKEFLQSLRSACDAAGSLLVFDEVQCGLGRTGLMWAYEAFGVTPDIMTVAKPLAGGLPIGAVLVTEKVAETINYGDHGSTFAGSPLVCSAAIAVMDKVSKPSFLSSVSNKGRYFRDLLVKKLGGNSHVKEVRGEGLIIGVELDVPASSLVDACRDSGLLILTAGKGNVVRIVPPLVISEEEIERAVEIMSQNLTALD

SEQ ID NO: 30934 - DNA, 1180 bp, Arabidopsis thaliana
  misc_feature (1)..(1180): Ceres Seq. ID no. 13504734
  misc_feature: MA Experiment ID: 108434 Result: Up-regulated in Transcription
  misc_feature: MA Experiment 108434 PARAMETER Experiment Name: At_Root_Tips_cDNA_P Parameter: Tissue Value: Root Tips
  misc_feature: MA Experiment ID: 108462 Result: Down-regulated in Transcription
  misc_feature: MA Experiment 108462 PARAMETER Experiment Name: At_Germinating_Seeds_cDNA_P Parameter: Age (day) Value: 2 vs. 0
  misc_feature: MA Experiment 108462 PARAMETER Experiment Name: At_Germinating_Seeds_cDNA_P Parameter: Tissue Value: Germinating Seeds
  misc_feature: MA Experiment ID: 108463 Result: Down-regulated in Transcription
  misc_feature: MA Experiment 108463 PARAMETER Experiment Name: At_Germinating_Seeds_cDNA_P Parameter: Age (day) Value: 3 vs. 0
  misc_feature: MA Experiment 108463 PARAMETER Experiment Name: At_Germinating_Seeds_cDNA_P Parameter: Tissue Value: Germinating Seeds
  misc_feature: MA Experiment ID: 108464 Result: Down-regulated in Transcription
  misc_feature: MA Experiment 108464 PARAMETER Experiment Name: At_Germinating_Seeds_cDNA_P Parameter: Age (day) Value: 4 vs. 0
  misc_feature: MA Experiment 108464 PARAMETER Experiment Name: At_Germinating_Seeds_cDNA_P Parameter: Tissue Value: Germinating Seeds
  misc_feature: MA Experiment ID: 108488 Result: Up-regulated in Transcription
  misc_feature: MA Experiment ID: 20000224 Result: Down-regulated in Transcription
  misc_feature: MA Experiment ID: 20001807 Result: Up-regulated in Transcription
  misc_feature: MA Experiment 20001807 PARAMETER Experiment Name: At_50mM_NH4NO3_L-to-H_Sub_P Parameter: Timepoint (hr) Value: 6
  misc_feature: MA Experiment 20001807 PARAMETER Experiment Name: At_50mM_NH4NO3_L-to-H_Sub_P Parameter: Tissue Value: Leaf
  misc_feature: MA Experiment 20001807 PARAMETER Experiment Name: At_50mM_NH4NO3_L-to-H_Sub_P Parameter: Treatment Value: 50mM NH4NO3 vs 100mM Mannitol
tgacgtcaaactctctctatacacagagttaaattgagtttgtgtctcgtaacttatcctgtgagcgaaaatggtgaaagcaactaaggcagagaagaagatcgcctacgataccaagctatgtcagcttatcgatgagtacacccagatcttggtcgttgcggccgataacgtcggatcaactcagcttcagaacatcagaaagggtcttcgtggagactccgtcgtgcttatggggaagaacactatgatgaagcgttccgttaggattcactctgagaacaccggaaacactgcaatcctgaatctgcttcctctccttcagggaaacgttggtttgatctttaccaaaggtgacctcaaggaagtgagcgaggaggttgctaagtacaaggttggtgcccctgctcgtgtgggtttggtggctccaattgatgtggttgtccaacctggcaacactggtctcgacccatcccaaacatctttcttccaggtgcttaacatcccaaccaagattaacaagggtaccgtcgaaatcatcaccccagttgagcttatcaagcaaggtgacaaggtcgggtcttctgaggctgcgcttctagccaagcttggcatcaggccgttctcatatggtcttgttgtccagtctgtctatgacaatggctcagtcttcagcccagaggttcttgatcttactgaagaccaacttgtggagaagtttgcttctggtatctccatggtcacttccttggctcttgctgtgtcgtaccctacccttgctgctgcaccgcatatgttcatcaatgcgtacaagaatgccttggctattgctgttgccactgagtacaccttccctcaagcagagaaggtcaaggaatacttgaaggatccaagcaagtttgctgttgcttcagtagctgcggtgtctgctgatgcaggtggtggtgccccagctgctgctaaggtagaggagaaggaagagtccgacgaagaagactatggaggtgatttcggtttgttcgatgaagagtagattttgtcggttaagatcttacctttttgtcgtggattataagtgttgctttgtttttagtatgttggacctcaattttcttggttttagccaatccagttttatgttactactgtcttttattttttggaaagatttcgttttcct

SEQ ID NO: 30935 - protein, 320 aa, Arabidopsis thaliana
  peptide (1)..(320): Ceres Seq. ID no. 13504735
  misc_feature (5)..(109): Pfam Name: Ribosomal protein L10 Pfam Description: Ribosomal protein L10
  misc_feature (5)..(109): Pfam Name: Ribosomal protein L10 Pfam Description: Ribosomal protein L10
  misc_feature (2)..(315): Homolog of NCBI NO: 15225613 NR Description: 60S acidic ribosomal protein P0 (RPP0A)
  misc_feature (5)..(318): Homolog of NCBI NO: 6984134 NR Description: 60S acidic ribosomal protein PO [Euphorbia esula]
  misc_feature (1)..(320): Homolog of NCBI NO: 21593316 NR Description: 60S acidic ribosomal protein P0-C [Arabidopsis
  misc_feature (2)..(315): Homolog of NCBI NO: 15225613 NR Description: 60S acidic ribosomal protein P0 (RPP0A)
  misc_feature (1)..(320): Homolog of NCBI NO: 21593316 NR Description: 60S acidic ribosomal protein P0-C [Arabidopsis
  misc_feature (1)..(320): Homolog of NCBI NO: 21554645 NR Description: putative 60S acidic ribosomal protein P0
  misc_feature (1)..(320): Homolog of NCBI NO: 15232603 NR Description: 60S acidic ribosomal protein P0 (RPP0B)
  misc_feature (1)..(320): Homolog of NCBI NO: 15229706 NR Description: 60S acidic ribosomal protein P0 (RPP0C)
  misc_feature (5)..(318): Homolog of NCBI NO: 6984134 NR Description: 60S acidic ribosomal protein PO [Euphorbia esula]
  misc_feature (1)..(320): Homolog of NCBI NO: 15229706 NR Description: 60S acidic ribosomal protein P0 (RPP0C)
  misc_feature (1)..(320): Homolog of NCBI NO: 21554645 NR Description: putative 60S acidic ribosomal protein P0
  misc_feature (1)..(320): Homolog of NCBI NO: 15232603 NR Description: 60S acidic ribosomal protein P0 (RPP0B)
MVKATKAEKKIAYDTKLCQLIDEYTQILVVAADNVGSTQLQNIRKGLRGDSVVLMGKNTMMKRSVRIHSENTGNTAILNLLPLLQGNVGLIFTKGDLKEVSEEVAKYKVGAPARVGLVAPIDVVVQPGNTGLDPSQTSFFQVLNIPTKINKGTVEIITPVELIKQGDKVGSSEAALLAKLGIRPFSYGLVVQSVYDNGSVFSPEVLDLTEDQLVEKFASGISMVTSLALAVSYPTLAAAPHMFINAYKNALAIAVATEYTFPQAEKVKEYLKDPSKFAVASVAAVSADAGGGAPAAAKVEEKEESDEEDYGGDFGLFDEE

SEQ ID NO: 30936 - protein, 266 aa, Arabidopsis thaliana; identical to SEQ ID NO: 26377
  peptide (1)..(266): Ceres Seq. ID no. 13504736
  misc_feature (1)..(55): Pfam Name: Ribosomal protein L10 Pfam Description: Ribosomal protein L10
  misc_feature (1)..(55): Pfam Name: Ribosomal protein L10 Pfam Description: Ribosomal protein L10
  misc_feature (1)..(261): Homolog of NCBI NO: 15225613 NR Description: 60S acidic ribosomal protein P0 (RPP0A)
  misc_feature (1)..(264): Homolog of NCBI NO: 6984134 NR Description: 60S acidic ribosomal protein PO [Euphorbia esula]
  misc_feature (1)..(266): Homolog of NCBI NO: 21593316 NR Description: 60S acidic ribosomal protein P0-C [Arabidopsis
  misc_feature (1)..(261): Homolog of NCBI NO: 15225613 NR Description: 60S acidic ribosomal protein P0 (RPP0A)
  misc_feature (1)..(266): Homolog of NCBI NO: 21593316 NR Description: 60S acidic ribosomal protein P0-C [Arabidopsis
  misc_feature (1)..(266): Homolog of NCBI NO: 21554645 NR Description: putative 60S acidic ribosomal protein P0
  misc_feature (1)..(266): Homolog of NCBI NO: 15232603 NR Description: 60S acidic ribosomal protein P0 (RPP0B)
  misc_feature (1)..(266): Homolog of NCBI NO: 15229706 NR Description: 60S acidic ribosomal protein P0 (RPP0C)
  misc_feature (1)..(264): Homolog of NCBI NO: 6984134 NR Description: 60S acidic ribosomal protein PO [Euphorbia esula]
  misc_feature (1)..(266): Homolog of NCBI NO: 15229706 NR Description: 60S acidic ribosomal protein P0 (RPP0C)
  misc_feature (1)..(266): Homolog of NCBI NO: 21554645 NR Description: putative 60S acidic ribosomal protein P0
  misc_feature (1)..(266): Homolog of NCBI NO: 15232603 NR Description: 60S acidic ribosomal protein P0 (RPP0B)

SEQ ID NO: 30937 - protein, 261 aa, Arabidopsis thaliana; identical to SEQ ID NO: 26378
  peptide (1)..(261): Ceres Seq. ID no. 13504737
  misc_feature (176)..(258): Pfam Name: 60s Acidic ribosomal protein Pfam Description: 60s Acidic ribosomal protein
  misc_feature (176)..(258): Pfam Name: 60s Acidic ribosomal protein Pfam Description: 60s Acidic ribosomal protein
  misc_feature (1)..(256): Homolog of NCBI NO: 15225613 NR Description: 60S acidic ribosomal protein P0 (RPP0A)
  misc_feature (1)..(259): Homolog of NCBI NO: 6984134 NR Description: 60S acidic ribosomal protein PO [Euphorbia esula]
  misc_feature (1)..(261): Homolog of NCBI NO: 21593316 NR Description: 60S acidic ribosomal protein P0-C [Arabidopsis
  misc_feature (1)..(256): Homolog of NCBI NO: 15225613 NR Description: 60S acidic ribosomal protein P0 (RPP0A)
  misc_feature (1)..(261): Homolog of NCBI NO: 21593316 NR Description: 60S acidic ribosomal protein P0-C [Arabidopsis
  misc_feature (1)..(261): Homolog of NCBI NO: 21554645 NR Description: putative 60S acidic ribosomal protein P0
  misc_feature (1)..(261): Homolog of NCBI NO: 15232603 NR Description: 60S acidic ribosomal protein P0 (RPP0B)
  misc_feature (1)..(261): Homolog of NCBI NO: 15229706 NR Description: 60S acidic ribosomal protein P0 (RPP0C)
  misc_feature (1)..(259): Homolog of NCBI NO: 6984134 NR Description: 60S acidic ribosomal protein PO [Euphorbia esula]
  misc_feature (1)..(261): Homolog of NCBI NO: 15229706 NR Description: 60S acidic ribosomal protein P0 (RPP0C)
  misc_feature (1)..(261): Homolog of NCBI NO: 21554645 NR Description: putative 60S acidic ribosomal protein P0
  misc_feature (1)..(261): Homolog of NCBI NO: 15232603 NR Description: 60S acidic ribosomal protein P0 (RPP0B)

SEQ ID NO: 30938 - DNA, 1016 bp, Arabidopsis thaliana
  misc_feature (1)..(1016): Ceres Seq. ID no. 13489860
  misc_feature: MA Experiment ID: 108434 Result: Up-regulated in Transcription
  misc_feature: MA Experiment 108434 PARAMETER Experiment Name: At_Root_Tips_cDNA_P Parameter: Tissue Value: Root Tips
  misc_feature: MA Experiment ID: 108461 Result: Down-regulated in Transcription
  misc_feature: MA Experiment 108461 PARAMETER Experiment Name: At_Germinating_Seeds_cDNA_P Parameter: Age (day) Value: 1 vs. 0
  misc_feature: MA Experiment 108461 PARAMETER Experiment Name: At_Germinating_Seeds_cDNA_P Parameter: Tissue Value: Germinating Seeds
  misc_feature: MA Experiment ID: 108462 Result: Down-regulated in Transcription
  misc_feature: MA Experiment 108462 PARAMETER Experiment Name: At_Germinating_Seeds_cDNA_P Parameter: Age (day) Value: 2 vs. 0
  misc_feature: MA Experiment 108462 PARAMETER Experiment Name: At_Germinating_Seeds_cDNA_P Parameter: Tissue Value: Germinating Seeds
  misc_feature: MA Experiment ID: 108463 Result: Down-regulated in Transcription
  misc_feature: MA Experiment 108463 PARAMETER Experiment Name: At_Germinating_Seeds_cDNA_P Parameter: Age (day) Value: 3 vs. 0
  misc_feature: MA Experiment 108463 PARAMETER Experiment Name: At_Germinating_Seeds_cDNA_P Parameter: Tissue Value: Germinating Seeds
  misc_feature: MA Experiment ID: 108573 Result: Up-regulated in Transcription
  misc_feature: MA Experiment 108573 PARAMETER Experiment Name: At_Drought_cDNA_P Parameter: Timepoint (hr) Value: 6
  misc_feature: MA Experiment 108573 PARAMETER Experiment Name: At_Drought_cDNA_P Parameter: Tissue Value: Aerial
  misc_feature: MA Experiment 108573 PARAMETER Experiment Name: At_Drought_cDNA_P Parameter: Treatment Value: Drought vs. No Drought
  misc_feature: MA Experiment ID: 20000179 Result: Down-regulated in Transcription
  misc_feature: MA Experiment 20000179 PARAMETER Experiment Name: At_Germinating_Seeds_P Parameter: Age (hr) Value: 6 vs. 0
  misc_feature: MA Experiment 20000179 PARAMETER Experiment Name: At_Germinating_Seeds_P Parameter: Tissue Value: Germinating Seeds
agagctcataaattttgtggagagcaaagttctcagcaaaatcaaagaagaaccgaacgagagagagaaacgaattcttctcaggtgttaaagaatgtctcggagatatgatagccgtaccacaatcttctcgccagaaggtcgtctttaccaggtagagtatgctatggaggccattggaaacgccggttctgcgattggaatcttatccaaagacggtgttgtgttgatcggtgagaagaaagtcacctcaaagcttcttcaaacctcaacctctgctgagaaaatgtacaagattgatgaccatgttgcctgtgctgttgctggtataatgtctgatgctaacatacttatcaacacggctcgagttcaagctcaacgttacaccttcatgtaccaagagcccatgccggttgagcagctggttcaatctctttgtgacacaaaacaaggatacacacagtttggtggtcttcgcccgtttggtgtctcctttctctttgcaggatgggacaagcaccatggtttccagctttatatgagtgacccgagtgggaactatggtggttggaaagctgcagctgttggagcaaacaatcaggcggctcagtctatcctgaaacaagactacaaggacgatgcaaccagggaagaagcagtcgagcttgccttgaaggttctgaccaagacaatggacagcactagcttaacatctgagaagctagagcttgctgaagtgtatctgactccatccaagactgttaagtaccatgttcactcacctgagtcgctcaccaaactgttggtcaagcacggtgtgactcaacccgctgctgaaacatcttaagcccaaaagtatctctagtcttattcgcctggtacggtgtctccgctttatgtttgtagttctctgttttacagctttccttttggtttgaactttgaagttacctttggcgatgaaactagatttgacaatgttatgaatttatcttcaatgcatcatctttttactt

SEQ ID NO: 30939 - protein, 250 aa, Arabidopsis thaliana
  peptide (1)..(250): Ceres Seq. ID no. 13489861
  misc_feature (28)..(215): Pfam Name: Proteasome A-type and B-type Pfam Description: Proteasome A-type and B-type
  misc_feature (1)..(244): Homolog of NCBI NO: 40744887 NR Description: conserved hypothetical protein [Aspergillus
  misc_feature (1)..(244): Homolog of NCBI NO: 464458 NR Description: Proteasome subunit alpha type 4 (Proteasome
  misc_feature (6)..(172): Homolog of NCBI NO: 14594915 NR Description: putative alpha3 proteasome subunit [Nicotiana
  misc_feature (1)..(248): Homolog of NCBI NO: 34898458 NR Description: ESTs AU058081(E3082),AU075427(E30384) correspond a region of the predicted gene.~Similar to Spinacia oleracea
  misc_feature (1)..(248): Homolog of NCBI NO: 34898416 NR Description: ESTs AU058081(E30812),AU058365(E50679), correspond to a region of the predicted gene.~Similar to Spinacia
  misc_feature (9)..(250): Homolog of NCBI NO: 6984140 NR Description: proteasome 27 kDa subunit [Euphorbia esula]
  misc_feature (1)..(250): Homolog of NCBI NO: 12229904 NR Description: Proteasome subunit alpha type 4 (20S proteasome
  misc_feature (1)..(250): Homolog of NCBI NO: 1709761 NR Description: Proteasome subunit alpha type 4 (20S proteasome subunit C) (20S proteasome subunit alpha-3) (Proteasome 27 kDa
  misc_feature (1)..(250): Homolog of NCBI NO: 2511584 NR Description: multicatalytic endopeptidase [Arabidopsis
  misc_feature (1)..(250): Homolog of NCBI NO: 15233268 NR Description: 20S proteasome alpha subunit C (PAC1)
MSRRYDSRTTIFSPEGRLYQVEYAMEAIGNAGSAIGILSKDGVVLIGEKKVTSKLLQTSTSAEKMYKIDDHVACAVAGIMSDANILINTARVQAQRYTFMYQEPMPVEQLVQSLCDTKQGYTQFGGLRPFGVSFLFAGWDKHHGFQLYMSDPSGNYGGWKAAAVGANNQAAQSILKQDYKDDATREEAVELALKVLTKTMDSTSLTSEKLELAEVYLTPSKTVKYHVHSPESLTKLLVKHGVTQPAAETS

SEQ ID NO: 30940 - protein, 226 aa, Arabidopsis thaliana
  peptide (1)..(226): Ceres Seq. ID no. 13489862
  misc_feature (4)..(191): Pfam Name: Proteasome A-type and B-type Pfam Description: Proteasome A-type and B-type
  misc_feature (1)..(220): Homolog of NCBI NO: 40744887 NR Description: conserved hypothetical protein [Aspergillus
  misc_feature (1)..(220): Homolog of NCBI NO: 464458 NR Description: Proteasome subunit alpha type 4 (Proteasome
  misc_feature (1)..(148): Homolog of NCBI NO: 14594915 NR Description: putative alpha3 proteasome subunit [Nicotiana
  misc_feature (1)..(224): Homolog of NCBI NO: 34898458 NR Description: ESTs AU058081(E3082),AU075427(E30384) correspond a region of the predicted gene.~Similar to Spinacia oleracea
  misc_feature (1)..(224): Homolog of NCBI NO: 34898416 NR Description: ESTs AU058081(E30812),AU058365(E50679), correspond to a region of the predicted gene.~Similar to Spinacia
  misc_feature (1)..(226): Homolog of NCBI NO: 6984140 NR Description: proteasome 27 kDa subunit [Euphorbia esula]
  misc_feature (1)..(226): Homolog of NCBI NO: 12229904 NR Description: Proteasome subunit alpha type 4 (20S proteasome
  misc_feature (1)..(226): Homolog of NCBI NO: 1709761 NR Description: Proteasome subunit alpha type 4 (20S proteasome subunit C) (20S proteasome subunit alpha-3) (Proteasome 27 kDa
  misc_feature (1)..(226): Homolog of NCBI NO: 2511584 NR Description: multicatalytic endopeptidase [Arabidopsis
  misc_feature (1)..(226): Homolog of NCBI NO: 15233268 NR Description: 20S proteasome alpha subunit C (PAC1)
MEAIGNAGSAIGILSKDGVVLIGEKKVTSKLLQTSTSAEKMYKIDDHVACAVAGIMSDANILINTARVQAQRYTFMYQEPMPVEQLVQSLCDTKQGYTQFGGLRPFGVSFLFAGWDKHHGFQLYMSDPSGNYGGWKAAAVGANNQAAQSILKQDYKDDATREEAVELALKVLTKTMDSTSLTSEKLELAEVYLTPSKTVKYHVHSPESLTKLLVKHGVTQPAAETS

SEQ ID NO: 30941 - protein, 186 aa, Arabidopsis thaliana
  peptide (1)..(186): Ceres Seq. ID no. 13489863
  misc_feature (1)..(151): Pfam Name: Proteasome A-type and B-type Pfam Description: Proteasome A-type and B-type
  misc_feature (1)..(180): Homolog of NCBI NO: 40744887 NR Description: conserved hypothetical protein [Aspergillus
  misc_feature (1)..(180): Homolog of NCBI NO: 464458 NR Description: Proteasome subunit alpha type 4 (Proteasome
  misc_feature (1)..(108): Homolog of NCBI NO: 14594915 NR Description: putative alpha3 proteasome subunit [Nicotiana
  misc_feature (1)..(184): Homolog of NCBI NO: 34898458 NR Description: ESTs AU058081(E3082),AU075427(E30384) correspond a region of the predicted gene.~Similar to Spinacia oleracea
  misc_feature (1)..(184): Homolog of NCBI NO: 34898416 NR Description: ESTs AU058081(E30812),AU058365(E50679), correspond to a region of the predicted gene.~Similar to Spinacia
  misc_feature (1)..(186): Homolog of NCBI NO: 6984140 NR Description: proteasome 27 kDa subunit [Euphorbia esula]
  misc_feature (1)..(186): Homolog of NCBI NO: 12229904 NR Description: Proteasome subunit alpha type 4 (20S proteasome
  misc_feature (1)..(186): Homolog of NCBI NO: 1709761 NR Description: Proteasome subunit alpha type 4 (20S proteasome subunit C) (20S proteasome subunit alpha-3) (Proteasome 27 kDa
  misc_feature (1)..(186): Homolog of NCBI NO: 2511584 NR Description: multicatalytic endopeptidase [Arabidopsis
  misc_feature (1)..(186): Homolog of NCBI NO: 15233268 NR Description: 20S proteasome alpha subunit C (PAC1)
MYKIDDHVACAVAGIMSDANILINTARVQAQRYTFMYQEPMPVEQLVQSLCDTKQGYTQFGGLRPFGVSFLFAGWDKHHGFQLYMSDPSGNYGGWKAAAVGANNQAAQSILKQDYKDDATREEAVELALKVLTKTMDSTSLTSEKLELAEVYLTPSKTVKYHVHSPESLTKLLVKHGVTQPAAETS

SEQ ID NO: 30942 - DNA, 3198 bp, Arabidopsis thaliana
  misc_feature (1)..(3198): Ceres Seq. ID no. 13579859
  misc_feature: MA Experiment ID: 108434 Result: Up-regulated in Transcription
  misc_feature: MA Experiment 108434 PARAMETER Experiment Name: At_Root_Tips_cDNA_P Parameter: Tissue Value: Root Tips
  misc_feature: MA Experiment ID: 108462 Result: Up-regulated in Transcription
  misc_feature: MA Experiment 108462 PARAMETER Experiment Name: At_Germinating_Seeds_cDNA_P Parameter: Age (day) Value: 2 vs. 0
  misc_feature: MA Experiment 108462 PARAMETER Experiment Name: At_Germinating_Seeds_cDNA_P Parameter: Tissue Value: Germinating Seeds
  misc_feature: MA Experiment ID: 108463 Result: Up-regulated in Transcription
  misc_feature: MA Experiment 108463 PARAMETER Experiment Name: At_Germinating_Seeds_cDNA_P Parameter: Age (day) Value: 3 vs. 0
  misc_feature: MA Experiment 108463 PARAMETER Experiment Name: At_Germinating_Seeds_cDNA_P Parameter: Tissue Value: Germinating Seeds
  misc_feature: MA Experiment ID: 108464 Result: Up-regulated in Transcription
  misc_feature: MA Experiment 108464 PARAMETER Experiment Name: At_Germinating_Seeds_cDNA_P Parameter: Age (day) Value: 4 vs. 0
  misc_feature: MA Experiment 108464 PARAMETER Experiment Name: At_Germinating_Seeds_cDNA_P Parameter: Tissue Value: Germinating Seeds
  misc_feature: MA Experiment ID: 108488 Result: Down-regulated in Transcription
  misc_feature: MA Experiment ID: 108572 Result: Down-regulated in Transcription
  misc_feature: MA Experiment 108572 PARAMETER Experiment Name: At_Drought_cDNA_P Parameter: Timepoint (hr) Value: 1
  misc_feature: MA Experiment 108572 PARAMETER Experiment Name: At_Drought_cDNA_P Parameter: Tissue Value: Aerial
  misc_feature: MA Experiment 108572 PARAMETER Experiment Name: At_Drought_cDNA_P Parameter: Treatment Value: Drought vs. No Drought
  misc_feature: MA Experiment ID: 108576 Result: Down-regulated in Transcription
  misc_feature: MA Experiment 108576 PARAMETER Experiment Name: At_42deg_Heat_cDNA_P Parameter: Temperature (deg C) Value: 42 vs. 22
  misc_feature: MA Experiment 108576 PARAMETER Experiment Name: At_42deg_Heat_cDNA_P Parameter: Timepoint (hr) Value: 1
  misc_feature: MA Experiment 108576 PARAMETER Experiment Name: At_42deg_Heat_cDNA_P Parameter: Tissue Value: Aerial
  misc_feature: MA Experiment ID: 108577 Result: Down-regulated in Transcription
  misc_feature: MA Experiment 108577 PARAMETER Experiment Name: At_42deg_Heat_cDNA_P Parameter: Temperature (deg C) Value: 42 vs. 22
  misc_feature: MA Experiment 108577 PARAMETER Experiment Name: At_42deg_Heat_cDNA_P Parameter: Timepoint (hr) Value: 6
  misc_feature: MA Experiment 108577 PARAMETER Experiment Name: At_42deg_Heat_cDNA_P Parameter: Tissue Value: Aerial
  misc_feature: MA Experiment ID: 108579 Result: Down-regulated in Transcription
  misc_feature: MA Experiment 108579 PARAMETER Experiment Name: At_4deg_Cold_cDNA_P Parameter: Temperature (deg C) Value: 4 vs. 22
  misc_feature: MA Experiment 108579 PARAMETER Experiment Name: At_4deg_Cold_cDNA_P Parameter: Timepoint (hr) Value: 6
  misc_feature: MA Experiment 108579 PARAMETER Experiment Name: At_4deg_Cold_cDNA_P Parameter: Tissue Value: Aerial
  misc_feature: MA Experiment ID: 20000093 Result: Down-regulated in Transcription
  misc_feature: MA Experiment 20000093 PARAMETER Experiment Name: At_42deg_Heat_cDNA_P Parameter: Temperature (deg C) Value: 42 vs. 22
  misc_feature: MA Experiment 20000093 PARAMETER Experiment Name: At_42deg_Heat_cDNA_P Parameter: Timepoint (hr) Value: 0.5
  misc_feature: MA Experiment 20000093 PARAMETER Experiment Name: At_42deg_Heat_cDNA_P Parameter: Tissue Value: Aerial
  misc_feature: MA Experiment ID: 20000111 Result: Down-regulated in Transcription
  misc_feature: MA Experiment 20000111 PARAMETER Experiment Name: At_42deg_Heat_cDNA_P Parameter: Temperature (deg C) Value: 42 vs. 22
  misc_feature: MA Experiment 20000111 PARAMETER Experiment Name: At_42deg_Heat_cDNA_P Parameter: Timepoint (hr) Value: 6
  misc_feature: MA Experiment 20000111 PARAMETER Experiment Name: At_42deg_Heat_cDNA_P Parameter: Tissue Value: Aerial
  misc_feature: MA Experiment ID: 20000113 Result: Down-regulated in Transcription
  misc_feature: MA Experiment 20000113 PARAMETER Experiment Name: At_42deg_Heat_cDNA_P Parameter: Temperature (deg C) Value: 42 vs. 22
  misc_feature: MA Experiment 20000113 PARAMETER Experiment Name: At_42deg_Heat_cDNA_P Parameter: Timepoint (hr) Value: 8
  misc_feature: MA Experiment 20000113 PARAMETER Experiment Name: At_42deg_Heat_cDNA_P Parameter: Tissue Value: Aerial
  misc_feature: MA Experiment ID: 20000144 Result: Down-regulated in Transcription
  misc_feature: MA Experiment 20000144 PARAMETER Experiment Name: At_42deg_Heat_cDNA_P Parameter: Temperature (deg C) Value: 42 vs. 22
  misc_feature: MA Experiment 20000144 PARAMETER Experiment Name: At_42deg_Heat_cDNA_P Parameter: Timepoint (hr) Value: 1
  misc_feature: MA Experiment 20000144 PARAMETER Experiment Name: At_42deg_Heat_cDNA_P Parameter: Tissue Value: Aerial
  misc_feature: MA Experiment ID: 20000173 Result: Down-regulated in Transcription
  misc_feature: MA Experiment 20000173 PARAMETER Experiment Name: At_42deg_Heat_P Parameter: Age (day) Value: 14
  misc_feature: MA Experiment 20000173 PARAMETER Experiment Name: At_42deg_Heat_P Parameter: Organism Value: A. thaliana
  misc_feature: MA Experiment 20000173 PARAMETER Experiment Name: At_42deg_Heat_P Parameter: Plant Line Value: WS
  misc_feature: MA Experiment 20000173 PARAMETER Experiment Name: At_42deg_Heat_P Parameter: Temperature (deg C) Value: 42 vs. 22
  misc_feature: MA Experiment 20000173 PARAMETER Experiment Name: At_42deg_Heat_P Parameter: Timepoint (hr) Value: 6
  misc_feature: MA Experiment 20000173 PARAMETER Experiment Name: At_42deg_Heat_P Parameter: Tissue Value: Aerial
  misc_feature: MA Experiment ID: 20000182 Result: Down-regulated in Transcription
  misc_feature: MA Experiment 20000182 PARAMETER Experiment Name: At_2mM_SA_P Parameter: Age (day) Value: 14
  misc_feature: MA Experiment 20000182 PARAMETER Experiment Name: At_2mM_SA_P Parameter: Organism Value: A. thaliana
  misc_feature: MA Experiment 20000182 PARAMETER Experiment Name: At_2mM_SA_P Parameter: Plant Line Value: WS
  misc_feature: MA Experiment 20000182 PARAMETER Experiment Name: At_2mM_SA_P Parameter: Timepoint (hr) Value: 6
  misc_feature: MA Experiment 20000182 PARAMETER Experiment Name: At_2mM_SA_P Parameter: Tissue Value: Aerial
  misc_feature: MA Experiment 20000182 PARAMETER Experiment Name: At_2mM_SA_P Parameter: Treatment Value: 2mM SA vs. No Treatment
  misc_feature: MA Experiment ID: 20000184 Result: Down-regulated in Transcription
  misc_feature: MA Experiment 20000184 PARAMETER Experiment Name: At_Shoots__P Parameter: Age (day) Value: 7
  misc_feature: MA Experiment 20000184 PARAMETER Experiment Name: At_Shoots__P Parameter: Tissue Value: Shoots vs. Whole Plant
  misc_feature: MA Experiment ID: 20000227 Result: Down-regulated in Transcription
  misc_feature: MA Experiment 20000227 PARAMETER Experiment Name: At_Root-Tips-vs-Tops_P Parameter: Tissue Value: Root Tips vs. Root Tops
  misc_feature: MA Experiment ID: 20000234 Result: Down-regulated in Transcription
  misc_feature: MA Experiment 20000234 PARAMETER Experiment Name: At_Siliques_P Parameter: Age (day) Value: 21
  misc_feature: MA Experiment 20000234 PARAMETER Experiment Name: At_Siliques_P Parameter: Organism Value: A. thaliana
  misc_feature: MA Experiment 20000234 PARAMETER Experiment Name: At_Siliques_P Parameter: Plant Line Value: WS
  misc_feature: MA Experiment 20000234 PARAMETER Experiment Name: At_Siliques_P Parameter: Tissue Value: Less Than 5mm Siliques vs. Whole Plant
  misc_feature: MA Experiment ID: 20000235 Result: Down-regulated in Transcription
  misc_feature: MA Experiment 20000235 PARAMETER Experiment Name: At_Siliques_P Parameter: Age (day) Value: 21
  misc_feature: MA Experiment 20000235 PARAMETER Experiment Name: At_Siliques_P Parameter: Organism Value: A. thaliana
  misc_feature: MA Experiment 20000235 PARAMETER Experiment Name: At_Siliques_P Parameter: Plant Line Value: WS
  misc_feature: MA Experiment 20000235 PARAMETER Experiment Name: At_Siliques_P Parameter: Tissue Value: 5-10mm Siliques vs. Whole Plant
  misc_feature: MA Experiment ID: 20000264 Result: Down-regulated in Transcription
  misc_feature: MA Experiment 20000264 PARAMETER Experiment Name: At_Open_Flower_P Parameter: Age (day) Value: 21
  misc_feature: MA Experiment 20000264 PARAMETER Experiment Name: At_Open_Flower_P Parameter: Plant Line Value: WS
  misc_feature: MA Experiment 20000264 PARAMETER Experiment Name: At_Open_Flower_P Parameter: Tissue Value: Open Flower vs. Whole Plant
  misc_feature: MA Experiment ID: 20000265 Result: Down-regulated in Transcription
  misc_feature: MA Experiment 20000265 PARAMETER Experiment Name: At_Open_Flower_P Parameter: Age (day) Value: 21
  misc_feature: MA Experiment 20000265 PARAMETER Experiment Name: At_Open_Flower_P Parameter: Plant Line Value: WS
  misc_feature: MA Experiment 20000265 PARAMETER Experiment Name: At_Open_Flower_P Parameter: Tissue Value: Closed Flower vs. Whole Plant
  misc_feature: MA Experiment ID: 20000286 Result: Down-regulated in Transcription
  misc_feature: MA Experiment 20000286 PARAMETER Experiment Name: At_Open_Flower_P Parameter: Age (day) Value: 21
  misc_feature: MA Experiment 20000286 PARAMETER Experiment Name: At_Open_Flower_P Parameter: Plant Line Value: WS
  misc_feature: MA Experiment 20000286 PARAMETER Experiment Name: At_Open_Flower_P Parameter: Tissue Value: Half Open vs. Whole Plant
  misc_feature: MA Experiment ID: 20000438 Result: Down-regulated in Transcription
  misc_feature: MA Experiment 20000438 PARAMETER Experiment Name: At_Shoots__P Parameter: Age (day) Value: 14
  misc_feature: MA Experiment 20000438 PARAMETER Experiment Name: At_Shoots__P Parameter: Tissue Value: Shoots vs. Whole Plant
  misc_feature: MA Experiment ID: 20000441 Result: Down-regulated in Transcription
  misc_feature: MA Experiment 20000441 PARAMETER Experiment Name: At_1uM_BR-BRZ__P Parameter: Tissue Value: Shoot Apices
  misc_feature: MA Experiment 20000441 PARAMETER Experiment Name: At_1uM_BR-BRZ__P Parameter: Treatment Value: 1uM BR vs. No Treatment
  misc_feature: MA Experiment ID: 20000443 Result: Down-regulated in Transcription
  misc_feature: MA Experiment 20000443 PARAMETER Experiment Name: At_1uM_BR-BRZ__P Parameter: Tissue Value: Shoot Apices
  misc_feature: MA Experiment 20000443 PARAMETER Experiment Name: At_1uM_BR-BRZ__P Parameter: Treatment Value: 1uM BRZ vs. No Treatment
  misc_feature: MA Experiment ID: 20000445 Result: Down-regulated in Transcription
  misc_feature: MA Experiment 20000445 PARAMETER Experiment Name: At_100uM_NAA__P Parameter: Age (day) Value: 14
  misc_feature: MA Experiment 20000445 PARAMETER Experiment Name: At_100uM_NAA__P Parameter: Organism Value: A. thaliana
  misc_feature: MA Experiment 20000445 PARAMETER Experiment Name: At_100uM_NAA__P Parameter: Plant Line Value: WS
  misc_feature: MA Experiment 20000445 PARAMETER Experiment Name: At_100uM_NAA__P Parameter: Timepoint (hr) Value: 6
  misc_feature: MA Experiment 20000445 PARAMETER Experiment Name: At_100uM_NAA__P Parameter: Tissue Value: Aerial
  misc_feature: MA Experiment 20000445 PARAMETER Experiment Name: At_100uM_NAA__P Parameter: Treatment Value: 100uM NAA vs. No Treatment
  misc_feature: MA Experiment ID: 20000451 Result: Down-regulated in Transcription
  misc_feature: MA Experiment 20000451 PARAMETER Experiment Name: At_CS6879_Shoots-Roots_P Parameter: Age (day) Value: 14
  misc_feature: MA Experiment 20000451 PARAMETER Experiment Name: At_CS6879_Shoots-Roots_P Parameter: Organism Value: A. thaliana
  misc_feature: MA Experiment 20000451 PARAMETER Experiment Name: At_CS6879_Shoots-Roots_P Parameter: Plant Line Value: CS6879 vs. WS
  misc_feature: MA Experiment 20000451 PARAMETER Experiment Name: At_CS6879_Shoots-Roots_P Parameter: Tissue Value: Roots
  misc_feature: MA Experiment ID: 20000453 Result: Up-regulated in Transcription
  misc_feature: MA Experiment 20000453 PARAMETER Experiment Name: At_100uM_ABA_P Parameter: Age (day) Value: 15
  misc_feature: MA Experiment 20000453 PARAMETER Experiment Name: At_100uM_ABA_P Parameter: Organism Value: A. thaliana
  misc_feature: MA Experiment 20000453 PARAMETER Experiment Name: At_100uM_ABA_P Parameter: Plant Line Value: WS
  misc_feature: MA Experiment 20000453 PARAMETER Experiment Name: At_100uM_ABA_P Parameter: Timepoint (hr) Value: 24
  misc_feature: MA Experiment 20000453 PARAMETER Experiment Name: At_100uM_ABA_P Parameter: Tissue Value: Aerial
  misc_feature: MA Experiment 20000453 PARAMETER Experiment Name: At_100uM_ABA_P Parameter: Treatment Value: 100uM ABA vs. No Treatment
  misc_feature: MA Experiment ID: 20000495 Result: Up-regulated in Transcription
  misc_feature: MA Experiment 20000495 PARAMETER Experiment Name: At_Guard_Cells_P Parameter: Harvest Date Value: 8/2/2002
  misc_feature: MA Experiment 20000495 PARAMETER Experiment Name: At_Guard_Cells_P Parameter: Organism Value: A. thaliana
  misc_feature: MA Experiment 20000495 PARAMETER Experiment Name: At_Guard_Cells_P Parameter: Tissue Value: Guard Cells vs. Leaves
  misc_feature: MA Experiment ID: 20000794 Result: Down-regulated in Transcription
  misc_feature: MA Experiment 20000794 PARAMETER Experiment Name: At_Petals_P Parameter: Age (day) Value: 23-25 days
  misc_feature: MA Experiment 20000794 PARAMETER Experiment Name: At_Petals_P Parameter: Plant Line Value: WS
  misc_feature: MA Experiment 20000794 PARAMETER Experiment Name: At_Petals_P Parameter: Tissue Value: Petals vs. Whole plant
  misc_feature: MA Experiment ID: 20001248 Result: Down-regulated in Transcription
  misc_feature: MA Experiment 20001248 PARAMETER Experiment Name: At_Far-red-induction_P Parameter: Age (day) Value: 7
  misc_feature: MA Experiment 20001248 PARAMETER Experiment Name: At_Far-red-induction_P Parameter: Light Value: Far-red vs. White
  misc_feature: MA Experiment 20001248 PARAMETER Experiment Name: At_Far-red-induction_P Parameter: Organism Value: A. thaliana
  misc_feature: MA Experiment 20001248 PARAMETER Experiment Name: At_Far-red-induction_P Parameter: Plant Line Value: Columbia
  misc_feature: MA Experiment 20001248 PARAMETER Experiment Name: At_Far-red-induction_P Parameter: Timepoint (hr) Value: 4
  misc_feature: MA Experiment 20001248 PARAMETER Experiment Name: At_Far-red-induction_P Parameter: Tissue Value: Whole Plant
  misc_feature: MA Experiment ID: 20001450 Result: Down-regulated in Transcription
  misc_feature: MA Experiment 20001450 PARAMETER Experiment Name: At_Far-red-induction_P Parameter: Age (day) Value: 7
  misc_feature: MA Experiment 20001450 PARAMETER Experiment Name: At_Far-red-induction_P Parameter: Light Value: Far-red vs. White
  misc_feature: MA Experiment 20001450 PARAMETER Experiment Name: At_Far-red-induction_P Parameter: Organism Value: A. thaliana
  misc_feature: MA Experiment 20001450 PARAMETER Experiment Name: At_Far-red-induction_P Parameter: Plant Line Value: Columbia
  misc_feature: MA Experiment 20001450 PARAMETER Experiment Name: At_Far-red-induction_P Parameter: Timepoint (hr) Value: 8
  misc_feature: MA Experiment 20001450 PARAMETER Experiment Name: At_Far-red-induction_P Parameter: Tissue Value: Whole Plant
  misc_feature: MA Experiment ID: 20001451 Result: Up-regulated in Transcription
  misc_feature: MA Experiment 20001451 PARAMETER Experiment Name: At_Far-red-induction_P Parameter: Age (day) Value: 7
  misc_feature: MA Experiment 20001451 PARAMETER Experiment Name: At_Far-red-induction_P Parameter: Light Value: Far-red vs. White
  misc_feature: MA Experiment 20001451 PARAMETER Experiment Name: At_Far-red-induction_P Parameter: Organism Value: A. thaliana
  misc_feature: MA Experiment 20001451 PARAMETER Experiment Name: At_Far-red-induction_P Parameter: Plant Line Value: Columbia
  misc_feature: MA Experiment 20001451 PARAMETER Experiment Name: At_Far-red-induction_P Parameter: Timepoint (hr) Value: 24
  misc_feature: MA Experiment 20001451 PARAMETER Experiment Name: At_Far-red-induction_P Parameter: Tissue Value: Whole Plant
  misc_feature: MA Experiment ID: 20001458 Result: Up-regulated in Transcription
  misc_feature: MA Experiment 20001458 PARAMETER Experiment Name: At_50mM_NH4NO3_L-to-H_P Parameter: Age (day) Value: Undefined
  misc_feature: MA Experiment 20001458 PARAMETER Experiment Name: At_50mM_NH4NO3_L-to-H_P Parameter: Organism Value: Undefined
  misc_feature: MA Experiment 20001458 PARAMETER Experiment Name: At_50mM_NH4NO3_L-to-H_P Parameter: Plant Line Value: Undefined
  misc_feature: MA Experiment 20001458 PARAMETER Experiment Name: At_50mM_NH4NO3_L-to-H_P Parameter: Timepoint (hr) Value: 2
  misc_feature: MA Experiment 20001458 PARAMETER Experiment Name: At_50mM_NH4NO3_L-to-H_P Parameter: Tissue Value: Siliques
  misc_feature: MA Experiment 20001458 PARAMETER Experiment Name: At_50mM_NH4NO3_L-to-H_P Parameter: Treatment Value: 50mM NH4NO3 vs. 100mM Manitol
  misc_feature: MA Experiment ID: 20001557 Result: Up-regulated in Transcription
  misc_feature: MA Experiment 20001557 PARAMETER Experiment Name: At_Drought_Soil_Dry_P Parameter: Age (day) Value: 27
  misc_feature: MA Experiment 20001557 PARAMETER Experiment Name: At_Drought_Soil_Dry_P Parameter: Organism Value: A. thaliana
  misc_feature: MA Experiment 20001557 PARAMETER Experiment Name: At_Drought_Soil_Dry_P Parameter: Plant Line Value: WS
  misc_feature: MA Experiment 20001557 PARAMETER Experiment Name: At_Drought_Soil_Dry_P Parameter: Post Timepoint (hr) Value: 3
  misc_feature: MA Experiment 20001557 PARAMETER Experiment Name: At_Drought_Soil_Dry_P Parameter: Post-Treatment Value: Re-Water vs. No Drought
  misc_feature: MA Experiment 20001557 PARAMETER Experiment Name: At_Drought_Soil_Dry_P Parameter: Timepoint (day) Value: 13
  misc_feature: MA Experiment 20001557 PARAMETER Experiment Name: At_Drought_Soil_Dry_P Parameter: Treatment Value: Drought vs. No Drought
  misc_feature: MA Experiment ID: 20001560 Result: Up-regulated in Transcription
  misc_feature: MA Experiment 20001560 PARAMETER Experiment Name: At_Drought_Soil_Dry_P Parameter: Age (day) Value: 28
  misc_feature: MA Experiment 20001560 PARAMETER Experiment Name: At_Drought_Soil_Dry_P Parameter: Organism Value: A. thaliana
  misc_feature: MA Experiment 20001560 PARAMETER Experiment Name: At_Drought_Soil_Dry_P Parameter: Plant Line Value: WS
  misc_feature: MA Experiment 20001560 PARAMETER Experiment Name: At_Drought_Soil_Dry_P Parameter: Post Timepoint (hr) Value: None
  misc_feature: MA Experiment 20001560 PARAMETER Experiment Name: At_Drought_Soil_Dry_P Parameter: Post-Treatment Value: None
  misc_feature: MA Experiment 20001560 PARAMETER Experiment Name: At_Drought_Soil_Dry_P Parameter: Timepoint (day) Value: 14
  misc_feature: MA Experiment 20001560 PARAMETER Experiment Name: At_Drought_Soil_Dry_P Parameter: Treatment Value: Drought vs. No Drought
  misc_feature: MA Experiment ID: 20001757 Result: Up-regulated in Transcription
  misc_feature: MA Experiment 20001757 PARAMETER Experiment Name: At_50mM_NH4NO3_L-to-H_P Parameter: Timepoint (hr) Value: 6
  misc_feature: MA Experiment 20001757 PARAMETER Experiment Name: At_50mM_NH4NO3_L-to-H_P Parameter: Tissue Value: Leaf
  misc_feature: MA Experiment 20001757 PARAMETER Experiment Name: At_50mM_NH4NO3_L-to-H_P Parameter: Treatment Value: 50mM NH4NO3 vs 100mM Mannitol
acaatcctcataatcactttcgaaattacatttacgctttcttgcaatcaaattttccgatcttaagttcagaagacgatgtcagaggtggaaatagagaacgctgctacgatcgaaggaaacaccgctgcggatgcgccggtgacggatgcggccgttgagaagaagcctgcagcgaaaggacgaaagacgaagaatgttaaggaagtgaaggagaagaagactgttgctgccgctccgaagaagagaactgtttcatctcatcctacttacgaagagatgattaaggatgcgattgttacgttgaaagagagaactggatctagccaatacgcgattcagaagttcatcgaggagaagcgtaaggagcttcctccaacattcagaaagctgttgcttctcaatctgaagagactcgttgcttctgggaagcttgtgaaggtcaaagcctcgtttaaactcccatcggcgtcggctaaagcatcatcccctaaggcggcagcggagaaatctgctcctgcgaagaagaaaccggcgactgtggcggttaccaaggcgaagagaaaggtcgctgcggcttccaaggctaagaaaacaatcgccgttaaacctaagactgctgctgctaagaaagtgaccgcgaaggctaaggctaagcccgttcctcgtgccactgctgctgcaactaagaggaaagctgttgatgcgaagcccaaggctaaggctagaccagccaaggcagccaaaacggccaaggttacatctccggctaagaaagctgttgctgccacgaagaaagttgctacggtggccacaaagaagaagactccggttaagaaggttgtgaagccaaagacggttaagtctccagcaaagagggcttcttctagggttaagaagtgaagttagggtttgtaggtagaagaatggttaacgatagtttagacttgtataattcaatcatctttatgcgactttgtttgcttttcttctttcagtgttcttgttattcacagttcctttggactacccaaaaaaaaaaaaaaaactatccagggttggatccaaccctggatagtttttttttttttttttttttttttttttaaaaagaaacttttttttttttttaccacatgattcaaaataaatttacacaattcttacatgtactttataataaattttttacaacataacctttatataaagggaacaaaccccagtttaccgtttaccaaaaatcaagtagaatccattcccatcatcaaccaaaaggccttatcagctttagatctatttcatttccatcttatgcttttctctctattgattacagaaaagcataaacaaccatagtcttgtcttcttcatctgatcattagttgtcgtgcctttacatttcagcgaatctgatggtattgtgtaatgcctcgttttggtggtagctttctcaagatgaagaggaccagagaggagggtaatatctctaccaacaggtaatatatgaagttaaggatggggtgatctaacacatcaaggtttgccccctcatcgaaagcagcaaagcacatcatgatacatctgatgaggaaacacgtaaagcatatggttgtcacgtaaccaacctcttgcagctttttgcgccgccctttagattctactggaaaccgttgcaacattaggaaaagccttccaccataaagtaaaaatccaagggcagcgaacaatgaaacacctgcaaagaacatcttagataggattaccataactcgaacaggcttccaccacaaaaccaaccatagagcaatctgaactacatatacaactgcattaattgtgaagaagcttggcctgagtccatcagtcgatactgcacgcgcctgataataaatttcagcccagaaaagaaccagaagagcataggtggtgaagaaagcaagacttggaatatcaagcaagatatgttgcagaatctctggttgcataaactgaacatttcgcctgaagacaaacaccacagcacgaactccattaacaacgaaattgagaaagtgaaagaccttttgcgtcgtccaaccatattcaggaactctcaattgtattctcacaagttgaatcacagcaacgagggaaacgattccgtagagaacagcgagaacatggaagatacgatcctgccaaatcggagattcgtttacgtctgaccaccaattcgaagcttctttgagattcaacatctccaccgccgacgaagacgacgacgacatcatctccgacgcaaatttcgtaacctcgacgccgccgattctcatctacacgagtcagattccttctcgattcagattttgaatatacataatgagaactctctggatttgaatcacctctttttatttctttctttttttgttattttccccacggttctcgagaaccgattcatctttccagctttcttcactttttcctttatataaagttagaaaaacaaaaaaaaacaaaatagttagaaaaaatctgagagaaacagaagaaacataaaaaaaatgaggccattgagcattaaaccaacatcgttagatgtagctagacatgccacatcagtagaatcatttgggaatcaccgaccgccgatatcgccgtggcactcaccggtgccgtacctattcggtggtcttgcggcgatgttaggcctcatagccttcgctttacttatcctagcctgctcttactggcgcttgtcaacctccggtgatgactccggcgaaagagtcgacgaggaaaaagagagtcggtctggagtgaaggcggctagcgcggcgtgcgaggagaaggttcttgtcataatggccggagatgacttgccgaggtttctggccacgccggcggcgaacaaatgcatgtgcggtcacgagggtagaatggtaattttcaaggaggatggtattggtgctggagaggagaaaatgggagacagagagaaagccaaagaaaatgaagaaacaacgagtcagtgagcttttttgttttcttttcttctctcagtcttgtctttttttttttgttggggaattttccttcgtgttttcacgggaaatgtaaaatttactgagagaaaattttgggttatgattaatgaatgtttgcttgtaatttcctatccccaatggtggaaaactcgtttttagtttttgt

SEQ ID NO: 30943 - protein, 274 aa, Arabidopsis thaliana
  peptide (1)..(274): Ceres Seq. ID no. 13579860
  misc_feature (61)..(130): Pfam Name: linker histone H1 and H5 family Pfam Description: linker histone H1 and H5 family
  misc_feature (61)..(130): Pfam Name: linker histone H1 and H5 family Pfam Description: linker histone H1 and H5 family
  misc_feature (1)..(274): Homolog of NCBI NO: 30420972 NR Description: histone H1 [Vicia hirsuta]
  misc_feature (12)..(274): Homolog of NCBI NO: 13540393 NR Description: histone H1 [Pisum sativum]
  misc_feature (10)..(274): Homolog of NCBI NO: 28301619 NR Description: histone H1 [Pisum sativum]
  misc_feature (25)..(271): Homolog of NCBI NO: 6681423 NR Description: histone H1 [Nicotiana tabacum]
  misc_feature (10)..(274): Homolog of NCBI NO: 29469895 NR Description: histone H1 subtype 5 [Pisum sativum]
  misc_feature (1)..(274): Homolog of NCBI NO: 30420972 NR Description: histone H1 [Vicia hirsuta]
  misc_feature (10)..(274): Homolog of NCBI NO: 28301619 NR Description: histone H1 [Pisum sativum]
  misc_feature (10)..(274): Homolog of NCBI NO: 29469895 NR Description: histone H1 subtype 5 [Pisum sativum]
  misc_feature (1)..(274): Homolog of NCBI NO: 15222199 NR Description: histone H1, putative [Arabidopsis thaliana]
  misc_feature (33)..(274): Homolog of NCBI NO: 16314 NR Description: histone H1-1 [Arabidopsis thaliana]
  misc_feature (4)..(274): Homolog of NCBI NO: 15224536 NR Description: histone H1 [Arabidopsis thaliana]
  misc_feature (25)..(271): Homolog of NCBI NO: 1084419 NR Description: histone H1 - common tobacco
  misc_feature (22)..(269): Homolog of NCBI NO: 121953 NR Description: HISTONE H1
  misc_feature (25)..(271): Homolog of NCBI NO: 6681423 NR Description: histone H1 [Nicotiana tabacum]
  misc_feature (12)..(274): Homolog of NCBI NO: 13540393 NR Description: histone H1 [Pisum sativum]
  misc_feature (22)..(269): Homolog of NCBI NO: 121953 NR Description: HISTONE H1
  misc_feature (25)..(271): Homolog of NCBI NO: 1084419 NR Description: histone H1 - common tobacco
  misc_feature (4)..(274): Homolog of NCBI NO: 15224536 NR Description: histone H1 [Arabidopsis thaliana]
  misc_feature (33)..(274): Homolog of NCBI NO: 16314 NR Description: histone H1-1 [Arabidopsis thaliana]
  misc_feature (1)..(274): Homolog of NCBI NO: 15222199 NR Description: histone H1, putative [Arabidopsis thaliana]
MSEVEIENAATIEGNTAADAPVTDAAVEKKPAAKGRKTKNVKEVKEKKTVAAAPKKRTVSSHPTYEEMIKDAIVTLKERTGSSQYAIQKFIEEKRKELPPTFRKLLLLNLKRLVASGKLVKVKASFKLPSASAKASSPKAAAEKSAPAKKKPATVAVTKAKRKVAAASKAKKTIAVKPKTAAAKKVTAKAKAKPVPRATAAATKRKAVDAKPKAKARPAKAAKTAKVTSPAKKAVAATKKVATVATKKKTPVKKVVKPKTVKSPAKRASSRVKK

SEQ ID NO: 30944 - protein, 207 aa, Arabidopsis thaliana
  peptide (1)..(207): Ceres Seq. ID no. 13579861
  misc_feature (1)..(63): Pfam Name: linker histone H1 and H5 family Pfam Description: linker histone H1 and H5 family
  misc_feature (1)..(63): Pfam Name: linker histone H1 and H5 family Pfam Description: linker histone H1 and H5 family
  misc_feature (1)..(207): Homolog of NCBI NO: 30420972 NR Description: histone H1 [Vicia hirsuta]
  misc_feature (1)..(207): Homolog of NCBI NO: 13540393 NR Description: histone H1 [Pisum sativum]
  misc_feature (1)..(207): Homolog of NCBI NO: 28301619 NR Description: histone H1 [Pisum sativum]
  misc_feature (1)..(204): Homolog of NCBI NO: 6681423 NR Description: histone H1 [Nicotiana tabacum]
  misc_feature (1)..(207): Homolog of NCBI NO: 29469895 NR Description: histone H1 subtype 5 [Pisum sativum]
  misc_feature (1)..(207): Homolog of NCBI NO: 30420972 NR Description: histone H1 [Vicia hirsuta]
  misc_feature (1)..(207): Homolog of NCBI NO: 28301619 NR Description: histone H1 [Pisum sativum]
  misc_feature (1)..(207): Homolog of NCBI NO: 29469895 NR Description: histone H1 subtype 5 [Pisum sativum]
  misc_feature (1)..(207): Homolog of NCBI NO: 15222199 NR Description: histone H1, putative [Arabidopsis thaliana]
  misc_feature (1)..(207): Homolog of NCBI NO: 16314 NR Description: histone H1-1 [Arabidopsis thaliana]
  misc_feature (1)..(207): Homolog of NCBI NO: 15224536 NR Description: histone H1 [Arabidopsis thaliana]
  misc_feature (1)..(204): Homolog of NCBI NO: 1084419 NR Description: histone H1 - common tobacco
  misc_feature (1)..(202): Homolog of NCBI NO: 121953 NR Description: HISTONE H1
  misc_feature (1)..(204): Homolog of NCBI NO: 6681423 NR Description: histone H1 [Nicotiana tabacum]
  misc_feature (1)..(207): Homolog of NCBI NO: 13540393 NR Description: histone H1 [Pisum sativum]
  misc_feature (1)..(202): Homolog of NCBI NO: 121953 NR Description: HISTONE H1
  misc_feature (1)..(204): Homolog of NCBI NO: 1084419 NR Description: histone H1 - common tobacco
  misc_feature (1)..(207): Homolog of NCBI NO: 15224536 NR Description: histone H1 [Arabidopsis thaliana]
  misc_feature (1)..(207): Homolog of NCBI NO: 16314 NR Description: histone H1-1 [Arabidopsis thaliana]
  misc_feature (1)..(207): Homolog of NCBI NO: 15222199 NR Description: histone H1, putative [Arabidopsis thaliana]
MIKDAIVTLKERTGSSQYAIQKFIEEKRKELPPTFRKLLLLNLKRLVASGKLVKVKASFKLPSASAKASSPKAAAEKSAPAKKKPATVAVTKAKRKVAAASKAKKTIAVKPKTAAAKKVTAKAKAKPVPRATAAATKRKAVDAKPKAKARPAKAAKTAKVTSPAKKAVAATKKVATVATKKKTPVKKVVKPKTVKSPAKRASSRVKK

SEQ ID NO: 30945 - protein, 156 aa, Arabidopsis thaliana
  peptide (1)..(156): Ceres Seq. ID no. 13579862
  misc_feature (29)..(153): Homolog of NCBI NO: 30696912 NR Description: expressed protein [Arabidopsis thaliana]
  misc_feature (1)..(156): Homolog of NCBI NO: 18400628 NR Description: expressed protein [Arabidopsis thaliana]
  misc_feature (29)..(153): Homolog of NCBI NO: 30696912 NR Description: expressed protein [Arabidopsis thaliana]
  misc_feature (1)..(156): Homolog of NCBI NO: 18400628 NR Description: expressed protein [Arabidopsis thaliana]
MRPLSIKPTSLDVARHATSVESFGNHRPPISPWHSPVPYLFGGLAAMLGLIAFALLILACSYWRLSTSGDDSGERVDEEKESRSGVKAASAACEEKVLVIMAGDDLPRFLATPAANKCMCGHEGRMVIFKEDGIGAGEEKMGDREKAKENEETTSQ

SEQ ID NO: 30946 - DNA, 641 bp, Arabidopsis thaliana
  misc_feature (1)..(641): Ceres Seq. ID no. 12420660
  misc_feature: MA Experiment ID: 108434 Result: Up-regulated in Transcription
  misc_feature: MA Experiment 108434 PARAMETER Experiment Name: At_Root_Tips_cDNA_P Parameter: Tissue Value: Root Tips
  misc_feature: MA Experiment ID: 20001911 Result: Down-regulated in Transcription
  misc_feature: MA Experiment 20001911 PARAMETER Experiment Name: At_Drought_Reproduction_P Parameter: Age (day) Value: 40
  misc_feature: MA Experiment 20001911 PARAMETER Experiment Name: At_Drought_Reproduction_P Parameter: Organism Value: A. thaliana
  misc_feature: MA Experiment 20001911 PARAMETER Experiment Name: At_Drought_Reproduction_P Parameter: Plant Line Value: WS
  misc_feature: MA Experiment 20001911 PARAMETER Experiment Name: At_Drought_Reproduction_P Parameter: Timepoint (day) Value: 10
  misc_feature: MA Experiment 20001911 PARAMETER Experiment Name: At_Drought_Reproduction_P Parameter: Tissue Value: Flowers
  misc_feature: MA Experiment 20001911 PARAMETER Experiment Name: At_Drought_Reproduction_P Parameter: Treatment Value: Drought vs. No Drought
atttccgtcggactcagtggagaagaagaagaagatccaaatcgatccgttgaaaaggaatttcgaatttgctgtgcgatgtcgagtgcggtggacgctacgggaaacccgatccctacttcggcggttttaacggcgtcagcgaagcatataggtatgaggtgtatgccggagaatgttgcgttcctcaaatgcaagaagaattatccaaacccagagaagtgtctcgacaaaggtcgtgacgtcactcgctgcgtgcttggcttgctgaaggatcttcaccagaagtgccaaaaggagatggatgattatgttgggtgtatgtattactacacaaacgagtttgatctgtgtaggaaagagcaagaagccttcgagaaagtgtgtcccttgaaatgagaatcacaagttcttgtcatgttttgatttgtatctcataataaagcaaaatgttcatttttgaatgagctttactctctccatctcttgtttgttgtcatcccatttatttcctctcagatgctttcgtagtgagttccaaagacaactaaatgactcagttttattgttcgatggttcactaatcagcacagaatggaacaattgtttttatctgcttatattctaccatacttgacagt

SEQ ID NO: 30947 - protein, 132 aa, Arabidopsis thaliana
  peptide (1)..(132): Ceres Seq. ID no. 12420661
  misc_feature (40)..(131): Homolog of NCBI NO: 28461275 NR Description: NADH dehydrogenase (ubiquinone) 1 alpha
  misc_feature (40)..(131): Homolog of NCBI NO: 33086512 NR Description: Aa2-258 [Rattus norvegicus]
  misc_feature (40)..(127): Homolog of NCBI NO: 17946601 NR Description: RH23043p [Drosophila melanogaster]
  misc_feature (40)..(131): Homolog of NCBI NO: 27706932 NR Description: similar to RIKEN cDNA 0610033L03
  misc_feature (40)..(127): Homolog of NCBI NO: 24762701 NR Description: CG3683-PA [Drosophila melanogaster]
  misc_feature (40)..(127): Homolog of NCBI NO: 38048623 NR Description: similar to Drosophila melanogaster CG3683
  misc_feature (40)..(131): Homolog of NCBI NO: 7657369 NR Description: NADH dehydrogenase (ubiquinone) 1 alpha
  misc_feature (40)..(131): Homolog of NCBI NO: 37589679 NR Description: Unknown (protein for MGC:73139) [Danio rerio]
  misc_feature (28)..(132): Homolog of NCBI NO: 18397530 NR Description: expressed protein
  misc_feature (27)..(132): Homolog of NCBI NO: 15239564 NR Description: NADH:ubiquinone oxidoreductase - like protein
ISVGLSGEEEEDPNRSVEKEFRICCAMSSAVDATGNPIPTSAVLTASAKHIGMRCMPENVAFLKCKKNYPNPEKCLDKGRDVTRCVLGLLKDLHQKCQKEMDDYVGCMYYYTNEFDLCRKEQEAFEKVCPLK

SEQ ID NO: 30948 - protein, 106 aa, Arabidopsis thaliana
  peptide (1)..(106): Ceres Seq. ID no. 12420662
  misc_feature (14)..(105): Homolog of NCBI NO: 28461275 NR Description: NADH dehydrogenase (ubiquinone) 1 alpha
  misc_feature (14)..(105): Homolog of NCBI NO: 33086512 NR Description: Aa2-258 [Rattus norvegicus]
  misc_feature (14)..(101): Homolog of NCBI NO: 17946601 NR Description: RH23043p [Drosophila melanogaster]
  misc_feature (14)..(105): Homolog of NCBI NO: 27706932 NR Description: similar to RIKEN cDNA 0610033L03
  misc_feature (14)..(101): Homolog of NCBI NO: 24762701 NR Description: CG3683-PA [Drosophila melanogaster]
  misc_feature (14)..(101): Homolog of NCBI NO: 38048623 NR Description: similar to Drosophila melanogaster CG3683
  misc_feature (14)..(105): Homolog of NCBI NO: 7657369 NR Description: NADH dehydrogenase (ubiquinone) 1 alpha
  misc_feature (14)..(105): Homolog of NCBI NO: 37589679 NR Description: Unknown (protein for MGC:73139) [Danio rerio]
  misc_feature (2)..(106): Homolog of NCBI NO: 18397530 NR Description: expressed protein
  misc_feature (1)..(106): Homolog of NCBI NO: 15239564 NR Description: NADH:ubiquinone oxidoreductase - like protein
MSSAVDATGNPIPTSAVLTASAKHIGMRCMPENVAFLKCKKNYPNPEKCLDKGRDVTRCVLGLLKDLHQKCQKEMDDYVGCMYYYTNEFDLCRKEQEAFEKVCPLK

SEQ ID NO: 30949 - protein, 80 aa, Arabidopsis thaliana
  peptide (1)..(80): Ceres Seq. ID no. 12420663
  misc_feature (1)..(79): Homolog of NCBI NO: 28461275 NR Description: NADH dehydrogenase (ubiquinone) 1 alpha
  misc_feature (1)..(79): Homolog of NCBI NO: 33086512 NR Description: Aa2-258 [Rattus norvegicus]
  misc_feature (1)..(75): Homolog of NCBI NO: 17946601 NR Description: RH23043p [Drosophila melanogaster]
  misc_feature (1)..(79): Homolog of NCBI NO: 27706932 NR Description: similar to RIKEN cDNA 0610033L03
  misc_feature (1)..(75): Homolog of NCBI NO: 24762701 NR Description: CG3683-PA [Drosophila melanogaster]
  misc_feature (1)..(75): Homolog of NCBI NO: 38048623 NR Description: similar to Drosophila melanogaster CG3683
  misc_feature (1)..(79): Homolog of NCBI NO: 7657369 NR Description: NADH dehydrogenase (ubiquinone) 1 alpha
  misc_feature (1)..(79): Homolog of NCBI NO: 37589679 NR Description: Unknown (protein for MGC:73139) [Danio rerio]
  misc_feature (1)..(80): Homolog of NCBI NO: 18397530 NR Description: expressed protein
  misc_feature (1)..(80): Homolog of NCBI NO: 15239564 NR Description: NADH:ubiquinone oxidoreductase - like protein
MRCMPENVAFLKCKKNYPNPEKCLDKGRDVTRCVLGLLKDLHQKCQKEMDDYVGCMYYYTNEFDLCRKEQEAFEKVCPLK

SEQ ID NO: 30950 - DNA, 908 bp, Arabidopsis thaliana
  misc_feature (1)..(908): Ceres Seq. ID no. 12396500
  misc_feature: MA Experiment ID: 108461 Result: Up-regulated in Transcription
  misc_feature: MA Experiment 108461 PARAMETER Experiment Name: At_Germinating_Seeds_cDNA_P Parameter: Age (day) Value: 1 vs. 0
  misc_feature: MA Experiment 108461 PARAMETER Experiment Name: At_Germinating_Seeds_cDNA_P Parameter: Tissue Value: Germinating Seeds
  misc_feature: MA Experiment ID: 108462 Result: Up-regulated in Transcription
  misc_feature: MA Experiment 108462 PARAMETER Experiment Name: At_Germinating_Seeds_cDNA_P Parameter: Age (day) Value: 2 vs. 0
  misc_feature: MA Experiment 108462 PARAMETER Experiment Name: At_Germinating_Seeds_cDNA_P Parameter: Tissue Value: Germinating Seeds
  misc_feature: MA Experiment ID: 108463 Result: Up-regulated in Transcription
  misc_feature: MA Experiment 108463 PARAMETER Experiment Name: At_Germinating_Seeds_cDNA_P Parameter: Age (day) Value: 3 vs. 0
  misc_feature: MA Experiment 108463 PARAMETER Experiment Name: At_Germinating_Seeds_cDNA_P Parameter: Tissue Value: Germinating Seeds
  misc_feature: MA Experiment ID: 108464 Result: Up-regulated in Transcription
  misc_feature: MA Experiment 108464 PARAMETER Experiment Name: At_Germinating_Seeds_cDNA_P Parameter: Age (day) Value: 4 vs. 0
  misc_feature: MA Experiment 108464 PARAMETER Experiment Name: At_Germinating_Seeds_cDNA_P Parameter: Tissue Value: Germinating Seeds
  misc_feature: MA Experiment ID: 108488 Result: Down-regulated in Transcription
  misc_feature: MA Experiment ID: 108595 Result: Up-regulated in Transcription
  misc_feature: MA Experiment 108595 PARAMETER Experiment Name: At_Ler-pi_Ovule_cDNA_P Parameter: Plant Line Value: null
  misc_feature: MA Experiment ID: 108667 Result: Up-regulated in Transcription
  misc_feature: MA Experiment 108667 PARAMETER Experiment Name: At_2mM_SA_cDNA_P Parameter: Plant Line Value: WS
  misc_feature: MA Experiment 108667 PARAMETER Experiment Name: At_2mM_SA_cDNA_P Parameter: Timepoint (hr) Value: 1
  misc_feature: MA Experiment 108667 PARAMETER Experiment Name: At_2mM_SA_cDNA_P Parameter: Treatment Value: 2mM SA vs. No Treatment
  misc_feature: MA Experiment ID: 20000089 Result: Up-regulated in Transcription
  misc_feature: MA Experiment ID: 20000173 Result: Down-regulated in Transcription
  misc_feature: MA Experiment 20000173 PARAMETER Experiment Name: At_42deg_Heat_P Parameter: Age (day) Value: 14
  misc_feature: MA Experiment 20000173 PARAMETER Experiment Name: At_42deg_Heat_P Parameter: Organism Value: A. thaliana
  misc_feature: MA Experiment 20000173 PARAMETER Experiment Name: At_42deg_Heat_P Parameter: Plant Line Value: WS
  misc_feature: MA Experiment 20000173 PARAMETER Experiment Name: At_42deg_Heat_P Parameter: Temperature (deg C) Value: 42 vs. 22
  misc_feature: MA Experiment 20000173 PARAMETER Experiment Name: At_42deg_Heat_P Parameter: Timepoint (hr) Value: 6
  misc_feature: MA Experiment 20000173 PARAMETER Experiment Name: At_42deg_Heat_P Parameter: Tissue Value: Aerial
  misc_feature: MA Experiment ID: 20000180 Result: Up-regulated in Transcription
  misc_feature: MA Experiment 20000180 PARAMETER Experiment Name: At_Germinating_Seeds_P Parameter: Age (hr) Value: 24 vs. 0
  misc_feature: MA Experiment 20000180 PARAMETER Experiment Name: At_Germinating_Seeds_P Parameter: Tissue Value: Germinating Seeds
  misc_feature: MA Experiment ID: 20000182 Result: Up-regulated in Transcription
  misc_feature: MA Experiment 20000182 PARAMETER Experiment Name: At_2mM_SA_P Parameter: Age (day) Value: 14
  misc_feature: MA Experiment 20000182 PARAMETER Experiment Name: At_2mM_SA_P Parameter: Organism Value: A. thaliana
  misc_feature: MA Experiment 20000182 PARAMETER Experiment Name: At_2mM_SA_P Parameter: Plant Line Value: WS
  misc_feature: MA Experiment 20000182 PARAMETER Experiment Name: At_2mM_SA_P Parameter: Timepoint (hr) Value: 6
  misc_feature: MA Experiment 20000182 PARAMETER Experiment Name: At_2mM_SA_P Parameter: Tissue Value: Aerial
  misc_feature: MA Experiment 20000182 PARAMETER Experiment Name: At_2mM_SA_P Parameter: Treatment Value: 2mM SA vs. No Treatment
  misc_feature: MA Experiment ID: 20000185 Result: Up-regulated in Transcription
  misc_feature: MA Experiment 20000185 PARAMETER Experiment Name: At_Roots__P Parameter: Age (day) Value: 7 vs. 21
  misc_feature: MA Experiment 20000185 PARAMETER Experiment Name: At_Roots__P Parameter: Organism Value: A. thaliana
  misc_feature: MA Experiment 20000185 PARAMETER Experiment Name: At_Roots__P Parameter: Tissue Value: Roots vs. Whole Plant
  misc_feature: MA Experiment ID: 20000224 Result: Up-regulated in Transcription
  misc_feature: MA Experiment ID: 20000227 Result: Up-regulated in Transcription
  misc_feature: MA Experiment 20000227 PARAMETER Experiment Name: At_Root-Tips-vs-Tops_P Parameter: Tissue Value: Root Tips vs. Root Tops
  misc_feature: MA Experiment ID: 20000234 Result: Up-regulated in Transcription
  misc_feature: MA Experiment 20000234 PARAMETER Experiment Name: At_Siliques_P Parameter: Age (day) Value: 21
  misc_feature: MA Experiment 20000234 PARAMETER Experiment Name: At_Siliques_P Parameter: Organism Value: A. thaliana
  misc_feature: MA Experiment 20000234 PARAMETER Experiment Name: At_Siliques_P Parameter: Plant Line Value: WS
  misc_feature: MA Experiment 20000234 PARAMETER Experiment Name: At_Siliques_P Parameter: Tissue Value: Less Than 5mm Siliques vs. Whole Plant
  misc_feature: MA Experiment ID: 20000264 Result: Up-regulated in Transcription
  misc_feature: MA Experiment 20000264 PARAMETER Experiment Name: At_Open_Flower_P Parameter: Age (day) Value: 21
  misc_feature: MA Experiment 20000264 PARAMETER Experiment Name: At_Open_Flower_P Parameter: Plant Line Value: WS
  misc_feature: MA Experiment 20000264 PARAMETER Experiment Name: At_Open_Flower_P Parameter: Tissue Value: Open Flower vs. Whole Plant
  misc_feature: MA Experiment ID: 20000437 Result: Down-regulated in Transcription
  misc_feature: MA Experiment 20000437 PARAMETER Experiment Name: At_Drought_P Parameter: Age (day) Value: 8
  misc_feature: MA Experiment 20000437 PARAMETER Experiment Name: At_Drought_P Parameter: Organism Value: A. thaliana
  misc_feature: MA Experiment 20000437 PARAMETER Experiment Name: At_Drought_P Parameter: Plant Line Value: WS
  misc_feature: MA Experiment 20000437 PARAMETER Experiment Name: At_Drought_P Parameter: Timepoint (hr) Value: 24
  misc_feature: MA Experiment 20000437 PARAMETER Experiment Name: At_Drought_P Parameter: Tissue Value: Whole Plant
  misc_feature: MA Experiment 20000437 PARAMETER Experiment Name: At_Drought_P Parameter: Treatment Value: Drought vs. No Drought
  misc_feature: MA Experiment ID: 20000439 Result: Up-regulated in Transcription
  misc_feature: MA Experiment 20000439 PARAMETER Experiment Name: At_Roots__P Parameter: Age (day) Value: 14 vs. 21
  misc_feature: MA Experiment 20000439 PARAMETER Experiment Name: At_Roots__P Parameter: Organism Value: A. thaliana
  misc_feature: MA Experiment 20000439 PARAMETER Experiment Name: At_Roots__P Parameter: Tissue Value: Roots vs. Whole Plant
  misc_feature: MA Experiment ID: 20000495 Result: Up-regulated in Transcription
  misc_feature: MA Experiment 20000495 PARAMETER Experiment Name: At_Guard_Cells_P Parameter: Harvest Date Value: 8/2/2002
  misc_feature: MA Experiment 20000495 PARAMETER Experiment Name: At_Guard_Cells_P Parameter: Organism Value: A. thaliana
  misc_feature: MA Experiment 20000495 PARAMETER Experiment Name: At_Guard_Cells_P Parameter: Tissue Value: Guard Cells vs. Leaves
  misc_feature: MA Experiment ID: 20000527 Result: Down-regulated in Transcription
  misc_feature: MA Experiment 20000527 PARAMETER Experiment Name: At_10percent_PEG_P Parameter: Age (day) Value: 20
  misc_feature: MA Experiment 20000527 PARAMETER Experiment Name: At_10percent_PEG_P Parameter: Organism Value: A. thaliana
  misc_feature: MA Experiment 20000527 PARAMETER Experiment Name: At_10percent_PEG_P Parameter: Plant Line Value: WS
  misc_feature: MA Experiment 20000527 PARAMETER Experiment Name: At_10percent_PEG_P Parameter: Timepoint (day) Value: 20
  misc_feature: MA Experiment 20000527 PARAMETER Experiment Name: At_10percent_PEG_P Parameter: Tissue Value: Whole Plant
  misc_feature: MA Experiment 20000527 PARAMETER Experiment Name: At_10percent_PEG_P Parameter: Treatment Value: 10percent PEG vs. No Treatment
  misc_feature: MA Experiment ID: 20000709 Result: Up-regulated in Transcription
  misc_feature: MA Experiment 20000709 PARAMETER Experiment Name: At_15mM_NH4NO3_L-to-H_P Parameter: Age (hr) Value: 14
  misc_feature: MA Experiment 20000709 PARAMETER Experiment Name: At_15mM_NH4NO3_L-to-H_P Parameter: Organism Value: A. thaliana
  misc_feature: MA Experiment 20000709 PARAMETER Experiment Name: At_15mM_NH4NO3_L-to-H_P Parameter: Plant Line Value: WS
  misc_feature: MA Experiment 20000709 PARAMETER Experiment Name: At_15mM_NH4NO3_L-to-H_P Parameter: Timepoint (hr) Value: 4
  misc_feature: MA Experiment 20000709 PARAMETER Experiment Name: At_15mM_NH4NO3_L-to-H_P Parameter: Tissue Value: Aerial
  misc_feature: MA Experiment 20000709 PARAMETER Experiment Name: At_15mM_NH4NO3_L-to-H_P Parameter: Treatment Value: 15mM NH4NO3 vs. 30mM Mannitol
  misc_feature: MA Experiment ID: 20000794 Result: Up-regulated in Transcription
  misc_feature: MA Experiment 20000794 PARAMETER Experiment Name: At_Petals_P Parameter: Age (day) Value: 23-25 days
  misc_feature: MA Experiment 20000794 PARAMETER Experiment Name: At_Petals_P Parameter: Plant Line Value: WS
  misc_feature: MA Experiment 20000794 PARAMETER Experiment Name: At_Petals_P Parameter: Tissue Value: Petals vs. Whole plant
  misc_feature: MA Experiment ID: 20001557 Result: Up-regulated in Transcription
  misc_feature: MA Experiment 20001557 PARAMETER Experiment Name: At_Drought_Soil_Dry_P Parameter: Age (day) Value: 27
  misc_feature: MA Experiment 20001557 PARAMETER Experiment Name: At_Drought_Soil_Dry_P Parameter: Organism Value: A. thaliana
  misc_feature: MA Experiment 20001557 PARAMETER Experiment Name: At_Drought_Soil_Dry_P Parameter: Plant Line Value: WS
  misc_feature: MA Experiment 20001557 PARAMETER Experiment Name: At_Drought_Soil_Dry_P Parameter: Post Timepoint (hr) Value: 3
  misc_feature: MA Experiment 20001557 PARAMETER Experiment Name: At_Drought_Soil_Dry_P Parameter: Post-Treatment Value: Re-Water vs. No Drought
  misc_feature: MA Experiment 20001557 PARAMETER Experiment Name: At_Drought_Soil_Dry_P Parameter: Timepoint (day) Value: 13
  misc_feature: MA Experiment 20001557 PARAMETER Experiment Name: At_Drought_Soil_Dry_P Parameter: Treatment Value: Drought vs. No Drought
  misc_feature: MA Experiment ID: 20001560 Result: Up-regulated in Transcription
  misc_feature: MA Experiment 20001560 PARAMETER Experiment Name: At_Drought_Soil_Dry_P Parameter: Age (day) Value: 28
  misc_feature: MA Experiment 20001560 PARAMETER Experiment Name: At_Drought_Soil_Dry_P Parameter: Organism Value: A. thaliana
  misc_feature: MA Experiment 20001560 PARAMETER Experiment Name: At_Drought_Soil_Dry_P Parameter: Plant Line Value: WS
  misc_feature: MA Experiment 20001560 PARAMETER Experiment Name: At_Drought_Soil_Dry_P Parameter: Post Timepoint (hr) Value: None
  misc_feature: MA Experiment 20001560 PARAMETER Experiment Name: At_Drought_Soil_Dry_P Parameter: Post-Treatment Value: None
  misc_feature: MA Experiment 20001560 PARAMETER Experiment Name: At_Drought_Soil_Dry_P Parameter: Timepoint (day) Value: 14
  misc_feature: MA Experiment 20001560 PARAMETER Experiment Name: At_Drought_Soil_Dry_P Parameter: Treatment Value: Drought vs. No Drought
  misc_feature: MA Experiment ID: 20001757 Result: Down-regulated in Transcription
  misc_feature: MA Experiment 20001757 PARAMETER Experiment Name: At_50mM_NH4NO3_L-to-H_P Parameter: Timepoint (hr) Value: 6
  misc_feature: MA Experiment 20001757 PARAMETER Experiment Name: At_50mM_NH4NO3_L-to-H_P Parameter: Tissue Value: Leaf
  misc_feature: MA Experiment 20001757 PARAMETER Experiment Name: At_50mM_NH4NO3_L-to-H_P Parameter: Treatment Value: 50mM NH4NO3 vs 100mM Mannitol
aatcagaaaaaggagagaaagaaaagaagaagcaaaacagagagaaaatggcaggattgtttgataaacaagccgatctataccttgacgccagacctaattacccctctgagtggttctcgaagctcgctgatctcaccgatcaccacggtttagcctgggatgctgccaccggaaatggccaagcagctctcgccgttgcagagcattacgagagtgtcgtagcaacggacgtgagtgaatcgcagctgaagctagcaacgccacatccgaaaatcaattatcgccttacgccgacgtcaatgaccgacgacgagctagtggaattaatcggaggagaaaactcagtagatctaatcacggtcgcccaaggcgtacactggttcgatctccctaggttctactcagtggccacacgactcctccgtaaaccaggcggaatcatcgctgtctggggatacaacgacgtcatagtgagtccagagttcgacgccgtccagtatcggctccacgccacaacgctgccgttttggaagtatccgtacattcagcacatcttcgattcgtacgaagcattgccgtttcctttcgaaaatgttgggatgggatcagaaggggagccattaaagctggagatgcctaaaacgacgtcgtttgaagggatcataaggatgtttaaatcatggtcggctatcgtcacggcgagagagaaaggcgtcgagttgttaccggagagtttggtgagagagcttgaaaccgcttggggaggttctgatctggttcgttccgtcgtttacaaagcttttatgattgcaggaaaagttagagtttgatatcaccaaaccatgattgattgttgttctcatttgagtttatttataaaaattggttatattgcaaaaattccc

SEQ ID NO: 30951 - protein, 276 aa, Arabidopsis thaliana
  peptide (1)..(276): Ceres Seq. ID no. 12396501
  misc_feature (16)..(274): Homolog of NCBI NO: 15227331 NR Description: putative embryo-abundant protein
  misc_feature (16)..(261): Homolog of NCBI NO: 34912212 NR Description: P0415C01.8 [Oryza sativa (japonica
  misc_feature (16)..(276): Homolog of NCBI NO: 34910604 NR Description: putative embryonic abundant protein-like
  misc_feature (15)..(274): Homolog of NCBI NO: 15233061 NR Description: putative protein; protein id: At3g61210.1
  misc_feature (16)..(274): Homolog of NCBI NO: 18405387 NR Description: expressed protein
  misc_feature (16)..(274): Homolog of NCBI NO: 15232436 NR Description: embryonic abundant protein -like
  misc_feature (16)..(274): Homolog of NCBI NO: 21594033 NR Description: embryonic abundant protein-like [Arabidopsis
  misc_feature (40)..(274): Homolog of NCBI NO: 20258825 NR Description: unknown protein [Arabidopsis thaliana]
  misc_feature (16)..(274): Homolog of NCBI NO: 15235684 NR Description: putative protein; protein id: At4g22530.1
  misc_feature (16)..(276): Homolog of NCBI NO: 15238280 NR Description: embryonic abundant protein -like; protein id:
SEKGEKEKKKQNREKMAGLFDKQADLYLDARPNYPSEWFSKLADLTDHHGLAWDAATGNGQAALAVAEHYESVVATDVSESQLKLATPHPKINYRLTPTSMTDDELVELIGGENSVDLITVAQGVHWFDLPRFYSVATRLLRKPGGIIAVWGYNDVIVSPEFDAVQYRLHATTLPFWKYPYIQHIFDSYEALPFPFENVGMGSEGEPLKLEMPKTTSFEGIIRMFKSWSAIVTAREKGVELLPESLVRELETAWGGSDLVRSVVYKAFMIAGKVRV

SEQ ID NO: 30952 - protein, 261 aa, Arabidopsis thaliana
  peptide (1)..(261): Ceres Seq. ID no. 12396502
  misc_feature (1)..(259): Homolog of NCBI NO: 15227331 NR Description: putative embryo-abundant protein
  misc_feature (1)..(246): Homolog of NCBI NO: 34912212 NR Description: P0415C01.8 [Oryza sativa (japonica
  misc_feature (1)..(261): Homolog of NCBI NO: 34910604 NR Description: putative embryonic abundant protein-like
  misc_feature (1)..(259): Homolog of NCBI NO: 15233061 NR Description: putative protein; protein id: At3g61210.1
  misc_feature (1)..(259): Homolog of NCBI NO: 18405387 NR Description: expressed protein
  misc_feature (1)..(259): Homolog of NCBI NO: 15232436 NR Description: embryonic abundant protein -like
  misc_feature (1)..(259): Homolog of NCBI NO: 21594033 NR Description: embryonic abundant protein-like [Arabidopsis
  misc_feature (25)..(259): Homolog of NCBI NO: 20258825 NR Description: unknown protein [Arabidopsis thaliana]
  misc_feature (1)..(259): Homolog of NCBI NO: 15235684 NR Description: putative protein; protein id: At4g22530.1
  misc_feature (1)..(261): Homolog of NCBI NO: 15238280 NR Description: embryonic abundant protein -like; protein id:
MAGLFDKQADLYLDARPNYPSEWFSKLADLTDHHGLAWDAATGNGQAALAVAEHYESVVATDVSESQLKLATPHPKINYRLTPTSMTDDELVELIGGENSVDLITVAQGVHWFDLPRFYSVATRLLRKPGGIIAVWGYNDVIVSPEFDAVQYRLHATTLPFWKYPYIQHIFDSYEALPFPFENVGMGSEGEPLKLEMPKTTSFEGIIRMFKSWSAIVTAREKGVELLPESLVRELETAWGGSDLVRSVVYKAFMIAGKVRV

SEQ ID NO: 30953 - protein, 176 aa, Arabidopsis thaliana
  peptide (1)..(176): Ceres Seq. ID no. 12396503
  misc_feature (1)..(174): Homolog of NCBI NO: 15227331 NR Description: putative embryo-abundant protein
  misc_feature (1)..(161): Homolog of NCBI NO: 34912212 NR Description: P0415C01.8 [Oryza sativa (japonica
  misc_feature (1)..(176): Homolog of NCBI NO: 34910604 NR Description: putative embryonic abundant protein-like
  misc_feature (1)..(174): Homolog of NCBI NO: 15233061 NR Description: putative protein; protein id: At3g61210.1
  misc_feature (1)..(174): Homolog of NCBI NO: 18405387 NR Description: expressed protein
  misc_feature (1)..(174): Homolog of NCBI NO: 15232436 NR Description: embryonic abundant protein -like
  misc_feature (1)..(174): Homolog of NCBI NO: 21594033 NR Description: embryonic abundant protein-like [Arabidopsis
  misc_feature (1)..(174): Homolog of NCBI NO: 20258825 NR Description: unknown protein [Arabidopsis thaliana]
  misc_feature (1)..(174): Homolog of NCBI NO: 15235684 NR Description: putative protein; protein id: At4g22530.1
  misc_feature (1)..(176): Homolog of NCBI NO: 15238280 NR Description: embryonic abundant protein -like; protein id:
MTDDELVELIGGENSVDLITVAQGVHWFDLPRFYSVATRLLRKPGGIIAVWGYNDVIVSPEFDAVQYRLHATTLPFWKYPYIQHIFDSYEALPFPFENVGMGSEGEPLKLEMPKTTSFEGIIRMFKSWSAIVTAREKGVELLPESLVRELETAWGGSDLVRSVVYKAFMIAGKVRV

SEQ ID NO: 30954 - DNA, 1300 bp, Arabidopsis thaliana
  misc_feature (1)..(1300): Ceres Seq. ID no. 12326352
  misc_feature: MA Experiment ID: 108501 Result: Down-regulated in Transcription
  misc_feature: MA Experiment 108501 PARAMETER Experiment Name: At_ap2_floral_buds_cDNA_P Parameter: Plant Line Value: ap2 (Ler.)
  misc_feature: MA Experiment 108501 PARAMETER Experiment Name: At_ap2_floral_buds_cDNA_P Parameter: Tissue Value: Closed Flower
  misc_feature: MA Experiment ID: 20000286 Result: Up-regulated in Transcription
  misc_feature: MA Experiment 20000286 PARAMETER Experiment Name: At_Open_Flower_P Parameter: Age (day) Value: 21
  misc_feature: MA Experiment 20000286 PARAMETER Experiment Name: At_Open_Flower_P Parameter: Plant Line Value: WS
  misc_feature: MA Experiment 20000286 PARAMETER Experiment Name: At_Open_Flower_P Parameter: Tissue Value: Half Open vs. Whole Plant
  misc_feature: MA Experiment ID: 20000709 Result: Down-regulated in Transcription
  misc_feature: MA Experiment 20000709 PARAMETER Experiment Name: At_15mM_NH4NO3_L-to-H_P Parameter: Age (hr) Value: 14
  misc_feature: MA Experiment 20000709 PARAMETER Experiment Name: At_15mM_NH4NO3_L-to-H_P Parameter: Organism Value: A. thaliana
  misc_feature: MA Experiment 20000709 PARAMETER Experiment Name: At_15mM_NH4NO3_L-to-H_P Parameter: Plant Line Value: WS
  misc_feature: MA Experiment 20000709 PARAMETER Experiment Name: At_15mM_NH4NO3_L-to-H_P Parameter: Timepoint (hr) Value: 4
  misc_feature: MA Experiment 20000709 PARAMETER Experiment Name: At_15mM_NH4NO3_L-to-H_P Parameter: Tissue Value: Aerial
  misc_feature: MA Experiment 20000709 PARAMETER Experiment Name: At_15mM_NH4NO3_L-to-H_P Parameter: Treatment Value: 15mM NH4NO3 vs. 30mM Mannitol
  misc_feature: MA Experiment ID: 20001910 Result: Down-regulated in Transcription
  misc_feature: MA Experiment 20001910 PARAMETER Experiment Name: At_Drought_Reproduction_P Parameter: Age (day) Value: 37
  misc_feature: MA Experiment 20001910 PARAMETER Experiment Name: At_Drought_Reproduction_P Parameter: Organism Value: A. thaliana
  misc_feature: MA Experiment 20001910 PARAMETER Experiment Name: At_Drought_Reproduction_P Parameter: Plant Line Value: WS
  misc_feature: MA Experiment 20001910 PARAMETER Experiment Name: At_Drought_Reproduction_P Parameter: Timepoint (day) Value: 7
  misc_feature: MA Experiment 20001910 PARAMETER Experiment Name: At_Drought_Reproduction_P Parameter: Tissue Value: Flowers
  misc_feature: MA Experiment 20001910 PARAMETER Experiment Name: At_Drought_Reproduction_P Parameter: Treatment Value: Drought vs. No Drought
agacccaagatttgagtcttcaacaaacagatacaaatgggaagcatcgatgccgcagtgttgggttcagagaagaaatcaaacccgggaaaagccacaattcttgctctgggaaaagcctttcctcaccagctagtaatgcaagagtacttagtcgatggctacttcaaaaccaccaagtgtgatgaccctgaactcaaacagaaacttactcgtctctgcaagacaacaacggtgaagacaaggtatgttgtgatgtcagaggagattctcaagaagtacccagaacttgccattgaaggaggatccacagtgacgcagcgtctagacatctgcaacgatgcagtgaccgagatggcagtagaagcctccagagcctgcatcaagaactggggacgttctatttccgacataactcacgttgtctatgtctcctcaagcgaagctcgtcttcctggtggggacttgtacctggccaaggggcttggactcagtcctgacacacaccgtgttctgctctactttgttggctgttctggtggcgttgcaggtctccgtgtagccaaagacatcgccgagaataatccgggcagtagagttttgcttgccacgtctgagacaaccatcattgggttcaagcccccaagtgtggatagaccgtatgatcttgttggggtcgcgttgtttggtgatggagccggagctatgatcattggatccgatccagacccgatctgcgagaagcctctctttgagcttcatactgcaatacagaactttttacctgaaacagagaagacgataagatggaaggctaacanaacaagggataaacttcaagctatcgagagagcttccacagataatagaagacaatgtggagaatttctgcaagaagctaataggaaaagcgggactggctcataagaactataaccagatgttctgggcggttcatccaggtggaccagccatcttgaaccggattgaaaagcggcttaacctgtcgcctgagaagctgagtccaagcagaagagctctcatggactatggcaatgcgagcagcaattcaattgtttatgtgctggagtatatgttggaggagagcaagaaagtgaggaacatgaatgaagaagaaaacgagtggggtctgattcttgcttttggacctggtgttacatttgaaggcattatcgctcgaaaccttgatgtctgaacaataagtttttaccttgcagatcgagaaagaaccccttatgctttaataaagacatgaagctaaacatacgaaatatttttt

SEQ ID NO: 30955 - protein, 296 aa, Arabidopsis thaliana
  peptide (1)..(296): Ceres Seq. ID no. 12326353
  misc_feature (4)..(230): Pfam Name: Chalcone and stilbene synthases, N-terminal domain Pfam Description: Chalcone and stilbene synthases, N-terminal
  misc_feature (4)..(296): Homolog of NCBI NO: 15236691 NR Description: putative chalcone synthase
  misc_feature (4)..(296): Homolog of NCBI NO: 21554288 NR Description: putative chalcone synthase [Arabidopsis thaliana]
  misc_feature (10)..(259): Homolog of NCBI NO: 7433785 NR Description: chalcone synthase homolog - rice
  misc_feature (10)..(259): Homolog of NCBI NO: 37535500 NR Description: anther-specific protein YY2
  misc_feature (25)..(256): Homolog of NCBI NO: 7433783 NR Description: anther-specific protein - wood tobacco
  misc_feature (11)..(256): Homolog of NCBI NO: 15217605 NR Description: unknown protein; protein id: At1g02050.1
  misc_feature (2)..(256): Homolog of NCBI NO: 7433790 NR Description: chalcone synthase homolog ChS1 - Monterey pine
  misc_feature (2)..(256): Homolog of NCBI NO: 34902722 NR Description: putative chalcone synthase
  misc_feature (1)..(256): Homolog of NCBI NO: 7433787 NR Description: anther-specific protein homolog T11I11.90 -
  misc_feature (1)..(256): Homolog of NCBI NO: 18418528 NR Description: chalcone synthase - like protein
  misc_feature (262)..(262): Xaa is any aa, unknown or other
MGSIDAAVLGSEKKSNPGKATILALGKAFPHQLVMQEYLVDGYFKTTKCDDPELKQKLTRLCKTTTVKTRYVVMSEEILKKYPELAIEGGSTVTQRLDICNDAVTEMAVEASRACIKNWGRSISDITHVVYVSSSEARLPGGDLYLAKGLGLSPDTHRVLLYFVGCSGGVAGLRVAKDIAENNPGSRVLLATSETTIIGFKPPSVDRPYDLVGVALFGDGAGAMIIGSDPDPICEKPLFELHTAIQNFLPETEKTIRWKANXTRDKLQAIERASTDNRRQCGEFLQEANRKSGTGS

SEQ ID NO: 30956 - protein, 262 aa, Arabidopsis thaliana
  peptide (1)..(262): Ceres Seq. ID no. 12326354
  misc_feature (1)..(196): Pfam Name: Chalcone and stilbene synthases, N-terminal domain Pfam Description: Chalcone and stilbene synthases, N-terminal
  misc_feature (1)..(262): Homolog of NCBI NO: 15236691 NR Description: putative chalcone synthase
  misc_feature (1)..(262): Homolog of NCBI NO: 21554288 NR Description: putative chalcone synthase [Arabidopsis thaliana]
  misc_feature (1)..(225): Homolog of NCBI NO: 7433785 NR Description: chalcone synthase homolog - rice
  misc_feature (1)..(225): Homolog of NCBI NO: 37535500 NR Description: anther-specific protein YY2
  misc_feature (1)..(222): Homolog of NCBI NO: 7433783 NR Description: anther-specific protein - wood tobacco
  misc_feature (1)..(222): Homolog of NCBI NO: 15217605 NR Description: unknown protein; protein id: At1g02050.1
  misc_feature (1)..(222): Homolog of NCBI NO: 7433790 NR Description: chalcone synthase homolog ChS1 - Monterey pine
  misc_feature (1)..(222): Homolog of NCBI NO: 34902722 NR Description: putative chalcone synthase
  misc_feature (1)..(222): Homolog of NCBI NO: 7433787 NR Description: anther-specific protein homolog T11I11.90 -
  misc_feature (1)..(222): Homolog of NCBI NO: 18418528 NR Description: chalcone synthase - like protein
  misc_feature (228)..(228): Xaa is any aa, unknown or other
MQEYLVDGYFKTTKCDDPELKQKLTRLCKTTTVKTRYVVMSEEILKKYPELAIEGGSTVTQRLDICNDAVTEMAVEASRACIKNWGRSISDITHVVYVSSSEARLPGGDLYLAKGLGLSPDTHRVLLYFVGCSGGVAGLRVAKDIAENNPGSRVLLATSETTIIGFKPPSVDRPYDLVGVALFGDGAGAMIIGSDPDPICEKPLFELHTAIQNFLPETEKTIRWKANXTRDKLQAIERASTDNRRQCGEFLQEANRKSGTGS

SEQ ID NO: 30957 - protein, 223 aa, Arabidopsis thaliana
  peptide (1)..(223): Ceres Seq. ID no. 12326355
  misc_feature (1)..(157): Pfam Name: Chalcone and stilbene synthases, N-terminal domain Pfam Description: Chalcone and stilbene synthases, N-terminal
  misc_feature (1)..(223): Homolog of NCBI NO: 15236691 NR Description: putative chalcone synthase
  misc_feature (1)..(223): Homolog of NCBI NO: 21554288 NR Description: putative chalcone synthase [Arabidopsis thaliana]
  misc_feature (1)..(186): Homolog of NCBI NO: 7433785 NR Description: chalcone synthase homolog - rice
  misc_feature (1)..(186): Homolog of NCBI NO: 37535500 NR Description: anther-specific protein YY2
  misc_feature (1)..(183): Homolog of NCBI NO: 7433783 NR Description: anther-specific protein - wood tobacco
  misc_feature (1)..(183): Homolog of NCBI NO: 15217605 NR Description: unknown protein; protein id: At1g02050.1
  misc_feature (1)..(183): Homolog of NCBI NO: 7433790 NR Description: chalcone synthase homolog ChS1 - Monterey pine
  misc_feature (1)..(183): Homolog of NCBI NO: 34902722 NR Description: putative chalcone synthase
  misc_feature (1)..(183): Homolog of NCBI NO: 7433787 NR Description: anther-specific protein homolog T11I11.90 -
  misc_feature (1)..(183): Homolog of NCBI NO: 18418528 NR Description: chalcone synthase - like protein
  misc_feature (189)..(189): Xaa is any aa, unknown or other
MSEEILKKYPELAIEGGSTVTQRLDICNDAVTEMAVEASRACIKNWGRSISDITHVVYVSSSEARLPGGDLYLAKGLGLSPDTHRVLLYFVGCSGGVAGLRVAKDIAENNPGSRVLLATSETTIIGFKPPSVDRPYDLVGVALFGDGAGAMIIGSDPDPICEKPLFELHTAIQNFLPETEKTIRWKANXTRDKLQAIERASTDNRRQCGEFLQEANRKSGTGS

SEQ ID NO: 30958 - DNA, 1512 bp, Arabidopsis thaliana
  misc_feature (1)..(1512): Ceres Seq. ID no. 13591994
  misc_feature: MA Experiment ID: 108461 Result: Up-regulated in Transcription
  misc_feature: MA Experiment 108461 PARAMETER Experiment Name: At_Germinating_Seeds_cDNA_P Parameter: Age (day) Value: 1 vs. 0
  misc_feature: MA Experiment 108461 PARAMETER Experiment Name: At_Germinating_Seeds_cDNA_P Parameter: Tissue Value: Germinating Seeds
  misc_feature: MA Experiment ID: 20000173 Result: Down-regulated in Transcription
  misc_feature: MA Experiment 20000173 PARAMETER Experiment Name: At_42deg_Heat_P Parameter: Age (day) Value: 14
  misc_feature: MA Experiment 20000173 PARAMETER Experiment Name: At_42deg_Heat_P Parameter: Organism Value: A. thaliana
  misc_feature: MA Experiment 20000173 PARAMETER Experiment Name: At_42deg_Heat_P Parameter: Plant Line Value: WS
  misc_feature: MA Experiment 20000173 PARAMETER Experiment Name: At_42deg_Heat_P Parameter: Temperature (deg C) Value: 42 vs. 22
  misc_feature: MA Experiment 20000173 PARAMETER Experiment Name: At_42deg_Heat_P Parameter: Timepoint (hr) Value: 6
  misc_feature: MA Experiment 20000173 PARAMETER Experiment Name: At_42deg_Heat_P Parameter: Tissue Value: Aerial
  misc_feature: MA Experiment ID: 20000180 Result: Up-regulated in Transcription
  misc_feature: MA Experiment 20000180 PARAMETER Experiment Name: At_Germinating_Seeds_P Parameter: Age (hr) Value: 24 vs. 0
  misc_feature: MA Experiment 20000180 PARAMETER Experiment Name: At_Germinating_Seeds_P Parameter: Tissue Value: Germinating Seeds
  misc_feature: MA Experiment ID: 20000185 Result: Down-regulated in Transcription
  misc_feature: MA Experiment 20000185 PARAMETER Experiment Name: At_Roots__P Parameter: Age (day) Value: 7 vs. 21
  misc_feature: MA Experiment 20000185 PARAMETER Experiment Name: At_Roots__P Parameter: Organism Value: A. thaliana
  misc_feature: MA Experiment 20000185 PARAMETER Experiment Name: At_Roots__P Parameter: Tissue Value: Roots vs. Whole Plant
  misc_feature: MA Experiment ID: 20000224 Result: Down-regulated in Transcription
  misc_feature: MA Experiment ID: 20000439 Result: Down-regulated in Transcription
  misc_feature: MA Experiment 20000439 PARAMETER Experiment Name: At_Roots__P Parameter: Age (day) Value: 14 vs. 21
  misc_feature: MA Experiment 20000439 PARAMETER Experiment Name: At_Roots__P Parameter: Organism Value: A. thaliana
  misc_feature: MA Experiment 20000439 PARAMETER Experiment Name: At_Roots__P Parameter: Tissue Value: Roots vs. Whole Plant
  misc_feature: MA Experiment ID: 20000573 Result: Down-regulated in Transcription
  misc_feature: MA Experiment 20000573 PARAMETER Experiment Name: At_100uM_ABA_Mutants__P Parameter: Organism Value: A. thaliana
  misc_feature: MA Experiment 20000573 PARAMETER Experiment Name: At_100uM_ABA_Mutants__P Parameter: Plant Line Value: CS22 vs. Ler wt
  misc_feature: MA Experiment 20000573 PARAMETER Experiment Name: At_100uM_ABA_Mutants__P Parameter: Timepoint (hr) Value: N/A
  misc_feature: MA Experiment 20000573 PARAMETER Experiment Name: At_100uM_ABA_Mutants__P Parameter: Tissue Value: Whole Plant
  misc_feature: MA Experiment 20000573 PARAMETER Experiment Name: At_100uM_ABA_Mutants__P Parameter: Treatment Value: None
  misc_feature: MA Experiment ID: 20000794 Result: Down-regulated in Transcription
  misc_feature: MA Experiment 20000794 PARAMETER Experiment Name: At_Petals_P Parameter: Age (day) Value: 23-25 days
  misc_feature: MA Experiment 20000794 PARAMETER Experiment Name: At_Petals_P Parameter: Plant Line Value: WS
  misc_feature: MA Experiment 20000794 PARAMETER Experiment Name: At_Petals_P Parameter: Tissue Value: Petals vs. Whole plant
  misc_feature: MA Experiment ID: 20001906 Result: Down-regulated in Transcription
  misc_feature: MA Experiment 20001906 PARAMETER Experiment Name: At_Drought_Reproduction_P Parameter: Age (day) Value: 35
  misc_feature: MA Experiment 20001906 PARAMETER Experiment Name: At_Drought_Reproduction_P Parameter: Organism Value: A. thaliana
  misc_feature: MA Experiment 20001906 PARAMETER Experiment Name: At_Drought_Reproduction_P Parameter: Plant Line Value: WS
  misc_feature: MA Experiment 20001906 PARAMETER Experiment Name: At_Drought_Reproduction_P Parameter: Timepoint (day) Value: 5
  misc_feature: MA Experiment 20001906 PARAMETER Experiment Name: At_Drought_Reproduction_P Parameter: Tissue Value: Siliques
  misc_feature: MA Experiment 20001906 PARAMETER Experiment Name: At_Drought_Reproduction_P Parameter: Treatment Value: Drought vs. No Drought
  misc_feature: MA Experiment ID: 20001911 Result: Down-regulated in Transcription
  misc_feature: MA Experiment 20001911 PARAMETER Experiment Name: At_Drought_Reproduction_P Parameter: Age (day) Value: 40
  misc_feature: MA Experiment 20001911 PARAMETER Experiment Name: At_Drought_Reproduction_P Parameter: Organism Value: A. thaliana
  misc_feature: MA Experiment 20001911 PARAMETER Experiment Name: At_Drought_Reproduction_P Parameter: Plant Line Value: WS
  misc_feature: MA Experiment 20001911 PARAMETER Experiment Name: At_Drought_Reproduction_P Parameter: Timepoint (day) Value: 10
  misc_feature: MA Experiment 20001911 PARAMETER Experiment Name: At_Drought_Reproduction_P Parameter: Tissue Value: Flowers
  misc_feature: MA Experiment 20001911 PARAMETER Experiment Name: At_Drought_Reproduction_P Parameter: Treatment Value: Drought vs. No Drought
gagatttatatagagagaaaaaaactatggctcacataaagatctaacagagacagtagtatagtcccacttccccaccaccaaagcttcgatcatcatcatcatcatcatcatggatccggatccggatcataaccatcgacccaacttccctctccagcttcttgattcttctacctcctcctcttccacttccttagccatcatctctactacttccgaacctaactccgaacctaagaagcctcctcctaaacgaacctctactaaagaccgacacaccaaagtcgaaggccgaggccgtcggatccgtatgcctgccatgtgtgctgcacgtgtctttcagctcacacgtgagcttggtcacaaatccgacggtgaaactattgagtggctactccaacaagcagaaccagcggttatagccgctacagggactggaaccattccggctaacttcacttctttaaacatctcacttcgtagctcaagatcttctctctctgctgctcatcttcgtacaactcctagtagctattactttcattcaccacatcagtccatgactcatcatcttcaacatcagcatcaggttcgtcccaagaacgagtcacattcttcgtcttcttcttcttcacagcttttagatcacaaccaaatgggtaactatctagtacaatcaactgctggatctttacctacgagtcagagtcctgcaacggcaccgttttggagtagtggtgacaacacacagaatctttgggcttttaatattaatcctcatcattccggtgttgtcgccggagatgtttacaaccccaacagtggtggtagtggcggcggtagtggagttcatttgatgaattttgcagctcctattgctttgttttctggacagcctttggcttctggttatggaggaggaggaggtggcggtggagaacatagccattatggagttttagcggcgttgaatgctgcttaccgaccggtggcggagacggggaaccataacaacaaccagcaaaaccgtgacggagatcatcatcacaaccatcaagaagatggaagcaccagtcatcattcctaggcaaacatacacaaacaaatatattctgtgagatttatttttctttttttgtcctttcgtttgtttgtttgttcttaacaagcgtgttttttttgcattgcttctttttcatatatttttatttatttctaaattctaatattctacggatttcatcttgtttatttttctgattaatgtattgagtaagtaattaagaacctgataatcgatatgttttagtttgtggtttttgcatgcaaggctttggttttattattctagagatttttgcttgaagtagttgtcttgtgaaatgttttcctcattactattgagtgtgagagttttctaatacttgattagggtttttgaacaatttttatatatgtatattaattcagtacggattatcaataaattatttcgcatgccaaattatt

SEQ ID NO: 30959 - protein, 325 aa, Arabidopsis thaliana
  peptide (1)..(325): Ceres Seq. ID no. 13591995
  misc_feature (41)..(228): Pfam Name: TCP family transcription factor Pfam Description: TCP family transcription factor
  misc_feature (41)..(228): Pfam Name: TCP family transcription factor Pfam Description: TCP family transcription factor
  misc_feature (26)..(138): Homolog of NCBI NO: 26452377 NR Description: unknown protein [Arabidopsis thaliana]
  misc_feature (26)..(138): Homolog of NCBI NO: 15237274 NR Description: TCP family transcription factor, putative
  misc_feature (52)..(176): Homolog of NCBI NO: 20975251 NR Description: transcription factor PCF3 [Oryza sativa (japonica
  misc_feature (16)..(160): Homolog of NCBI NO: 15217857 NR Description: TCP family transcription factor, putative
  misc_feature (20)..(183): Homolog of NCBI NO: 15218305 NR Description: TCP family transcription factor, putative
  misc_feature (26)..(138): Homolog of NCBI NO: 26452377 NR Description: unknown protein [Arabidopsis thaliana]
  misc_feature (52)..(176): Homolog of NCBI NO: 20975251 NR Description: transcription factor PCF3 [Oryza sativa (japonica
  misc_feature (20)..(183): Homolog of NCBI NO: 15218305 NR Description: TCP family transcription factor, putative
  misc_feature (1)..(325): Homolog of NCBI NO: 18409345 NR Description: TCP family transcription factor, putative
  misc_feature (13)..(175): Homolog of NCBI NO: 5731257 NR Description: auxin-induced basic helix-loop-helix
  misc_feature (7)..(160): Homolog of NCBI NO: 11357581 NR Description: hypothetical protein F1P2.170 - Arabidopsis
  misc_feature (7)..(160): Homolog of NCBI NO: 22331641 NR Description: TCP family transcription factor, putative
  misc_feature (21)..(244): Homolog of NCBI NO: 15219640 NR Description: TCP family transcription factor, putative
  misc_feature (16)..(160): Homolog of NCBI NO: 15217857 NR Description: TCP family transcription factor, putative
  misc_feature (26)..(138): Homolog of NCBI NO: 15237274 NR Description: TCP family transcription factor, putative
  misc_feature (21)..(244): Homolog of NCBI NO: 15219640 NR Description: TCP family transcription factor, putative
  misc_feature (7)..(160): Homolog of NCBI NO: 22331641 NR Description: TCP family transcription factor, putative
  misc_feature (7)..(160): Homolog of NCBI NO: 11357581 NR Description: hypothetical protein F1P2.170 - Arabidopsis
  misc_feature (13)..(175): Homolog of NCBI NO: 5731257 NR Description: auxin-induced basic helix-loop-helix
  misc_feature (1)..(325): Homolog of NCBI NO: 18409345 NR Description: TCP family transcription factor, putative
MDPDPDHNHRPNFPLQLLDSSTSSSSTSLAIISTTSEPNSEPKKPPPKRTSTKDRHTKVEGRGRRIRMPAMCAARVFQLTRELGHKSDGETIEWLLQQAEPAVIAATGTGTIPANFTSLNISLRSSRSSLSAAHLRTTPSSYYFHSPHQSMTHHLQHQHQVRPKNESHSSSSSSSQLLDHNQMGNYLVQSTAGSLPTSQSPATAPFWSSGDNTQNLWAFNINPHHSGVVAGDVYNPNSGGSGGGSGVHLMNFAAPIALFSGQPLASGYGGGGGGGGEHSHYGVLAALNAAYRPVAETGNHNNNQQNRDGDHHHNHQEDGSTSHHS

SEQ ID NO: 30960 - protein, 258 aa, Arabidopsis thaliana
  peptide (1)..(258): Ceres Seq. ID no. 13591996
  misc_feature (1)..(161): Pfam Name: TCP family transcription factor Pfam Description: TCP family transcription factor
  misc_feature (1)..(161): Pfam Name: TCP family transcription factor Pfam Description: TCP family transcription factor
  misc_feature (1)..(71): Homolog of NCBI NO: 26452377 NR Description: unknown protein [Arabidopsis thaliana]
  misc_feature (1)..(71): Homolog of NCBI NO: 15237274 NR Description: TCP family transcription factor, putative
  misc_feature (1)..(109): Homolog of NCBI NO: 20975251 NR Description: transcription factor PCF3 [Oryza sativa (japonica
  misc_feature (1)..(93): Homolog of NCBI NO: 15217857 NR Description: TCP family transcription factor, putative
  misc_feature (1)..(116): Homolog of NCBI NO: 15218305 NR Description: TCP family transcription factor, putative
  misc_feature (1)..(71): Homolog of NCBI NO: 26452377 NR Description: unknown protein [Arabidopsis thaliana]
  misc_feature (1)..(109): Homolog of NCBI NO: 20975251 NR Description: transcription factor PCF3 [Oryza sativa (japonica
  misc_feature (1)..(116): Homolog of NCBI NO: 15218305 NR Description: TCP family transcription factor, putative
  misc_feature (1)..(258): Homolog of NCBI NO: 18409345 NR Description: TCP family transcription factor, putative
  misc_feature (1)..(108): Homolog of NCBI NO: 5731257 NR Description: auxin-induced basic helix-loop-helix
  misc_feature (1)..(93): Homolog of NCBI NO: 11357581 NR Description: hypothetical protein F1P2.170 - Arabidopsis
  misc_feature (1)..(93): Homolog of NCBI NO: 22331641 NR Description: TCP family transcription factor, putative
  misc_feature (1)..(177): Homolog of NCBI NO: 15219640 NR Description: TCP family transcription factor, putative
  misc_feature (1)..(93): Homolog of NCBI NO: 15217857 NR Description: TCP family transcription factor, putative
  misc_feature (1)..(71): Homolog of NCBI NO: 15237274 NR Description: TCP family transcription factor, putative
  misc_feature (1)..(177): Homolog of NCBI NO: 15219640 NR Description: TCP family transcription factor, putative
  misc_feature (1)..(93): Homolog of NCBI NO: 22331641 NR Description: TCP family transcription factor, putative
  misc_feature (1)..(93): Homolog of NCBI NO: 11357581 NR Description: hypothetical protein F1P2.170 - Arabidopsis
  misc_feature (1)..(108): Homolog of NCBI NO: 5731257 NR Description: auxin-induced basic helix-loop-helix
  misc_feature (1)..(258): Homolog of NCBI NO: 18409345 NR Description: TCP family transcription factor, putative
MPAMCAARVFQLTRELGHKSDGETIEWLLQQAEPAVIAATGTGTIPANFTSLNISLRSSRSSLSAAHLRTTPSSYYFHSPHQSMTHHLQHQHQVRPKNESHSSSSSSSQLLDHNQMGNYLVQSTAGSLPTSQSPATAPFWSSGDNTQNLWAFNINPHHSGVVAGDVYNPNSGGSGGGSGVHLMNFAAPIALFSGQPLASGYGGGGGGGGEHSHYGVLAALNAAYRPVAETGNHNNNQQNRDGDHHHNHQEDGSTSHHS

SEQ ID NO: 30961 - protein, 255 aa, Arabidopsis thaliana
  peptide (1)..(255): Ceres Seq. ID no. 13591997
  misc_feature (1)..(158): Pfam Name: TCP family transcription factor Pfam Description: TCP family transcription factor
  misc_feature (1)..(158): Pfam Name: TCP family transcription factor Pfam Description: TCP family transcription factor
  misc_feature (1)..(68): Homolog of NCBI NO: 26452377 NR Description: unknown protein [Arabidopsis thaliana]
  misc_feature (1)..(68): Homolog of NCBI NO: 15237274 NR Description: TCP family transcription factor, putative
  misc_feature (1)..(106): Homolog of NCBI NO: 20975251 NR Description: transcription factor PCF3 [Oryza sativa (japonica
  misc_feature (1)..(90): Homolog of NCBI NO: 15217857 NR Description: TCP family transcription factor, putative
  misc_feature (1)..(113): Homolog of NCBI NO: 15218305 NR Description: TCP family transcription factor, putative
  misc_feature (1)..(68): Homolog of NCBI NO: 26452377 NR Description: unknown protein [Arabidopsis thaliana]
  misc_feature (1)..(106): Homolog of NCBI NO: 20975251 NR Description: transcription factor PCF3 [Oryza sativa (japonica
  misc_feature (1)..(113): Homolog of NCBI NO: 15218305 NR Description: TCP family transcription factor, putative
  misc_feature (1)..(255): Homolog of NCBI NO: 18409345 NR Description: TCP family transcription factor, putative
  misc_feature (1)..(105): Homolog of NCBI NO: 5731257 NR Description: auxin-induced basic helix-loop-helix
  misc_feature (1)..(90): Homolog of NCBI NO: 11357581 NR Description: hypothetical protein F1P2.170 - Arabidopsis
  misc_feature (1)..(90): Homolog of NCBI NO: 22331641 NR Description: TCP family transcription factor, putative
  misc_feature (1)..(174): Homolog of NCBI NO: 15219640 NR Description: TCP family transcription factor, putative
  misc_feature (1)..(90): Homolog of NCBI NO: 15217857 NR Description: TCP family transcription factor, putative
  misc_feature (1)..(68): Homolog of NCBI NO: 15237274 NR Description: TCP family transcription factor, putative
  misc_feature (1)..(174): Homolog of NCBI NO: 15219640 NR Description: TCP family transcription factor, putative
  misc_feature (1)..(90): Homolog of NCBI NO: 22331641 NR Description: TCP family transcription factor, putative
  misc_feature (1)..(90): Homolog of NCBI NO: 11357581 NR Description: hypothetical protein F1P2.170 - Arabidopsis
  misc_feature (1)..(105): Homolog of NCBI NO: 5731257 NR Description: auxin-induced basic helix-loop-helix
  misc_feature (1)..(255): Homolog of NCBI NO: 18409345 NR Description: TCP family transcription factor, putative
MCAARVFQLTRELGHKSDGETIEWLLQQAEPAVIAATGTGTIPANFTSLNISLRSSRSSLSAAHLRTTPSSYYFHSPHQSMTHHLQHQHQVRPKNESHSSSSSSSQLLDHNQMGNYLVQSTAGSLPTSQSPATAPFWSSGDNTQNLWAFNINPHHSGVVAGDVYNPNSGGSGGGSGVHLMNFAAPIALFSGQPLASGYGGGGGGGGEHSHYGVLAALNAAYRPVAETGNHNNNQQNRDGDHHHNHQEDGSTSHHS

SEQ ID NO: 30962 - DNA, 1232 bp, Arabidopsis thaliana
  misc_feature (1)..(1232): Ceres Seq. ID no. 12324969
  misc_feature: MA Experiment ID: 108434 Result: Up-regulated in Transcription
  misc_feature: MA Experiment 108434 PARAMETER Experiment Name: At_Root_Tips_cDNA_P Parameter: Tissue Value: Root Tips
  misc_feature: MA Experiment ID: 108435 Result: Up-regulated in Transcription
  misc_feature: MA Experiment 108435 PARAMETER Experiment Name: At_stm_Mutants_cDNA_P Parameter: Plant Line Value: wt Landsburg vs stm
  misc_feature: MA Experiment 108435 PARAMETER Experiment Name: At_stm_Mutants_cDNA_P Parameter: Tissue Value: Shoot Apical Meristem Region
  misc_feature: MA Experiment ID: 108461 Result: Down-regulated in Transcription
  misc_feature: MA Experiment 108461 PARAMETER Experiment Name: At_Germinating_Seeds_cDNA_P Parameter: Age (day) Value: 1 vs. 0
  misc_feature: MA Experiment 108461 PARAMETER Experiment Name: At_Germinating_Seeds_cDNA_P Parameter: Tissue Value: Germinating Seeds
  misc_feature: MA Experiment ID: 108462 Result: Down-regulated in Transcription
  misc_feature: MA Experiment 108462 PARAMETER Experiment Name: At_Germinating_Seeds_cDNA_P Parameter: Age (day) Value: 2 vs. 0
  misc_feature: MA Experiment 108462 PARAMETER Experiment Name: At_Germinating_Seeds_cDNA_P Parameter: Tissue Value: Germinating Seeds
  misc_feature: MA Experiment ID: 108463 Result: Down-regulated in Transcription
  misc_feature: MA Experiment 108463 PARAMETER Experiment Name: At_Germinating_Seeds_cDNA_P Parameter: Age (day) Value: 3 vs. 0
  misc_feature: MA Experiment 108463 PARAMETER Experiment Name: At_Germinating_Seeds_cDNA_P Parameter: Tissue Value: Germinating Seeds
  misc_feature: MA Experiment ID: 108464 Result: Down-regulated in Transcription
  misc_feature: MA Experiment 108464 PARAMETER Experiment Name: At_Germinating_Seeds_cDNA_P Parameter: Age (day) Value: 4 vs. 0
  misc_feature: MA Experiment 108464 PARAMETER Experiment Name: At_Germinating_Seeds_cDNA_P Parameter: Tissue Value: Germinating Seeds
  misc_feature: MA Experiment ID: 20000180 Result: Down-regulated in Transcription
  misc_feature: MA Experiment 20000180 PARAMETER Experiment Name: At_Germinating_Seeds_P Parameter: Age (hr) Value: 24 vs. 0
  misc_feature: MA Experiment 20000180 PARAMETER Experiment Name: At_Germinating_Seeds_P Parameter: Tissue Value: Germinating Seeds
  misc_feature: MA Experiment ID: 20000214 Result: Down-regulated in Transcription
  misc_feature: MA Experiment 20000214 PARAMETER Experiment Name: At_4deg_Cold_P Parameter: Timepoint (hr) Value: 6
  misc_feature: MA Experiment ID: 20000224 Result: Down-regulated in Transcription
  misc_feature: MA Experiment ID: 20000307 Result: Down-regulated in Transcription
  misc_feature: MA Experiment 20000307 PARAMETER Experiment Name: At_Germinating_Seeds_Sub_P Parameter: Age (hr) Value: 24 vs. 0
  misc_feature: MA Experiment 20000307 PARAMETER Experiment Name: At_Germinating_Seeds_Sub_P Parameter: Organism Value: A. thaliana
  misc_feature: MA Experiment 20000307 PARAMETER Experiment Name: At_Germinating_Seeds_Sub_P Parameter: Plant Line Value: WS
  misc_feature: MA Experiment 20000307 PARAMETER Experiment Name: At_Germinating_Seeds_Sub_P Parameter: Tissue Value: Germinating Seeds
  misc_feature: MA Experiment ID: 20000328 Result: Up-regulated in Transcription
  misc_feature: MA Experiment 20000328 PARAMETER Experiment Name: At_42deg_Heat_Sub_P Parameter: Age (day) Value: 14
  misc_feature: MA Experiment 20000328 PARAMETER Experiment Name: At_42deg_Heat_Sub_P Parameter: Organism Value: A. thaliana
  misc_feature: MA Experiment 20000328 PARAMETER Experiment Name: At_42deg_Heat_Sub_P Parameter: Plant Line Value: WS
  misc_feature: MA Experiment 20000328 PARAMETER Experiment Name: At_42deg_Heat_Sub_P Parameter: Temperature (deg C) Value: 42 vs. 22
  misc_feature: MA Experiment 20000328 PARAMETER Experiment Name: At_42deg_Heat_Sub_P Parameter: Timepoint (hr) Value: 6
  misc_feature: MA Experiment 20000328 PARAMETER Experiment Name: At_42deg_Heat_Sub_P Parameter: Tissue Value: Aerial
  misc_feature: MA Experiment ID: 20001450 Result: Up-regulated in Transcription
  misc_feature: MA Experiment 20001450 PARAMETER Experiment Name: At_Far-red-induction_P Parameter: Age (day) Value: 7
  misc_feature: MA Experiment 20001450 PARAMETER Experiment Name: At_Far-red-induction_P Parameter: Light Value: Far-red vs. White
  misc_feature: MA Experiment 20001450 PARAMETER Experiment Name: At_Far-red-induction_P Parameter: Organism Value: A. thaliana
  misc_feature: MA Experiment 20001450 PARAMETER Experiment Name: At_Far-red-induction_P Parameter: Plant Line Value: Columbia
  misc_feature: MA Experiment 20001450 PARAMETER Experiment Name: At_Far-red-induction_P Parameter: Timepoint (hr) Value: 8
  misc_feature: MA Experiment 20001450 PARAMETER Experiment Name: At_Far-red-induction_P Parameter: Tissue Value: Whole Plant
  misc_feature: MA Experiment ID: 20001451 Result: Up-regulated in Transcription
  misc_feature: MA Experiment 20001451 PARAMETER Experiment Name: At_Far-red-induction_P Parameter: Age (day) Value: 7
  misc_feature: MA Experiment 20001451 PARAMETER Experiment Name: At_Far-red-induction_P Parameter: Light Value: Far-red vs. White
  misc_feature: MA Experiment 20001451 PARAMETER Experiment Name: At_Far-red-induction_P Parameter: Organism Value: A. thaliana
  misc_feature: MA Experiment 20001451 PARAMETER Experiment Name: At_Far-red-induction_P Parameter: Plant Line Value: Columbia
  misc_feature: MA Experiment 20001451 PARAMETER Experiment Name: At_Far-red-induction_P Parameter: Timepoint (hr) Value: 24
  misc_feature: MA Experiment 20001451 PARAMETER Experiment Name: At_Far-red-induction_P Parameter: Tissue Value: Whole Plant
cccttattaacctatatcgttcgccaacttcgaaaccctaaattcccaaattgcggaggctgagagatctcaaatcgacgaccaacaggaagaatgagcagtcgttcgagtagaaccgtgtacgtcggaaaccttcctggcgatatccgtgagagagaggtcgaagatttgttcagtaagtatggacctgttgttcaaattgatttgaaggttcctccaaggcctcctggttatgcattcgttgagtttgatgatgctcgggatgctgaagatgctattcatggtcgtgatggctatgactttgatgggcatcgtttgagggtggaattggcgcatggtgggaggcgttcatcagatgatactcggggtagtttcaatggtggtggccgtggtggtggtcgcggccgtggtgatggtggtagtcgtgggccatctaggagatcagagtttcgtgttctagtcacaggcttgccttcatctgcttcttggcaagatctcaaggatcacatgcgtaaaggaggcgatgtctgtttctcgcaagtgtaccgtgatgctagagggacaactggagttgttgattacacctgctatgaggacatgaagtatgcgctgaaaaagctcgacgacacagagtttcgaaatgcgttttcgaatggatatgtccgggttagagaatatgattcaaggaaggattctaggagtcctagccggggaagatcctattctaagagccgcagccgcagccgtggacgaagcgtgagccgaagcaggagcagaagcaggagcaggagcagaagtcccaaggcaaagtcttcacgtaggtcccctgcaaaatctacatcaagatctcctggcccccgctcgaagtcaaggtcaccgtctccaagaagatcgcgttcaagatcaagatctcctctaccttctgttcagaaggaaggaagcaagagccctagcaagccaagtccagccaagagtcctatccacactaggagtccatcgaggtaaaatgggagatatccaggtgaaaagagaagagagaagcatcttcttgctactcaaaacaaattctactttcttgaagtggattatatctgaacgcttattgactgtagaagatgcgacaagtttgatttgcactatcattttgtaatattcttgccattcttcgtcttctggatccctttacttttgagaatgatgtttttttttgaagatatcgtttcttttccctc

SEQ ID NO: 30963 - protein, 303 aa, Arabidopsis thaliana
  peptide (1)..(303): Ceres Seq. ID no. 12324970
  misc_feature (9)..(77): Pfam Name: RNA recognition motif. (a.k.a. RRM, RBD, or RNP domain) Pfam Description: RNA recognition motif. (a.k.a. RRM, RBD, or RNP
  misc_feature (1)..(272): Homolog of NCBI NO: 22331714 NR Description: arginine/serine-rich splicing factor (atSRp34),
  misc_feature (1)..(303): Homolog of NCBI NO: 33146854 NR Description: putative pre-mRNA splicing factor SF2
  misc_feature (1)..(207): Homolog of NCBI NO: 5815238 NR Description: splicing factor SR1D [Arabidopsis thaliana]
  misc_feature (1)..(266): Homolog of NCBI NO: 5815239 NR Description: splicing factor SR1E [Arabidopsis thaliana]
  misc_feature (1)..(266): Homolog of NCBI NO: 5815237 NR Description: splicing factor SR1C [Arabidopsis thaliana]
  misc_feature (1)..(266): Homolog of NCBI NO: 5815236 NR Description: splicing factor SR1B [Arabidopsis thaliana]
  misc_feature (1)..(266): Homolog of NCBI NO: 2443473 NR Description: ASF/SF2 homolog [Arabidopsis thaliana]
  misc_feature (1)..(303): Homolog of NCBI NO: 2129717 NR Description: splicing factor SF-2 homolog - Arabidopsis
  misc_feature (1)..(303): Homolog of NCBI NO: 5815235 NR Description: splicing factor SR1 [Arabidopsis thaliana]
  misc_feature (1)..(303): Homolog of NCBI NO: 30678391 NR Description: pre-mRNA splicing factor SF2 (SR1 protein)
MSSRSSRTVYVGNLPGDIREREVEDLFSKYGPVVQIDLKVPPRPPGYAFVEFDDARDAEDAIHGRDGYDFDGHRLRVELAHGGRRSSDDTRGSFNGGGRGGGRGRGDGGSRGPSRRSEFRVLVTGLPSSASWQDLKDHMRKGGDVCFSQVYRDARGTTGVVDYTCYEDMKYALKKLDDTEFRNAFSNGYVRVREYDSRKDSRSPSRGRSYSKSRSRSRGRSVSRSRSRSRSRSRSPKAKSSRRSPAKSTSRSPGPRSKSRSPSPRRSRSRSRSPLPSVQKEGSKSPSKPSPAKSPIHTRSPSR

SEQ ID NO: 30964 - protein, 165 aa, Arabidopsis thaliana; identical to SEQ ID NO: 29319
  peptide (1)..(165): Ceres Seq. ID no. 12324971
  misc_feature (1)..(134): Homolog of NCBI NO: 22331714 NR Description: arginine/serine-rich splicing factor (atSRp34),
  misc_feature (1)..(165): Homolog of NCBI NO: 33146854 NR Description: putative pre-mRNA splicing factor SF2
  misc_feature (1)..(69): Homolog of NCBI NO: 5815238 NR Description: splicing factor SR1D [Arabidopsis thaliana]
  misc_feature (1)..(128): Homolog of NCBI NO: 5815239 NR Description: splicing factor SR1E [Arabidopsis thaliana]
  misc_feature (1)..(128): Homolog of NCBI NO: 5815237 NR Description: splicing factor SR1C [Arabidopsis thaliana]
  misc_feature (1)..(128): Homolog of NCBI NO: 5815236 NR Description: splicing factor SR1B [Arabidopsis thaliana]
  misc_feature (1)..(128): Homolog of NCBI NO: 2443473 NR Description: ASF/SF2 homolog [Arabidopsis thaliana]
  misc_feature (1)..(165): Homolog of NCBI NO: 2129717 NR Description: splicing factor SF-2 homolog - Arabidopsis
  misc_feature (1)..(165): Homolog of NCBI NO: 5815235 NR Description: splicing factor SR1 [Arabidopsis thaliana]
  misc_feature (1)..(165): Homolog of NCBI NO: 30678391 NR Description: pre-mRNA splicing factor SF2 (SR1 protein)

SEQ ID NO: 30965 - DNA, 977 bp, Arabidopsis thaliana
  misc_feature (1)..(977): Ceres Seq. ID no. 12322916
  misc_feature: MA Experiment ID: 108461 Result: Up-regulated in Transcription
  misc_feature: MA Experiment 108461 PARAMETER Experiment Name: At_Germinating_Seeds_cDNA_P Parameter: Age (day) Value: 1 vs. 0
  misc_feature: MA Experiment 108461 PARAMETER Experiment Name: At_Germinating_Seeds_cDNA_P Parameter: Tissue Value: Germinating Seeds
  misc_feature: MA Experiment ID: 108462 Result: Up-regulated in Transcription
  misc_feature: MA Experiment 108462 PARAMETER Experiment Name: At_Germinating_Seeds_cDNA_P Parameter: Age (day) Value: 2 vs. 0
  misc_feature: MA Experiment 108462 PARAMETER Experiment Name: At_Germinating_Seeds_cDNA_P Parameter: Tissue Value: Germinating Seeds
  misc_feature: MA Experiment ID: 108463 Result: Up-regulated in Transcription
  misc_feature: MA Experiment 108463 PARAMETER Experiment Name: At_Germinating_Seeds_cDNA_P Parameter: Age (day) Value: 3 vs. 0
  misc_feature: MA Experiment 108463 PARAMETER Experiment Name: At_Germinating_Seeds_cDNA_P Parameter: Tissue Value: Germinating Seeds
  misc_feature: MA Experiment ID: 108464 Result: Up-regulated in Transcription
  misc_feature: MA Experiment 108464 PARAMETER Experiment Name: At_Germinating_Seeds_cDNA_P Parameter: Age (day) Value: 4 vs. 0
  misc_feature: MA Experiment 108464 PARAMETER Experiment Name: At_Germinating_Seeds_cDNA_P Parameter: Tissue Value: Germinating Seeds
  misc_feature: MA Experiment ID: 108488 Result: Up-regulated in Transcription
  misc_feature: MA Experiment ID: 20000069 Result: Down-regulated in Transcription
  misc_feature: MA Experiment 20000069 PARAMETER Experiment Name: At_100uM_ABA_Mutants_cDNA_P Parameter: Plant Line Value: CS23
  misc_feature: MA Experiment 20000069 PARAMETER Experiment Name: At_100uM_ABA_Mutants_cDNA_P Parameter: Timepoint (hr) Value: 6
  misc_feature: MA Experiment 20000069 PARAMETER Experiment Name: At_100uM_ABA_Mutants_cDNA_P Parameter: Tissue Value: Aerial
  misc_feature: MA Experiment 20000069 PARAMETER Experiment Name: At_100uM_ABA_Mutants_cDNA_P Parameter: Treatment Value: 100uM ABA vs. No Treatment
  misc_feature: MA Experiment ID: 20000070 Result: Down-regulated in Transcription
  misc_feature: MA Experiment 20000070 PARAMETER Experiment Name: At_100uM_ABA_Mutants_cDNA_P Parameter: Plant Line Value: CS24
  misc_feature: MA Experiment 20000070 PARAMETER Experiment Name: At_100uM_ABA_Mutants_cDNA_P Parameter: Timepoint (hr) Value: 6
  misc_feature: MA Experiment 20000070 PARAMETER Experiment Name: At_100uM_ABA_Mutants_cDNA_P Parameter: Tissue Value: Aerial
  misc_feature: MA Experiment 20000070 PARAMETER Experiment Name: At_100uM_ABA_Mutants_cDNA_P Parameter: Treatment Value: 100uM ABA vs. No Treatment
  misc_feature: MA Experiment ID: 20000086 Result: Down-regulated in Transcription
  misc_feature: MA Experiment 20000086 PARAMETER Experiment Name: At_100uM_ABA_Mutants_cDNA_P Parameter: Plant Line Value: CS22
  misc_feature: MA Experiment 20000086 PARAMETER Experiment Name: At_100uM_ABA_Mutants_cDNA_P Parameter: Timepoint (hr) Value: 6
  misc_feature: MA Experiment 20000086 PARAMETER Experiment Name: At_100uM_ABA_Mutants_cDNA_P Parameter: Tissue Value: Aerial
  misc_feature: MA Experiment 20000086 PARAMETER Experiment Name: At_100uM_ABA_Mutants_cDNA_P Parameter: Treatment Value: 100uM ABA vs. No Treatment
  misc_feature: MA Experiment ID: 20000088 Result: Down-regulated in Transcription
  misc_feature: MA Experiment 20000088 PARAMETER Experiment Name: At_100uM_ABA_Mutants_cDNA_P Parameter: Plant Line Value: Landsberg
  misc_feature: MA Experiment 20000088 PARAMETER Experiment Name: At_100uM_ABA_Mutants_cDNA_P Parameter: Timepoint (hr) Value: 6
  misc_feature: MA Experiment 20000088 PARAMETER Experiment Name: At_100uM_ABA_Mutants_cDNA_P Parameter: Tissue Value: Aerial
  misc_feature: MA Experiment 20000088 PARAMETER Experiment Name: At_100uM_ABA_Mutants_cDNA_P Parameter: Treatment Value: 100uM ABA vs. No Treatment
  misc_feature: MA Experiment ID: 20000090 Result: Down-regulated in Transcription
  misc_feature: MA Experiment ID: 20000117 Result: Down-regulated in Transcription
  misc_feature: MA Experiment 20000117 PARAMETER Experiment Name: At_100uM_ABA_Mutants_cDNA_P Parameter: Plant Line Value: Columbia
  misc_feature: MA Experiment 20000117 PARAMETER Experiment Name: At_100uM_ABA_Mutants_cDNA_P Parameter: Timepoint (hr) Value: 6
  misc_feature: MA Experiment 20000117 PARAMETER Experiment Name: At_100uM_ABA_Mutants_cDNA_P Parameter: Tissue Value: Aerial
  misc_feature: MA Experiment 20000117 PARAMETER Experiment Name: At_100uM_ABA_Mutants_cDNA_P Parameter: Treatment Value: 100uM ABA vs. No Treatment
  misc_feature: MA Experiment ID: 20000180 Result: Up-regulated in Transcription
  misc_feature: MA Experiment 20000180 PARAMETER Experiment Name: At_Germinating_Seeds_P Parameter: Age (hr) Value: 24 vs. 0
  misc_feature: MA Experiment 20000180 PARAMETER Experiment Name: At_Germinating_Seeds_P Parameter: Tissue Value: Germinating Seeds
  misc_feature: MA Experiment ID: 20000224 Result: Down-regulated in Transcription
  misc_feature: MA Experiment ID: 20000264 Result: Down-regulated in Transcription
  misc_feature: MA Experiment 20000264 PARAMETER Experiment Name: At_Open_Flower_P Parameter: Age (day) Value: 21
  misc_feature: MA Experiment 20000264 PARAMETER Experiment Name: At_Open_Flower_P Parameter: Plant Line Value: WS
  misc_feature: MA Experiment 20000264 PARAMETER Experiment Name: At_Open_Flower_P Parameter: Tissue Value: Open Flower vs. Whole Plant
  misc_feature: MA Experiment ID: 20000267 Result: Down-regulated in Transcription
  misc_feature: MA Experiment 20000267 PARAMETER Experiment Name: At_Drought_P Parameter: Age (day) Value: 7
  misc_feature: MA Experiment 20000267 PARAMETER Experiment Name: At_Drought_P Parameter: Organism Value: A. thaliana
  misc_feature: MA Experiment 20000267 PARAMETER Experiment Name: At_Drought_P Parameter: Plant Line Value: WS
  misc_feature: MA Experiment 20000267 PARAMETER Experiment Name: At_Drought_P Parameter: Timepoint (hr) Value: 6
  misc_feature: MA Experiment 20000267 PARAMETER Experiment Name: At_Drought_P Parameter: Tissue Value: Whole Plant
  misc_feature: MA Experiment 20000267 PARAMETER Experiment Name: At_Drought_P Parameter: Treatment Value: Drought vs. No Drought
  misc_feature: MA Experiment ID: 20000268 Result: Down-regulated in Transcription
  misc_feature: MA Experiment 20000268 PARAMETER Experiment Name: At_100mM_NaCl__P Parameter: Age (day) Value: 14
  misc_feature: MA Experiment 20000268 PARAMETER Experiment Name: At_100mM_NaCl__P Parameter: Organism Value: A. thaliana
  misc_feature: MA Experiment 20000268 PARAMETER Experiment Name: At_100mM_NaCl__P Parameter: Plant Line Value: WS
  misc_feature: MA Experiment 20000268 PARAMETER Experiment Name: At_100mM_NaCl__P Parameter: Timepoint (hr) Value: 6
  misc_feature: MA Experiment 20000268 PARAMETER Experiment Name: At_100mM_NaCl__P Parameter: Tissue Value: Whole Plant
  misc_feature: MA Experiment 20000268 PARAMETER Experiment Name: At_100mM_NaCl__P Parameter: Treatment Value: 100mM NaCl vs. No Treatment
  misc_feature: MA Experiment ID: 20000436 Result: Down-regulated in Transcription
  misc_feature: MA Experiment 20000436 PARAMETER Experiment Name: At_Drought_P Parameter: Age (day) Value: 7
  misc_feature: MA Experiment 20000436 PARAMETER Experiment Name: At_Drought_P Parameter: Organism Value: A. thaliana
  misc_feature: MA Experiment 20000436 PARAMETER Experiment Name: At_Drought_P Parameter: Plant Line Value: WS
  misc_feature: MA Experiment 20000436 PARAMETER Experiment Name: At_Drought_P Parameter: Timepoint (hr) Value: 12
  misc_feature: MA Experiment 20000436 PARAMETER Experiment Name: At_Drought_P Parameter: Tissue Value: Whole Plant
  misc_feature: MA Experiment 20000436 PARAMETER Experiment Name: At_Drought_P Parameter: Treatment Value: Drought vs. No Drought
  misc_feature: MA Experiment ID: 20000437 Result: Down-regulated in Transcription
  misc_feature: MA Experiment 20000437 PARAMETER Experiment Name: At_Drought_P Parameter: Age (day) Value: 8
  misc_feature: MA Experiment 20000437 PARAMETER Experiment Name: At_Drought_P Parameter: Organism Value: A. thaliana
  misc_feature: MA Experiment 20000437 PARAMETER Experiment Name: At_Drought_P Parameter: Plant Line Value: WS
  misc_feature: MA Experiment 20000437 PARAMETER Experiment Name: At_Drought_P Parameter: Timepoint (hr) Value: 24
  misc_feature: MA Experiment 20000437 PARAMETER Experiment Name: At_Drought_P Parameter: Tissue Value: Whole Plant
  misc_feature: MA Experiment 20000437 PARAMETER Experiment Name: At_Drought_P Parameter: Treatment Value: Drought vs. No Drought
  misc_feature: MA Experiment ID: 20000439 Result: Down-regulated in Transcription
  misc_feature: MA Experiment 20000439 PARAMETER Experiment Name: At_Roots__P Parameter: Age (day) Value: 14 vs. 21
  misc_feature: MA Experiment 20000439 PARAMETER Experiment Name: At_Roots__P Parameter: Organism Value: A. thaliana
  misc_feature: MA Experiment 20000439 PARAMETER Experiment Name: At_Roots__P Parameter: Tissue Value: Roots vs. Whole Plant
  misc_feature: MA Experiment ID: 20000794 Result: Down-regulated in Transcription
  misc_feature: MA Experiment 20000794 PARAMETER Experiment Name: At_Petals_P Parameter: Age (day) Value: 23-25 days
  misc_feature: MA Experiment 20000794 PARAMETER Experiment Name: At_Petals_P Parameter: Plant Line Value: WS
  misc_feature: MA Experiment 20000794 PARAMETER Experiment Name: At_Petals_P Parameter: Tissue Value: Petals vs. Whole plant
  misc_feature: MA Experiment ID: 20001247 Result: Up-regulated in Transcription
  misc_feature: MA Experiment 20001247 PARAMETER Experiment Name: At_Far-red-induction_P Parameter: Age (day) Value: 7
  misc_feature: MA Experiment 20001247 PARAMETER Experiment Name: At_Far-red-induction_P Parameter: Light Value: Far-red vs. White
  misc_feature: MA Experiment 20001247 PARAMETER Experiment Name: At_Far-red-induction_P Parameter: Organism Value: A. thaliana
  misc_feature: MA Experiment 20001247 PARAMETER Experiment Name: At_Far-red-induction_P Parameter: Plant Line Value: Columbia
  misc_feature: MA Experiment 20001247 PARAMETER Experiment Name: At_Far-red-induction_P Parameter: Timepoint (hr) Value: 1
  misc_feature: MA Experiment 20001247 PARAMETER Experiment Name: At_Far-red-induction_P Parameter: Tissue Value: Whole Plant
  misc_feature: MA Experiment ID: 20001450 Result: Up-regulated in Transcription
  misc_feature: MA Experiment 20001450 PARAMETER Experiment Name: At_Far-red-induction_P Parameter: Age (day) Value: 7
  misc_feature: MA Experiment 20001450 PARAMETER Experiment Name: At_Far-red-induction_P Parameter: Light Value: Far-red vs. White
  misc_feature: MA Experiment 20001450 PARAMETER Experiment Name: At_Far-red-induction_P Parameter: Organism Value: A. thaliana
  misc_feature: MA Experiment 20001450 PARAMETER Experiment Name: At_Far-red-induction_P Parameter: Plant Line Value: Columbia
  misc_feature: MA Experiment 20001450 PARAMETER Experiment Name: At_Far-red-induction_P Parameter: Timepoint (hr) Value: 8
  misc_feature: MA Experiment 20001450 PARAMETER Experiment Name: At_Far-red-induction_P Parameter: Tissue Value: Whole Plant
  misc_feature: MA Experiment ID: 20001451 Result: Up-regulated in Transcription
  misc_feature: MA Experiment 20001451 PARAMETER Experiment Name: At_Far-red-induction_P Parameter: Age (day) Value: 7
  misc_feature: MA Experiment 20001451 PARAMETER Experiment Name: At_Far-red-induction_P Parameter: Light Value: Far-red vs. White
  misc_feature: MA Experiment 20001451 PARAMETER Experiment Name: At_Far-red-induction_P Parameter: Organism Value: A. thaliana
  misc_feature: MA Experiment 20001451 PARAMETER Experiment Name: At_Far-red-induction_P Parameter: Plant Line Value: Columbia
  misc_feature: MA Experiment 20001451 PARAMETER Experiment Name: At_Far-red-induction_P Parameter: Timepoint (hr) Value: 24
  misc_feature: MA Experiment 20001451 PARAMETER Experiment Name: At_Far-red-induction_P Parameter: Tissue Value: Whole Plant
  misc_feature: MA Experiment ID: 20001554 Result: Down-regulated in Transcription
  misc_feature: MA Experiment 20001554 PARAMETER Experiment Name: At_Drought_Soil_Dry_P Parameter: Age (day) Value: 21
  misc_feature: MA Experiment 20001554 PARAMETER Experiment Name: At_Drought_Soil_Dry_P Parameter: Organism Value: A. thaliana
  misc_feature: MA Experiment 20001554 PARAMETER Experiment Name: At_Drought_Soil_Dry_P Parameter: Plant Line Value: WS
  misc_feature: MA Experiment 20001554 PARAMETER Experiment Name: At_Drought_Soil_Dry_P Parameter: Post Timepoint (hr) Value: None
  misc_feature: MA Experiment 20001554 PARAMETER Experiment Name: At_Drought_Soil_Dry_P Parameter: Post-Treatment Value: None
  misc_feature: MA Experiment 20001554 PARAMETER Experiment Name: At_Drought_Soil_Dry_P Parameter: Timepoint (day) Value: 7
  misc_feature: MA Experiment 20001554 PARAMETER Experiment Name: At_Drought_Soil_Dry_P Parameter: Treatment Value: Drought vs. No Drought
  misc_feature: MA Experiment ID: 20001555 Result: Down-regulated in Transcription
  misc_feature: MA Experiment 20001555 PARAMETER Experiment Name: At_Drought_Soil_Dry_P Parameter: Age (day) Value: 24
  misc_feature: MA Experiment 20001555 PARAMETER Experiment Name: At_Drought_Soil_Dry_P Parameter: Organism Value: A. thaliana
  misc_feature: MA Experiment 20001555 PARAMETER Experiment Name: At_Drought_Soil_Dry_P Parameter: Plant Line Value: WS
  misc_feature: MA Experiment 20001555 PARAMETER Experiment Name: At_Drought_Soil_Dry_P Parameter: Post Timepoint (hr) Value: None
  misc_feature: MA Experiment 20001555 PARAMETER Experiment Name: At_Drought_Soil_Dry_P Parameter: Post-Treatment Value: None
  misc_feature: MA Experiment 20001555 PARAMETER Experiment Name: At_Drought_Soil_Dry_P Parameter: Timepoint (day) Value: 10
  misc_feature: MA Experiment 20001555 PARAMETER Experiment Name: At_Drought_Soil_Dry_P Parameter: Treatment Value: Drought vs. No Drought
  misc_feature: MA Experiment ID: 20001556 Result: Down-regulated in Transcription
  misc_feature: MA Experiment 20001556 PARAMETER Experiment Name: At_Drought_Soil_Dry_P Parameter: Age (day) Value: 26
  misc_feature: MA Experiment 20001556 PARAMETER Experiment Name: At_Drought_Soil_Dry_P Parameter: Organism Value: A. thaliana
  misc_feature: MA Experiment 20001556 PARAMETER Experiment Name: At_Drought_Soil_Dry_P Parameter: Plant Line Value: WS
  misc_feature: MA Experiment 20001556 PARAMETER Experiment Name: At_Drought_Soil_Dry_P Parameter: Post Timepoint (hr) Value: None
  misc_feature: MA Experiment 20001556 PARAMETER Experiment Name: At_Drought_Soil_Dry_P Parameter: Post-Treatment Value: None
  misc_feature: MA Experiment 20001556 PARAMETER Experiment Name: At_Drought_Soil_Dry_P Parameter: Timepoint (day) Value: 12
  misc_feature: MA Experiment 20001556 PARAMETER Experiment Name: At_Drought_Soil_Dry_P Parameter: Treatment Value: Drought vs. No Drought
  misc_feature: MA Experiment ID: 20001558 Result: Up-regulated in Transcription
  misc_feature: MA Experiment 20001558 PARAMETER Experiment Name: At_Drought_Soil_Dry_P Parameter: Age (day) Value: 27
  misc_feature: MA Experiment 20001558 PARAMETER Experiment Name: At_Drought_Soil_Dry_P Parameter: Organism Value: A. thaliana
  misc_feature: MA Experiment 20001558 PARAMETER Experiment Name: At_Drought_Soil_Dry_P Parameter: Plant Line Value: WS
  misc_feature: MA Experiment 20001558 PARAMETER Experiment Name: At_Drought_Soil_Dry_P Parameter: Post Timepoint (hr) Value: 6
  misc_feature: MA Experiment 20001558 PARAMETER Experiment Name: At_Drought_Soil_Dry_P Parameter: Post-Treatment Value: Re-Water vs. No Drought
  misc_feature: MA Experiment 20001558 PARAMETER Experiment Name: At_Drought_Soil_Dry_P Parameter: Timepoint (day) Value: 13
  misc_feature: MA Experiment 20001558 PARAMETER Experiment Name: At_Drought_Soil_Dry_P Parameter: Treatment Value: Drought vs. No Drought
  misc_feature: MA Experiment ID: 20001559 Result: Down-regulated in Transcription
  misc_feature: MA Experiment 20001559 PARAMETER Experiment Name: At_Drought_Soil_Dry_P Parameter: Age (day) Value: 28
  misc_feature: MA Experiment 20001559 PARAMETER Experiment Name: At_Drought_Soil_Dry_P Parameter: Organism Value: A. thaliana
  misc_feature: MA Experiment 20001559 PARAMETER Experiment Name: At_Drought_Soil_Dry_P Parameter: Plant Line Value: WS
  misc_feature: MA Experiment 20001559 PARAMETER Experiment Name: At_Drought_Soil_Dry_P Parameter: Post Timepoint (hr) Value: 29
  misc_feature: MA Experiment 20001559 PARAMETER Experiment Name: At_Drought_Soil_Dry_P Parameter: Post-Treatment Value: Re-Water vs. No Drought
  misc_feature: MA Experiment 20001559 PARAMETER Experiment Name: At_Drought_Soil_Dry_P Parameter: Timepoint (day) Value: 14
  misc_feature: MA Experiment 20001559 PARAMETER Experiment Name: At_Drought_Soil_Dry_P Parameter: Treatment Value: Drought vs. No Drought
  misc_feature: MA Experiment ID: 20001560 Result: Up-regulated in Transcription
  misc_feature: MA Experiment 20001560 PARAMETER Experiment Name: At_Drought_Soil_Dry_P Parameter: Age (day) Value: 28
  misc_feature: MA Experiment 20001560 PARAMETER Experiment Name: At_Drought_Soil_Dry_P Parameter: Organism Value: A. thaliana
  misc_feature: MA Experiment 20001560 PARAMETER Experiment Name: At_Drought_Soil_Dry_P Parameter: Plant Line Value: WS
  misc_feature: MA Experiment 20001560 PARAMETER Experiment Name: At_Drought_Soil_Dry_P Parameter: Post Timepoint (hr) Value: None
  misc_feature: MA Experiment 20001560 PARAMETER Experiment Name: At_Drought_Soil_Dry_P Parameter: Post-Treatment Value: None
  misc_feature: MA Experiment 20001560 PARAMETER Experiment Name: At_Drought_Soil_Dry_P Parameter: Timepoint (day) Value: 14
  misc_feature: MA Experiment 20001560 PARAMETER Experiment Name: At_Drought_Soil_Dry_P Parameter: Treatment Value: Drought vs. No Drought
  misc_feature: MA Experiment ID: 20001757 Result: Up-regulated in Transcription
  misc_feature: MA Experiment 20001757 PARAMETER Experiment Name: At_50mM_NH4NO3_L-to-H_P Parameter: Timepoint (hr) Value: 6
  misc_feature: MA Experiment 20001757 PARAMETER Experiment Name: At_50mM_NH4NO3_L-to-H_P Parameter: Tissue Value: Leaf
  misc_feature: MA Experiment 20001757 PARAMETER Experiment Name: At_50mM_NH4NO3_L-to-H_P Parameter: Treatment Value: 50mM NH4NO3 vs 100mM Mannitol
  misc_feature: MA Experiment ID: 20001904 Result: Down-regulated in Transcription
  misc_feature: MA Experiment 20001904 PARAMETER Experiment Name: At_Drought_Reproduction_P Parameter: Age (day) Value: 37
  misc_feature: MA Experiment 20001904 PARAMETER Experiment Name: At_Drought_Reproduction_P Parameter: Organism Value: A. thaliana
  misc_feature: MA Experiment 20001904 PARAMETER Experiment Name: At_Drought_Reproduction_P Parameter: Plant Line Value: WS
  misc_feature: MA Experiment 20001904 PARAMETER Experiment Name: At_Drought_Reproduction_P Parameter: Timepoint (day) Value: 7
  misc_feature: MA Experiment 20001904 PARAMETER Experiment Name: At_Drought_Reproduction_P Parameter: Tissue Value: Rosettes
  misc_feature: MA Experiment 20001904 PARAMETER Experiment Name: At_Drought_Reproduction_P Parameter: Treatment Value: Drought vs. No Drought
  misc_feature: MA Experiment ID: 20001905 Result: Down-regulated in Transcription
  misc_feature: MA Experiment 20001905 PARAMETER Experiment Name: At_Drought_Reproduction_P Parameter: Age (day) Value: 40
  misc_feature: MA Experiment 20001905 PARAMETER Experiment Name: At_Drought_Reproduction_P Parameter: Organism Value: A. thaliana
  misc_feature: MA Experiment 20001905 PARAMETER Experiment Name: At_Drought_Reproduction_P Parameter: Plant Line Value: WS
  misc_feature: MA Experiment 20001905 PARAMETER Experiment Name: At_Drought_Reproduction_P Parameter: Timepoint (day) Value: 10
  misc_feature: MA Experiment 20001905 PARAMETER Experiment Name: At_Drought_Reproduction_P Parameter: Tissue Value: Rosettes
  misc_feature: MA Experiment 20001905 PARAMETER Experiment Name: At_Drought_Reproduction_P Parameter: Treatment Value: Drought vs. No Drought
  misc_feature: MA Experiment ID: 20001906 Result: Down-regulated in Transcription
  misc_feature: MA Experiment 20001906 PARAMETER Experiment Name: At_Drought_Reproduction_P Parameter: Age (day) Value: 35
  misc_feature: MA Experiment 20001906 PARAMETER Experiment Name: At_Drought_Reproduction_P Parameter: Organism Value: A. thaliana
  misc_feature: MA Experiment 20001906 PARAMETER Experiment Name: At_Drought_Reproduction_P Parameter: Plant Line Value: WS
  misc_feature: MA Experiment 20001906 PARAMETER Experiment Name: At_Drought_Reproduction_P Parameter: Timepoint (day) Value: 5
  misc_feature: MA Experiment 20001906 PARAMETER Experiment Name: At_Drought_Reproduction_P Parameter: Tissue Value: Siliques
  misc_feature: MA Experiment 20001906 PARAMETER Experiment Name: At_Drought_Reproduction_P Parameter: Treatment Value: Drought vs. No Drought
  misc_feature: MA Experiment ID: 20001908 Result: Down-regulated in Transcription
  misc_feature: MA Experiment 20001908 PARAMETER Experiment Name: At_Drought_Reproduction_P Parameter: Age (day) Value: 40
  misc_feature: MA Experiment 20001908 PARAMETER Experiment Name: At_Drought_Reproduction_P Parameter: Organism Value: A. thaliana
  misc_feature: MA Experiment 20001908 PARAMETER Experiment Name: At_Drought_Reproduction_P Parameter: Plant Line Value: WS
  misc_feature: MA Experiment 20001908 PARAMETER Experiment Name: At_Drought_Reproduction_P Parameter: Timepoint (day) Value: 10
  misc_feature: MA Experiment 20001908 PARAMETER Experiment Name: At_Drought_Reproduction_P Parameter: Tissue Value: Siliques
  misc_feature: MA Experiment 20001908 PARAMETER Experiment Name: At_Drought_Reproduction_P Parameter: Treatment Value: Drought vs. No Drought
  misc_feature: MA Experiment ID: 20001911 Result: Down-regulated in Transcription
  misc_feature: MA Experiment 20001911 PARAMETER Experiment Name: At_Drought_Reproduction_P Parameter: Age (day) Value: 40
  misc_feature: MA Experiment 20001911 PARAMETER Experiment Name: At_Drought_Reproduction_P Parameter: Organism Value: A. thaliana
  misc_feature: MA Experiment 20001911 PARAMETER Experiment Name: At_Drought_Reproduction_P Parameter: Plant Line Value: WS
  misc_feature: MA Experiment 20001911 PARAMETER Experiment Name: At_Drought_Reproduction_P Parameter: Timepoint (day) Value: 10
  misc_feature: MA Experiment 20001911 PARAMETER Experiment Name: At_Drought_Reproduction_P Parameter: Tissue Value: Flowers
  misc_feature: MA Experiment 20001911 PARAMETER Experiment Name: At_Drought_Reproduction_P Parameter: Treatment Value: Drought vs. No Drought
atcatcttcttcactaaacaaaaaaaaacccttcaaaacatttccttattctttcttcttcatctacaacaatggctggagttgcctttggttcctttgatgattcattcagcttggcttctctaagagcttacctcgctgagttcatctccactttactctttgttttcgctggtgttggctctgccattgcctacgcaaagctgacgtcggacgctgctcttgatacaccgggactagtggccatcgcggtttgtcatggttttgctctcttcgtggccgttgcaatcggagccaacatctccggtggccatgtgaacccagccgtcacttttggtcttgctgtcggtggtcaaatcacagtcatcaccggagttttctactggatcgctcagcttctcggctccaccgccgcttgtttcctccttaaatacgtcaccggtggattggcggttccaacccacagcgttgcggctggactaggatcgatagaaggagtagtgatggagatcatcatcaccttcgctttggtctacactgtctacgccaccgccgctgatcccaagaagggttctctcggaaccatcgctcctctcgccattggtcttatcgttggtgccaacatcctcgccgccggtccattctccggtggatccatgaacccagcacgttcctttggaccagctgttgctgccggagacttctctggtcactgggtctactgggttggaccactcatcggtggtggacttgccggacttatctacggaaatgtcttcatgggttcttccgaacatgttcctcttgcttctgctgatttctaaggaaacaagtgatgattcttgattcatgtttctgtgtttggttactttgcctcgatctttcttgttttgtttggagtttggtccggtttcgttgtaatttttatccaatttgtatgaatattatttaatggatggctgttttggttataaatt

SEQ ID NO: 30966 - protein, 250 aa, Arabidopsis thaliana
  peptide (1)..(250): Ceres Seq. ID no. 12322917
  misc_feature (1)..(247): Homolog of NCBI NO: 11276919 NR Description: water channel protein MipK [imported] - common
  misc_feature (1)..(250): Homolog of NCBI NO: 12006841 NR Description: putative delta TIP [Nicotiana glauca]
  misc_feature (1)..(250): Homolog of NCBI NO: 11276920 NR Description: aquaporin [imported] - Vernicia fordii
  misc_feature (1)..(247): Homolog of NCBI NO: 7441271 NR Description: aquaporin TIP18 - common sunflower
  misc_feature (1)..(247): Homolog of NCBI NO: 7441273 NR Description: aquaporin TIP7 - common sunflower
  misc_feature (1)..(247): Homolog of NCBI NO: 7441281 NR Description: water channel protein - common sunflower
  misc_feature (1)..(250): Homolog of NCBI NO: 7441289 NR Description: tonoplast intrinsic protein, delta type - upland
  misc_feature (1)..(247): Homolog of NCBI NO: 7441258 NR Description: probable water channel protein delta-VM23 -
  misc_feature (1)..(250): Homolog of NCBI NO: 17473872 NR Description: delta tonoplast intrinsic protein [Arabidopsis
  misc_feature (1)..(250): Homolog of NCBI NO: 15233320 NR Description: delta tonoplast integral protein (delta-TIP)
MAGVAFGSFDDSFSLASLRAYLAEFISTLLFVFAGVGSAIAYAKLTSDAALDTPGLVAIAVCHGFALFVAVAIGANISGGHVNPAVTFGLAVGGQITVITGVFYWIAQLLGSTAACFLLKYVTGGLAVPTHSVAAGLGSIEGVVMEIIITFALVYTVYATAADPKKGSLGTIAPLAIGLIVGANILAAGPFSGGSMNPARSFGPAVAAGDFSGHWVYWVGPLIGGGLAGLIYGNVFMGSSEHVPLASADF

SEQ ID NO: 30967 - DNA, 1310 bp, Arabidopsis thaliana
  misc_feature (1)..(1310): Ceres Seq. ID no. 12697154
  misc_feature: MA Experiment ID: 108569 Result: Down-regulated in Transcription
  misc_feature: MA Experiment 108569 PARAMETER Experiment Name: At_0.001%_MeJA__cDNA_P Parameter: Timepoint (hr) Value: 6
  misc_feature: MA Experiment 108569 PARAMETER Experiment Name: At_0.001%_MeJA__cDNA_P Parameter: Tissue Value: Aerial
  misc_feature: MA Experiment 108569 PARAMETER Experiment Name: At_0.001%_MeJA__cDNA_P Parameter: Treatment Value: 0.001% MeJA vs. No Treatment
  misc_feature: MA Experiment ID: 108577 Result: Down-regulated in Transcription
  misc_feature: MA Experiment 108577 PARAMETER Experiment Name: At_42deg_Heat_cDNA_P Parameter: Temperature (deg C) Value: 42 vs. 22
  misc_feature: MA Experiment 108577 PARAMETER Experiment Name: At_42deg_Heat_cDNA_P Parameter: Timepoint (hr) Value: 6
  misc_feature: MA Experiment 108577 PARAMETER Experiment Name: At_42deg_Heat_cDNA_P Parameter: Tissue Value: Aerial
  misc_feature: MA Experiment ID: 108595 Result: Up-regulated in Transcription
  misc_feature: MA Experiment 108595 PARAMETER Experiment Name: At_Ler-pi_Ovule_cDNA_P Parameter: Plant Line Value: null
  misc_feature: MA Experiment ID: 20000166 Result: Up-regulated in Transcription
  misc_feature: MA Experiment 20000166 PARAMETER Experiment Name: At_100uM_ABA_P Parameter: Age (day) Value: 14
  misc_feature: MA Experiment 20000166 PARAMETER Experiment Name: At_100uM_ABA_P Parameter: Organism Value: A. thaliana
  misc_feature: MA Experiment 20000166 PARAMETER Experiment Name: At_100uM_ABA_P Parameter: Plant Line Value: WS
  misc_feature: MA Experiment 20000166 PARAMETER Experiment Name: At_100uM_ABA_P Parameter: Timepoint (hr) Value: 1
  misc_feature: MA Experiment 20000166 PARAMETER Experiment Name: At_100uM_ABA_P Parameter: Tissue Value: Aerial
  misc_feature: MA Experiment 20000166 PARAMETER Experiment Name: At_100uM_ABA_P Parameter: Treatment Value: 100uM ABA vs. No Treatment
  misc_feature: MA Experiment ID: 20000169 Result: Up-regulated in Transcription
  misc_feature: MA Experiment 20000169 PARAMETER Experiment Name: At_100uM_ABA_P Parameter: Age (day) Value: 14
  misc_feature: MA Experiment 20000169 PARAMETER Experiment Name: At_100uM_ABA_P Parameter: Organism Value: A. thaliana
  misc_feature: MA Experiment 20000169 PARAMETER Experiment Name: At_100uM_ABA_P Parameter: Plant Line Value: WS
  misc_feature: MA Experiment 20000169 PARAMETER Experiment Name: At_100uM_ABA_P Parameter: Timepoint (hr) Value: 6
  misc_feature: MA Experiment 20000169 PARAMETER Experiment Name: At_100uM_ABA_P Parameter: Tissue Value: Aerial
  misc_feature: MA Experiment 20000169 PARAMETER Experiment Name: At_100uM_ABA_P Parameter: Treatment Value: 100uM ABA vs. No Treatment
  misc_feature: MA Experiment ID: 20000173 Result: Down-regulated in Transcription
  misc_feature: MA Experiment 20000173 PARAMETER Experiment Name: At_42deg_Heat_P Parameter: Age (day) Value: 14
  misc_feature: MA Experiment 20000173 PARAMETER Experiment Name: At_42deg_Heat_P Parameter: Organism Value: A. thaliana
  misc_feature: MA Experiment 20000173 PARAMETER Experiment Name: At_42deg_Heat_P Parameter: Plant Line Value: WS
  misc_feature: MA Experiment 20000173 PARAMETER Experiment Name: At_42deg_Heat_P Parameter: Temperature (deg C) Value: 42 vs. 22
  misc_feature: MA Experiment 20000173 PARAMETER Experiment Name: At_42deg_Heat_P Parameter: Timepoint (hr) Value: 6
  misc_feature: MA Experiment 20000173 PARAMETER Experiment Name: At_42deg_Heat_P Parameter: Tissue Value: Aerial
  misc_feature: MA Experiment ID: 20000179 Result: Down-regulated in Transcription
  misc_feature: MA Experiment 20000179 PARAMETER Experiment Name: At_Germinating_Seeds_P Parameter: Age (hr) Value: 6 vs. 0
  misc_feature: MA Experiment 20000179 PARAMETER Experiment Name: At_Germinating_Seeds_P Parameter: Tissue Value: Germinating Seeds
  misc_feature: MA Experiment ID: 20000234 Result: Down-regulated in Transcription
  misc_feature: MA Experiment 20000234 PARAMETER Experiment Name: At_Siliques_P Parameter: Age (day) Value: 21
  misc_feature: MA Experiment 20000234 PARAMETER Experiment Name: At_Siliques_P Parameter: Organism Value: A. thaliana
  misc_feature: MA Experiment 20000234 PARAMETER Experiment Name: At_Siliques_P Parameter: Plant Line Value: WS
  misc_feature: MA Experiment 20000234 PARAMETER Experiment Name: At_Siliques_P Parameter: Tissue Value: Less Than 5mm Siliques vs. Whole Plant
  misc_feature: MA Experiment ID: 20000235 Result: Down-regulated in Transcription
  misc_feature: MA Experiment 20000235 PARAMETER Experiment Name: At_Siliques_P Parameter: Age (day) Value: 21
  misc_feature: MA Experiment 20000235 PARAMETER Experiment Name: At_Siliques_P Parameter: Organism Value: A. thaliana
  misc_feature: MA Experiment 20000235 PARAMETER Experiment Name: At_Siliques_P Parameter: Plant Line Value: WS
  misc_feature: MA Experiment 20000235 PARAMETER Experiment Name: At_Siliques_P Parameter: Tissue Value: 5-10mm Siliques vs. Whole Plant
  misc_feature: MA Experiment ID: 20000264 Result: Down-regulated in Transcription
  misc_feature: MA Experiment 20000264 PARAMETER Experiment Name: At_Open_Flower_P Parameter: Age (day) Value: 21
  misc_feature: MA Experiment 20000264 PARAMETER Experiment Name: At_Open_Flower_P Parameter: Plant Line Value: WS
  misc_feature: MA Experiment 20000264 PARAMETER Experiment Name: At_Open_Flower_P Parameter: Tissue Value: Open Flower vs. Whole Plant
  misc_feature: MA Experiment ID: 20000265 Result: Down-regulated in Transcription
  misc_feature: MA Experiment 20000265 PARAMETER Experiment Name: At_Open_Flower_P Parameter: Age (day) Value: 21
  misc_feature: MA Experiment 20000265 PARAMETER Experiment Name: At_Open_Flower_P Parameter: Plant Line Value: WS
  misc_feature: MA Experiment 20000265 PARAMETER Experiment Name: At_Open_Flower_P Parameter: Tissue Value: Closed Flower vs. Whole Plant
  misc_feature: MA Experiment ID: 20000268 Result: Down-regulated in Transcription
  misc_feature: MA Experiment 20000268 PARAMETER Experiment Name: At_100mM_NaCl__P Parameter: Age (day) Value: 14
  misc_feature: MA Experiment 20000268 PARAMETER Experiment Name: At_100mM_NaCl__P Parameter: Organism Value: A. thaliana
  misc_feature: MA Experiment 20000268 PARAMETER Experiment Name: At_100mM_NaCl__P Parameter: Plant Line Value: WS
  misc_feature: MA Experiment 20000268 PARAMETER Experiment Name: At_100mM_NaCl__P Parameter: Timepoint (hr) Value: 6
  misc_feature: MA Experiment 20000268 PARAMETER Experiment Name: At_100mM_NaCl__P Parameter: Tissue Value: Whole Plant
  misc_feature: MA Experiment 20000268 PARAMETER Experiment Name: At_100mM_NaCl__P Parameter: Treatment Value: 100mM NaCl vs. No Treatment
  misc_feature: MA Experiment ID: 20000286 Result: Down-regulated in Transcription
  misc_feature: MA Experiment 20000286 PARAMETER Experiment Name: At_Open_Flower_P Parameter: Age (day) Value: 21
  misc_feature: MA Experiment 20000286 PARAMETER Experiment Name: At_Open_Flower_P Parameter: Plant Line Value: WS
  misc_feature: MA Experiment 20000286 PARAMETER Experiment Name: At_Open_Flower_P Parameter: Tissue Value: Half Open vs. Whole Plant
  misc_feature: MA Experiment ID: 20000308 Result: Down-regulated in Transcription
  misc_feature: MA Experiment 20000308 PARAMETER Experiment Name: At_100mM_NaCl__P Parameter: Age (day) Value: 17
  misc_feature: MA Experiment 20000308 PARAMETER Experiment Name: At_100mM_NaCl__P Parameter: Organism Value: A. thaliana
  misc_feature: MA Experiment 20000308 PARAMETER Experiment Name: At_100mM_NaCl__P Parameter: Plant Line Value: WS
  misc_feature: MA Experiment 20000308 PARAMETER Experiment Name: At_100mM_NaCl__P Parameter: Timepoint (hr) Value: 72
  misc_feature: MA Experiment 20000308 PARAMETER Experiment Name: At_100mM_NaCl__P Parameter: Tissue Value: Whole Plant
  misc_feature: MA Experiment 20000308 PARAMETER Experiment Name: At_100mM_NaCl__P Parameter: Treatment Value: 100mM NaCl vs. No Treatment
  misc_feature: MA Experiment ID: 20000438 Result: Down-regulated in Transcription
  misc_feature: MA Experiment 20000438 PARAMETER Experiment Name: At_Shoots__P Parameter: Age (day) Value: 14
  misc_feature: MA Experiment 20000438 PARAMETER Experiment Name: At_Shoots__P Parameter: Tissue Value: Shoots vs. Whole Plant
  misc_feature: MA Experiment ID: 20000439 Result: Down-regulated in Transcription
  misc_feature: MA Experiment 20000439 PARAMETER Experiment Name: At_Roots__P Parameter: Age (day) Value: 14 vs. 21
  misc_feature: MA Experiment 20000439 PARAMETER Experiment Name: At_Roots__P Parameter: Organism Value: A. thaliana
  misc_feature: MA Experiment 20000439 PARAMETER Experiment Name: At_Roots__P Parameter: Tissue Value: Roots vs. Whole Plant
  misc_feature: MA Experiment ID: 20000441 Result: Up-regulated in Transcription
  misc_feature: MA Experiment 20000441 PARAMETER Experiment Name: At_1uM_BR-BRZ__P Parameter: Tissue Value: Shoot Apices
  misc_feature: MA Experiment 20000441 PARAMETER Experiment Name: At_1uM_BR-BRZ__P Parameter: Treatment Value: 1uM BR vs. No Treatment
  misc_feature: MA Experiment ID: 20000456 Result: Down-regulated in Transcription
  misc_feature: MA Experiment 20000456 PARAMETER Experiment Name: At_100uM_BA_P Parameter: Age (day) Value: 14
  misc_feature: MA Experiment 20000456 PARAMETER Experiment Name: At_100uM_BA_P Parameter: Organism Value: A. thaliana
  misc_feature: MA Experiment 20000456 PARAMETER Experiment Name: At_100uM_BA_P Parameter: Plant Line Value: WS
  misc_feature: MA Experiment 20000456 PARAMETER Experiment Name: At_100uM_BA_P Parameter: Timepoint (hr) Value: 6
  misc_feature: MA Experiment 20000456 PARAMETER Experiment Name: At_100uM_BA_P Parameter: Tissue Value: Aerial
  misc_feature: MA Experiment 20000456 PARAMETER Experiment Name: At_100uM_BA_P Parameter: Treatment Value: 100uM BA vs. No Treatment
  misc_feature: MA Experiment ID: 20000460 Result: Up-regulated in Transcription
  misc_feature: MA Experiment 20000460 PARAMETER Experiment Name: At_10percent_PEG_P Parameter: Age (day) Value: 12
  misc_feature: MA Experiment 20000460 PARAMETER Experiment Name: At_10percent_PEG_P Parameter: Organism Value: A. thaliana
  misc_feature: MA Experiment 20000460 PARAMETER Experiment Name: At_10percent_PEG_P Parameter: Plant Line Value: WS
  misc_feature: MA Experiment 20000460 PARAMETER Experiment Name: At_10percent_PEG_P Parameter: Timepoint (day) Value: 12
  misc_feature: MA Experiment 20000460 PARAMETER Experiment Name: At_10percent_PEG_P Parameter: Tissue Value: Whole Plant
  misc_feature: MA Experiment 20000460 PARAMETER Experiment Name: At_10percent_PEG_P Parameter: Treatment Value: 10percent PEG vs. No Treatment
  misc_feature: MA Experiment ID: 20000495 Result: Down-regulated in Transcription
  misc_feature: MA Experiment 20000495 PARAMETER Experiment Name: At_Guard_Cells_P Parameter: Harvest Date Value: 8/2/2002
  misc_feature: MA Experiment 20000495 PARAMETER Experiment Name: At_Guard_Cells_P Parameter: Organism Value: A. thaliana
  misc_feature: MA Experiment 20000495 PARAMETER Experiment Name: At_Guard_Cells_P Parameter: Tissue Value: Guard Cells vs. Leaves
  misc_feature: MA Experiment ID: 20000527 Result: Up-regulated in Transcription
  misc_feature: MA Experiment 20000527 PARAMETER Experiment Name: At_10percent_PEG_P Parameter: Age (day) Value: 20
  misc_feature: MA Experiment 20000527 PARAMETER Experiment Name: At_10percent_PEG_P Parameter: Organism Value: A. thaliana
  misc_feature: MA Experiment 20000527 PARAMETER Experiment Name: At_10percent_PEG_P Parameter: Plant Line Value: WS
  misc_feature: MA Experiment 20000527 PARAMETER Experiment Name: At_10percent_PEG_P Parameter: Timepoint (day) Value: 20
  misc_feature: MA Experiment 20000527 PARAMETER Experiment Name: At_10percent_PEG_P Parameter: Tissue Value: Whole Plant
  misc_feature: MA Experiment 20000527 PARAMETER Experiment Name: At_10percent_PEG_P Parameter: Treatment Value: 10percent PEG vs. No Treatment
  misc_feature: MA Experiment ID: 20000573 Result: Down-regulated in Transcription
  misc_feature: MA Experiment 20000573 PARAMETER Experiment Name: At_100uM_ABA_Mutants__P Parameter: Organism Value: A. thaliana
  misc_feature: MA Experiment 20000573 PARAMETER Experiment Name: At_100uM_ABA_Mutants__P Parameter: Plant Line Value: CS22 vs. Ler wt
  misc_feature: MA Experiment 20000573 PARAMETER Experiment Name: At_100uM_ABA_Mutants__P Parameter: Timepoint (hr) Value: N/A
  misc_feature: MA Experiment 20000573 PARAMETER Experiment Name: At_100uM_ABA_Mutants__P Parameter: Tissue Value: Whole Plant
  misc_feature: MA Experiment 20000573 PARAMETER Experiment Name: At_100uM_ABA_Mutants__P Parameter: Treatment Value: None
  misc_feature: MA Experiment ID: 20000574 Result: Down-regulated in Transcription
  misc_feature: MA Experiment 20000574 PARAMETER Experiment Name: At_100uM_ABA_Mutants__P Parameter: Organism Value: A. thaliana
  misc_feature: MA Experiment 20000574 PARAMETER Experiment Name: At_100uM_ABA_Mutants__P Parameter: Plant Line Value: CS23 vs. Ler wt
  misc_feature: MA Experiment 20000574 PARAMETER Experiment Name: At_100uM_ABA_Mutants__P Parameter: Timepoint (hr) Value: N/A
  misc_feature: MA Experiment 20000574 PARAMETER Experiment Name: At_100uM_ABA_Mutants__P Parameter: Tissue Value: Whole Plant
  misc_feature: MA Experiment 20000574 PARAMETER Experiment Name: At_100uM_ABA_Mutants__P Parameter: Treatment Value: None
  misc_feature: MA Experiment ID: 20001247 Result: Up-regulated in Transcription
  misc_feature: MA Experiment 20001247 PARAMETER Experiment Name: At_Far-red-induction_P Parameter: Age (day) Value: 7
  misc_feature: MA Experiment 20001247 PARAMETER Experiment Name: At_Far-red-induction_P Parameter: Light Value: Far-red vs. White
  misc_feature: MA Experiment 20001247 PARAMETER Experiment Name: At_Far-red-induction_P Parameter: Organism Value: A. thaliana
  misc_feature: MA Experiment 20001247 PARAMETER Experiment Name: At_Far-red-induction_P Parameter: Plant Line Value: Columbia
  misc_feature: MA Experiment 20001247 PARAMETER Experiment Name: At_Far-red-induction_P Parameter: Timepoint (hr) Value: 1
  misc_feature: MA Experiment 20001247 PARAMETER Experiment Name: At_Far-red-induction_P Parameter: Tissue Value: Whole Plant
  misc_feature: MA Experiment ID: 20001248 Result: Up-regulated in Transcription
  misc_feature: MA Experiment 20001248 PARAMETER Experiment Name: At_Far-red-induction_P Parameter: Age (day) Value: 7
  misc_feature: MA Experiment 20001248 PARAMETER Experiment Name: At_Far-red-induction_P Parameter: Light Value: Far-red vs. White
  misc_feature: MA Experiment 20001248 PARAMETER Experiment Name: At_Far-red-induction_P Parameter: Organism Value: A. thaliana
  misc_feature: MA Experiment 20001248 PARAMETER Experiment Name: At_Far-red-induction_P Parameter: Plant Line Value: Columbia
  misc_feature: MA Experiment 20001248 PARAMETER Experiment Name: At_Far-red-induction_P Parameter: Timepoint (hr) Value: 4
  misc_feature: MA Experiment 20001248 PARAMETER Experiment Name: At_Far-red-induction_P Parameter: Tissue Value: Whole Plant
  misc_feature: MA Experiment ID: 20001450 Result: Up-regulated in Transcription
  misc_feature: MA Experiment 20001450 PARAMETER Experiment Name: At_Far-red-induction_P Parameter: Age (day) Value: 7
  misc_feature: MA Experiment 20001450 PARAMETER Experiment Name: At_Far-red-induction_P Parameter: Light Value: Far-red vs. White
  misc_feature: MA Experiment 20001450 PARAMETER Experiment Name: At_Far-red-induction_P Parameter: Organism Value: A. thaliana
  misc_feature: MA Experiment 20001450 PARAMETER Experiment Name: At_Far-red-induction_P Parameter: Plant Line Value: Columbia
  misc_feature: MA Experiment 20001450 PARAMETER Experiment Name: At_Far-red-induction_P Parameter: Timepoint (hr) Value: 8
  misc_feature: MA Experiment 20001450 PARAMETER Experiment Name: At_Far-red-induction_P Parameter: Tissue Value: Whole Plant
  misc_feature: MA Experiment ID: 20001451 Result: Up-regulated in Transcription
  misc_feature: MA Experiment 20001451 PARAMETER Experiment Name: At_Far-red-induction_P Parameter: Age (day) Value: 7
  misc_feature: MA Experiment 20001451 PARAMETER Experiment Name: At_Far-red-induction_P Parameter: Light Value: Far-red vs. White
  misc_feature: MA Experiment 20001451 PARAMETER Experiment Name: At_Far-red-induction_P Parameter: Organism Value: A. thaliana
  misc_feature: MA Experiment 20001451 PARAMETER Experiment Name: At_Far-red-induction_P Parameter: Plant Line Value: Columbia
  misc_feature: MA Experiment 20001451 PARAMETER Experiment Name: At_Far-red-induction_P Parameter: Timepoint (hr) Value: 24
  misc_feature: MA Experiment 20001451 PARAMETER Experiment Name: At_Far-red-induction_P Parameter: Tissue Value: Whole Plant
  misc_feature: MA Experiment ID: 20001555 Result: Down-regulated in Transcription
  misc_feature: MA Experiment 20001555 PARAMETER Experiment Name: At_Drought_Soil_Dry_P Parameter: Age (day) Value: 24
  misc_feature: MA Experiment 20001555 PARAMETER Experiment Name: At_Drought_Soil_Dry_P Parameter: Organism Value: A. thaliana
  misc_feature: MA Experiment 20001555 PARAMETER Experiment Name: At_Drought_Soil_Dry_P Parameter: Plant Line Value: WS
  misc_feature: MA Experiment 20001555 PARAMETER Experiment Name: At_Drought_Soil_Dry_P Parameter: Post Timepoint (hr) Value: None
  misc_feature: MA Experiment 20001555 PARAMETER Experiment Name: At_Drought_Soil_Dry_P Parameter: Post-Treatment Value: None
  misc_feature: MA Experiment 20001555 PARAMETER Experiment Name: At_Drought_Soil_Dry_P Parameter: Timepoint (day) Value: 10
  misc_feature: MA Experiment 20001555 PARAMETER Experiment Name: At_Drought_Soil_Dry_P Parameter: Treatment Value: Drought vs. No Drought
  misc_feature: MA Experiment ID: 20001556 Result: Down-regulated in Transcription
  misc_feature: MA Experiment 20001556 PARAMETER Experiment Name: At_Drought_Soil_Dry_P Parameter: Age (day) Value: 26
  misc_feature: MA Experiment 20001556 PARAMETER Experiment Name: At_Drought_Soil_Dry_P Parameter: Organism Value: A. thaliana
  misc_feature: MA Experiment 20001556 PARAMETER Experiment Name: At_Drought_Soil_Dry_P Parameter: Plant Line Value: WS
  misc_feature: MA Experiment 20001556 PARAMETER Experiment Name: At_Drought_Soil_Dry_P Parameter: Post Timepoint (hr) Value: None
  misc_feature: MA Experiment 20001556 PARAMETER Experiment Name: At_Drought_Soil_Dry_P Parameter: Post-Treatment Value: None
  misc_feature: MA Experiment 20001556 PARAMETER Experiment Name: At_Drought_Soil_Dry_P Parameter: Timepoint (day) Value: 12
  misc_feature: MA Experiment 20001556 PARAMETER Experiment Name: At_Drought_Soil_Dry_P Parameter: Treatment Value: Drought vs. No Drought
  misc_feature: MA Experiment ID: 20001757 Result: Down-regulated in Transcription
  misc_feature: MA Experiment 20001757 PARAMETER Experiment Name: At_50mM_NH4NO3_L-to-H_P Parameter: Timepoint (hr) Value: 6
  misc_feature: MA Experiment 20001757 PARAMETER Experiment Name: At_50mM_NH4NO3_L-to-H_P Parameter: Tissue Value: Leaf
  misc_feature: MA Experiment 20001757 PARAMETER Experiment Name: At_50mM_NH4NO3_L-to-H_P Parameter: Treatment Value: 50mM NH4NO3 vs 100mM Mannitol
  misc_feature: MA Experiment ID: 20001774 Result: Down-regulated in Transcription
  misc_feature: MA Experiment 20001774 PARAMETER Experiment Name: At_Far-red-enriched-adult_P Parameter: Age (day) Value: 31
  misc_feature: MA Experiment 20001774 PARAMETER Experiment Name: At_Far-red-enriched-adult_P Parameter: Light Value: Far-red enriched vs. White
  misc_feature: MA Experiment 20001774 PARAMETER Experiment Name: At_Far-red-enriched-adult_P Parameter: Organism Value: A. thaliana
  misc_feature: MA Experiment 20001774 PARAMETER Experiment Name: At_Far-red-enriched-adult_P Parameter: Plant Line Value: Columbia
  misc_feature: MA Experiment 20001774 PARAMETER Experiment Name: At_Far-red-enriched-adult_P Parameter: Timepoint (hr) Value: 72
  misc_feature: MA Experiment 20001774 PARAMETER Experiment Name: At_Far-red-enriched-adult_P Parameter: Tissue Value: Aerial
  misc_feature: MA Experiment ID: 20001904 Result: Down-regulated in Transcription
  misc_feature: MA Experiment 20001904 PARAMETER Experiment Name: At_Drought_Reproduction_P Parameter: Age (day) Value: 37
  misc_feature: MA Experiment 20001904 PARAMETER Experiment Name: At_Drought_Reproduction_P Parameter: Organism Value: A. thaliana
  misc_feature: MA Experiment 20001904 PARAMETER Experiment Name: At_Drought_Reproduction_P Parameter: Plant Line Value: WS
  misc_feature: MA Experiment 20001904 PARAMETER Experiment Name: At_Drought_Reproduction_P Parameter: Timepoint (day) Value: 7
  misc_feature: MA Experiment 20001904 PARAMETER Experiment Name: At_Drought_Reproduction_P Parameter: Tissue Value: Rosettes
  misc_feature: MA Experiment 20001904 PARAMETER Experiment Name: At_Drought_Reproduction_P Parameter: Treatment Value: Drought vs. No Drought
  misc_feature: MA Experiment ID: 20001906 Result: Down-regulated in Transcription
  misc_feature: MA Experiment 20001906 PARAMETER Experiment Name: At_Drought_Reproduction_P Parameter: Age (day) Value: 35
  misc_feature: MA Experiment 20001906 PARAMETER Experiment Name: At_Drought_Reproduction_P Parameter: Organism Value: A. thaliana
  misc_feature: MA Experiment 20001906 PARAMETER Experiment Name: At_Drought_Reproduction_P Parameter: Plant Line Value: WS
  misc_feature: MA Experiment 20001906 PARAMETER Experiment Name: At_Drought_Reproduction_P Parameter: Timepoint (day) Value: 5
  misc_feature: MA Experiment 20001906 PARAMETER Experiment Name: At_Drought_Reproduction_P Parameter: Tissue Value: Siliques
  misc_feature: MA Experiment 20001906 PARAMETER Experiment Name: At_Drought_Reproduction_P Parameter: Treatment Value: Drought vs. No Drought
aaccaaaaagcttttcttcccaacacacacaaaaaaaaaaactgtaacgaccaaaaaaaaagaggacgcgttagaagaaaaaaaaagaacaatccgataaaaagatccggcgatgtcaaacccgacccgtaagaatatggagaggattaaaggtccatggagtccagaagaagatgatctgttgcagaggcttgttcagaaacatggtccgaggaactggtctttgattagcaaatcaatccctggacgttccggcaaatcttgtcgtctccggtggtgtaaccagctatctccggaggtagagcaccgtgctttttcgcaggaagaagacgagacgattattcgagctcacgctcggtttggtaacaagtgggctacgatctctcgtcttctcaatggacgaaccgataacgctatcaagaatcattggaactcgacgctgaagcgaaaatgcagcgtcgaagggcaaagttgtgattttggtggtaatggagggtatgatggtaatttaggagaagagcaaccgttgaaacgtacggcgagtggtggtggtggtgtctcgactggcttgtatatgagtcccggaagtccatcgggatctgacgtcagcgagcaatctagtggtggtgcacacgtgtttaaaccaacggttagatctgaggttacagcgtcatcgtctggtgaagatcctccaacttatcttagtttgtctcttccttggactgacgagacggttcgagtcaacgagccggttcaacttaaccagaatacggttatggacggtggttatacggcggagctgtttccggttagaaaggaagagcaagtggaagtagaagaagaagaagcgaaggggatatctggtggattcggtggtgagttcatgacggtggttcaggagatgataaggacggaggtgaggagttacatggcggatttacagcgaggaaacgtcggtggtagtagttctggcggcggaggtggcggttcgtgtatgccacaaagtgtaaacagccgtcgtgttgggtttagagagtttatagtgaaccaaatcggaattgggaagatggagtagagtgataagaacaagttttccctctgtttctcgggaaaataaaagtttcaggcttttcatgtatagagccagtagtagagacgacgaaaggaggaagcgaaatcaaaaaatgttttgttatcatcatcatatgatcttctttcgtgattcaattaaaagcaaagcaagatcatttattaacaatttacacaaacttgaagaagaaaagtcaaaaacacttctcaaacttttattc

SEQ ID NO: 30968 - protein, 320 aa, Arabidopsis thaliana; identical to SEQ ID NO: 24922
  peptide (1)..(320): Ceres Seq. ID no. 12697155
  misc_feature (13)..(59): Pfam Name: Myb-like DNA-binding domain Pfam Description: Myb-like DNA-binding domain
  misc_feature (10)..(292): Homolog of NCBI NO: 2129647 NR Description: myb-related protein, 33.2K - Arabidopsis thaliana
  misc_feature (10)..(292): Homolog of NCBI NO: 2832406 NR Description: R2R3-MYB transcription factor [Arabidopsis
  misc_feature (10)..(298): Homolog of NCBI NO: 2129648 NR Description: myb-related protein, 33.3K - Arabidopsis thaliana
  misc_feature (10)..(298): Homolog of NCBI NO: 21592897 NR Description: myb-related protein, 33.3K [Arabidopsis thaliana]
  misc_feature (10)..(298): Homolog of NCBI NO: 15450393 NR Description: AT5g67300/K8K14_2 [Arabidopsis thaliana]
  misc_feature (10)..(298): Homolog of NCBI NO: 15240708 NR Description: myb family transcription factor
  misc_feature (1)..(320): Homolog of NCBI NO: 15227806 NR Description: MYB family transcription factor
  misc_feature (1)..(320): Homolog of NCBI NO: 21593586 NR Description: putative MYB family transcription factor
  misc_feature (53)..(320): Homolog of NCBI NO: 11358558 NR Description: myb-related transcription factor MYB73
  misc_feature (1)..(320): Homolog of NCBI NO: 15235484 NR Description: myb DNA-binding protein (AtMYB73)

SEQ ID NO: 30969 - protein, 312 aa, Arabidopsis thaliana; identical to SEQ ID NO: 24923
  peptide (1)..(312): Ceres Seq. ID no. 12697156
  misc_feature (5)..(51): Pfam Name: Myb-like DNA-binding domain Pfam Description: Myb-like DNA-binding domain
  misc_feature (2)..(284): Homolog of NCBI NO: 2129647 NR Description: myb-related protein, 33.2K - Arabidopsis thaliana
  misc_feature (2)..(284): Homolog of NCBI NO: 2832406 NR Description: R2R3-MYB transcription factor [Arabidopsis
  misc_feature (2)..(290): Homolog of NCBI NO: 2129648 NR Description: myb-related protein, 33.3K - Arabidopsis thaliana
  misc_feature (2)..(290): Homolog of NCBI NO: 21592897 NR Description: myb-related protein, 33.3K [Arabidopsis thaliana]
  misc_feature (2)..(290): Homolog of NCBI NO: 15450393 NR Description: AT5g67300/K8K14_2 [Arabidopsis thaliana]
  misc_feature (2)..(290): Homolog of NCBI NO: 15240708 NR Description: myb family transcription factor
  misc_feature (1)..(312): Homolog of NCBI NO: 15227806 NR Description: MYB family transcription factor
  misc_feature (1)..(312): Homolog of NCBI NO: 21593586 NR Description: putative MYB family transcription factor
  misc_feature (45)..(312): Homolog of NCBI NO: 11358558 NR Description: myb-related transcription factor MYB73
  misc_feature (1)..(312): Homolog of NCBI NO: 15235484 NR Description: myb DNA-binding protein (AtMYB73)

SEQ ID NO: 30970 - protein, 166 aa, Arabidopsis thaliana; identical to SEQ ID NO: 24924
  peptide (1)..(166): Ceres Seq. ID no. 12697157
  misc_feature (1)..(138): Homolog of NCBI NO: 2129647 NR Description: myb-related protein, 33.2K - Arabidopsis thaliana
  misc_feature (1)..(138): Homolog of NCBI NO: 2832406 NR Description: R2R3-MYB transcription factor [Arabidopsis
  misc_feature (1)..(144): Homolog of NCBI NO: 2129648 NR Description: myb-related protein, 33.3K - Arabidopsis thaliana
  misc_feature (1)..(144): Homolog of NCBI NO: 21592897 NR Description: myb-related protein, 33.3K [Arabidopsis thaliana]
  misc_feature (1)..(144): Homolog of NCBI NO: 15450393 NR Description: AT5g67300/K8K14_2 [Arabidopsis thaliana]
  misc_feature (1)..(144): Homolog of NCBI NO: 15240708 NR Description: myb family transcription factor
  misc_feature (1)..(166): Homolog of NCBI NO: 15227806 NR Description: MYB family transcription factor
  misc_feature (1)..(166): Homolog of NCBI NO: 21593586 NR Description: putative MYB family transcription factor
  misc_feature (1)..(166): Homolog of NCBI NO: 11358558 NR Description: myb-related transcription factor MYB73
  misc_feature (1)..(166): Homolog of NCBI NO: 15235484 NR Description: myb DNA-binding protein (AtMYB73)

SEQ ID NO: 30971 - DNA, 1117 bp, Arabidopsis thaliana
  misc_feature (1)..(1117): Ceres Seq. ID no. 12321756
  misc_feature: MA Experiment ID: 108573 Result: Up-regulated in Transcription
  misc_feature: MA Experiment 108573 PARAMETER Experiment Name: At_Drought_cDNA_P Parameter: Timepoint (hr) Value: 6
  misc_feature: MA Experiment 108573 PARAMETER Experiment Name: At_Drought_cDNA_P Parameter: Tissue Value: Aerial
  misc_feature: MA Experiment 108573 PARAMETER Experiment Name: At_Drought_cDNA_P Parameter: Treatment Value: Drought vs. No Drought
  misc_feature: MA Experiment ID: 108579 Result: Down-regulated in Transcription
  misc_feature: MA Experiment 108579 PARAMETER Experiment Name: At_4deg_Cold_cDNA_P Parameter: Temperature (deg C) Value: 4 vs. 22
  misc_feature: MA Experiment 108579 PARAMETER Experiment Name: At_4deg_Cold_cDNA_P Parameter: Timepoint (hr) Value: 6
  misc_feature: MA Experiment 108579 PARAMETER Experiment Name: At_4deg_Cold_cDNA_P Parameter: Tissue Value: Aerial
  misc_feature: MA Experiment ID: 20000227 Result: Down-regulated in Transcription
  misc_feature: MA Experiment 20000227 PARAMETER Experiment Name: At_Root-Tips-vs-Tops_P Parameter: Tissue Value: Root Tips vs. Root Tops
  misc_feature: MA Experiment ID: 20001248 Result: Up-regulated in Transcription
  misc_feature: MA Experiment 20001248 PARAMETER Experiment Name: At_Far-red-induction_P Parameter: Age (day) Value: 7
  misc_feature: MA Experiment 20001248 PARAMETER Experiment Name: At_Far-red-induction_P Parameter: Light Value: Far-red vs. White
  misc_feature: MA Experiment 20001248 PARAMETER Experiment Name: At_Far-red-induction_P Parameter: Organism Value: A. thaliana
  misc_feature: MA Experiment 20001248 PARAMETER Experiment Name: At_Far-red-induction_P Parameter: Plant Line Value: Columbia
  misc_feature: MA Experiment 20001248 PARAMETER Experiment Name: At_Far-red-induction_P Parameter: Timepoint (hr) Value: 4
  misc_feature: MA Experiment 20001248 PARAMETER Experiment Name: At_Far-red-induction_P Parameter: Tissue Value: Whole Plant
  misc_feature: MA Experiment ID: 20001450 Result: Up-regulated in Transcription
  misc_feature: MA Experiment 20001450 PARAMETER Experiment Name: At_Far-red-induction_P Parameter: Age (day) Value: 7
  misc_feature: MA Experiment 20001450 PARAMETER Experiment Name: At_Far-red-induction_P Parameter: Light Value: Far-red vs. White
  misc_feature: MA Experiment 20001450 PARAMETER Experiment Name: At_Far-red-induction_P Parameter: Organism Value: A. thaliana
  misc_feature: MA Experiment 20001450 PARAMETER Experiment Name: At_Far-red-induction_P Parameter: Plant Line Value: Columbia
  misc_feature: MA Experiment 20001450 PARAMETER Experiment Name: At_Far-red-induction_P Parameter: Timepoint (hr) Value: 8
  misc_feature: MA Experiment 20001450 PARAMETER Experiment Name: At_Far-red-induction_P Parameter: Tissue Value: Whole Plant
agctctgtctaatctctctcgatcgacgactgctctctctctgaaccggagacggtgtcacgggacgaatctaatcgccgggaaaccgtttttttttttctctcggaaaatcgatttgaatctccggcgatctgatcgggatgagtaacatcgatctgattgggatgagtaaccgcgatctgatcgggatgagtaacagcgagcttctcaccgtcgagcctctcgatcttcaattcccttttgaattgaagaagcagatctcttgctctctctatttgacgaacaagaccgacaataatgttgcctttaaggttaagacgacgaatccgaaaaagtattgtgttaggcctaatactggagttgttctcccgaggtctacttgcgaagttcttgtgaccatgcaagctcaaaaggaagctccttccgatatgcagtgcaaggacaagtttctgcttcaaggtgtgatagctagtcctggtgtcacagccaaggaagttactcctgagatgtttagcaaagaggctggacatcgagttgaggaaactaaactgagagttacttatgttgctccaccacgaccaccatcaccggttcacgaaggatctgaagagggttcttcacccagggcttctgtctcagataatggacatggttctgaattttcgtttgagagatttatcgtggacaacaaggctggacatcaagaaaacacatctgaggcgagggcactcattaccaagctaaccgaagaaaaacagtctgccattcaactgaacaacagacttcaaagagaactggatcagttaaggcgtgaaagcaaaaagagccaaagtggtggtatcccattcatgtacgttcttttggtcggactcatcggtctaattttgggatacattatgaagaggacataaaccacccaccttgaaattaatccctcacccgccacgaaggaaaaaaaaaagacttttaactcttttcagtcggacatttttttctcttctgtatttgtcaatttcgccttaaaaaggtgtcttagaagatttgtgtttcgtaactcagtttgctatgtttttttcaacttttgtaatccaaatgactttgcgttggttctttctcc

SEQ ID NO: 30972 - protein, 256 aa, Arabidopsis thaliana
  peptide (1)..(256): Ceres Seq. ID no. 12321757
  misc_feature (18)..(175): Homolog of NCBI NO: 37535894 NR Description: putative vesicle-associated membrane protein
  misc_feature (13)..(173): Homolog of NCBI NO: 25405451 NR Description: hypothetical protein F11M15.13 [imported] -
  misc_feature (13)..(173): Homolog of NCBI NO: 15223792 NR Description: unknown protein; protein id: At1g51270.1
  misc_feature (17)..(255): Homolog of NCBI NO: 21592874 NR Description: putative proline-rich protein [Arabidopsis
  misc_feature (17)..(255): Homolog of NCBI NO: 18411240 NR Description: putative proline-rich protein
  misc_feature (17)..(256): Homolog of NCBI NO: 11288307 NR Description: 27k vesicle-associated membrane
  misc_feature (17)..(256): Homolog of NCBI NO: 15225415 NR Description: putative VAMP-associated protein
  misc_feature (17)..(256): Homolog of NCBI NO: 21554053 NR Description: putative VAMP-associated protein [Arabidopsis
  misc_feature (1)..(256): Homolog of NCBI NO: 11288305 NR Description: hypothetical protein T4C21.10 - Arabidopsis
  misc_feature (1)..(256): Homolog of NCBI NO: 18411661 NR Description: putative protein
MSNIDLIGMSNRDLIGMSNSELLTVEPLDLQFPFELKKQISCSLYLTNKTDNNVAFKVKTTNPKKYCVRPNTGVVLPRSTCEVLVTMQAQKEAPSDMQCKDKFLLQGVIASPGVTAKEVTPEMFSKEAGHRVEETKLRVTYVAPPRPPSPVHEGSEEGSSPRASVSDNGHGSEFSFERFIVDNKAGHQENTSEARALITKLTEEKQSAIQLNNRLQRELDQLRRESKKSQSGGIPFMYVLLVGLIGLILGYIMKRT

SEQ ID NO: 30973 - protein, 248 aa, Arabidopsis thaliana
  peptide (1)..(248): Ceres Seq. ID no. 12321758
  misc_feature (10)..(167): Homolog of NCBI NO: 37535894 NR Description: putative vesicle-associated membrane protein
  misc_feature (5)..(165): Homolog of NCBI NO: 25405451 NR Description: hypothetical protein F11M15.13 [imported] -
  misc_feature (5)..(165): Homolog of NCBI NO: 15223792 NR Description: unknown protein; protein id: At1g51270.1
  misc_feature (9)..(247): Homolog of NCBI NO: 21592874 NR Description: putative proline-rich protein [Arabidopsis
  misc_feature (9)..(247): Homolog of NCBI NO: 18411240 NR Description: putative proline-rich protein
  misc_feature (9)..(248): Homolog of NCBI NO: 11288307 NR Description: 27k vesicle-associated membrane
  misc_feature (9)..(248): Homolog of NCBI NO: 15225415 NR Description: putative VAMP-associated protein
  misc_feature (9)..(248): Homolog of NCBI NO: 21554053 NR Description: putative VAMP-associated protein [Arabidopsis
  misc_feature (1)..(248): Homolog of NCBI NO: 11288305 NR Description: hypothetical protein T4C21.10 - Arabidopsis
  misc_feature (1)..(248): Homolog of NCBI NO: 18411661 NR Description: putative protein
MSNRDLIGMSNSELLTVEPLDLQFPFELKKQISCSLYLTNKTDNNVAFKVKTTNPKKYCVRPNTGVVLPRSTCEVLVTMQAQKEAPSDMQCKDKFLLQGVIASPGVTAKEVTPEMFSKEAGHRVEETKLRVTYVAPPRPPSPVHEGSEEGSSPRASVSDNGHGSEFSFERFIVDNKAGHQENTSEARALITKLTEEKQSAIQLNNRLQRELDQLRRESKKSQSGGIPFMYVLLVGLIGLILGYIMKRT

SEQ ID NO: 30974 - protein, 240 aa, Arabidopsis thaliana
  peptide (1)..(240): Ceres Seq. ID no. 12321759
  misc_feature (2)..(159): Homolog of NCBI NO: 37535894 NR Description: putative vesicle-associated membrane protein
  misc_feature (1)..(157): Homolog of NCBI NO: 25405451 NR Description: hypothetical protein F11M15.13 [imported] -
  misc_feature (1)..(157): Homolog of NCBI NO: 15223792 NR Description: unknown protein; protein id: At1g51270.1
  misc_feature (1)..(239): Homolog of NCBI NO: 21592874 NR Description: putative proline-rich protein [Arabidopsis
  misc_feature (1)..(239): Homolog of NCBI NO: 18411240 NR Description: putative proline-rich protein
  misc_feature (1)..(240): Homolog of NCBI NO: 11288307 NR Description: 27k vesicle-associated membrane
  misc_feature (1)..(240): Homolog of NCBI NO: 15225415 NR Description: putative VAMP-associated protein
  misc_feature (1)..(240): Homolog of NCBI NO: 21554053 NR Description: putative VAMP-associated protein [Arabidopsis
  misc_feature (1)..(240): Homolog of NCBI NO: 11288305 NR Description: hypothetical protein T4C21.10 - Arabidopsis
  misc_feature (1)..(240): Homolog of NCBI NO: 18411661 NR Description: putative protein
MSNSELLTVEPLDLQFPFELKKQISCSLYLTNKTDNNVAFKVKTTNPKKYCVRPNTGVVLPRSTCEVLVTMQAQKEAPSDMQCKDKFLLQGVIASPGVTAKEVTPEMFSKEAGHRVEETKLRVTYVAPPRPPSPVHEGSEEGSSPRASVSDNGHGSEFSFERFIVDNKAGHQENTSEARALITKLTEEKQSAIQLNNRLQRELDQLRRESKKSQSGGIPFMYVLLVGLIGLILGYIMKRT

SEQ ID NO: 30975 - DNA, 1433 bp, Arabidopsis thaliana
  misc_feature (1)..(1433): Ceres Seq. ID no. 12324574
  misc_feature: MA Experiment ID: 108463 Result: Up-regulated in Transcription
  misc_feature: MA Experiment 108463 PARAMETER Experiment Name: At_Germinating_Seeds_cDNA_P Parameter: Age (day) Value: 3 vs. 0
  misc_feature: MA Experiment 108463 PARAMETER Experiment Name: At_Germinating_Seeds_cDNA_P Parameter: Tissue Value: Germinating Seeds
  misc_feature: MA Experiment ID: 108579 Result: Down-regulated in Transcription
  misc_feature: MA Experiment 108579 PARAMETER Experiment Name: At_4deg_Cold_cDNA_P Parameter: Temperature (deg C) Value: 4 vs. 22
  misc_feature: MA Experiment 108579 PARAMETER Experiment Name: At_4deg_Cold_cDNA_P Parameter: Timepoint (hr) Value: 6
  misc_feature: MA Experiment 108579 PARAMETER Experiment Name: At_4deg_Cold_cDNA_P Parameter: Tissue Value: Aerial
  misc_feature: MA Experiment ID: 20001248 Result: Up-regulated in Transcription
  misc_feature: MA Experiment 20001248 PARAMETER Experiment Name: At_Far-red-induction_P Parameter: Age (day) Value: 7
  misc_feature: MA Experiment 20001248 PARAMETER Experiment Name: At_Far-red-induction_P Parameter: Light Value: Far-red vs. White
  misc_feature: MA Experiment 20001248 PARAMETER Experiment Name: At_Far-red-induction_P Parameter: Organism Value: A. thaliana
  misc_feature: MA Experiment 20001248 PARAMETER Experiment Name: At_Far-red-induction_P Parameter: Plant Line Value: Columbia
  misc_feature: MA Experiment 20001248 PARAMETER Experiment Name: At_Far-red-induction_P Parameter: Timepoint (hr) Value: 4
  misc_feature: MA Experiment 20001248 PARAMETER Experiment Name: At_Far-red-induction_P Parameter: Tissue Value: Whole Plant
aaattcaaaaaaaatcttagatcaggtggaatctaccagagagcacgcgattctagatcgaatcaccggtgagtgacgccggagtttttatccccgcggcgaagagagtaaaccatttcttcttcccgatgtatcagtgaagttaagtagtcgagagaggggataatgatggaagtggaaggatcaatgaatcgtgctcctgatcaatcatccttcttacgatcaagacgatccaaagctctgtatcagtttaagcagcagaaactcccagcttgtaagccagtgttaacaccaatatcggttataacagtgtttatgttaatgggttttgttttcattcccattggtctcattactcttcgtgcttctcgtgatgctattgaaattatagatcggtatgatgttgagtgcattcctgaagaatatagaaccaacaaactgttgtatataactgattcatccatcccaaagaattgtacccgctacttgaaggtacaaaagtatatgaaagctcccatttttatctactaccagcttgataactactatcaaaaccatcgccggtatgtaaagagtagaagtgatcagcaactattacatggactggagtatagccacacaagttcttgtgaaccagaggagtcatctaatggtctcccaattgttccttgtgggttaatcgcttggagtatgttcaatgatacatttacgttttctcgtgaaagaacaaaactgaatgtgagccggaataacattgcgtggaagagtgaccgcgagcacaagtttggaaagaatgtgtatcctatcaatttccagaacggaactttgattggtggagcaaagttggatccaaaacttccactaagtgaccaagaggactttatagtgtggatgcgagcagctgctttgctaagcttccggaaattatatggaagaatcgaagaggacttggaaccaggaaaagttgttgaagtaaatttgatgaacaattacaacacttatagctttagtgggcagaagaagcttattctctccacatcaaattggttaggaggaagaaatgatttgcctgggcatcacctatcttgtcgttggttcctcttccgtagtcatatccatcatcttcatgttgctccatttgaaaaatccaaggccttacggcgacaattcttggaacaagaaaagcctttcaagttgagaagctgttacattctttctctaacatattcatattccaggttcatatatattcctacatattcaagagccatactttgtctatatatatatgatcatctaggtttaaggagtatataacgtatgtatgagcctatagttctagaaaactgaaggttcctctgttttctttacgatccttgtgtgttcggattgcgggttctaaagattcaacaaaaagataattgtttgacccc

SEQ ID NO: 30976 - protein, 383 aa, Arabidopsis thaliana
  peptide (1)..(383): Ceres Seq. ID no. 12324575
  misc_feature (64)..(303): Pfam Name: LEM3 (ligand-effect modulator 3) family / CDC50 family Pfam Description: LEM3 (ligand-effect modulator 3) family / CDC50
  misc_feature (20)..(304): Homolog of NCBI NO: 19570056 NR Description: similar to membrane protein common family
  misc_feature (29)..(303): Homolog of NCBI NO: 25347301 NR Description: T8K14.13 [imported] - Arabidopsis thaliana
  misc_feature (41)..(303): Homolog of NCBI NO: 15219220 NR Description: membrane protein common family; protein id:
  misc_feature (28)..(303): Homolog of NCBI NO: 25347303 NR Description: protein F3O9.16 [imported] - Arabidopsis thaliana
  misc_feature (13)..(303): Homolog of NCBI NO: 18399730 NR Description: membrane protein common family
  misc_feature (20)..(303): Homolog of NCBI NO: 18412377 NR Description: membrane protein common family
  misc_feature (15)..(303): Homolog of NCBI NO: 18404877 NR Description: membrane protein common family
  misc_feature (1)..(303): Homolog of NCBI NO: 9757735 NR Description: gb|AAD25612.1~gene_id:MCL19.21~similar to unknown
  misc_feature (8)..(303): Homolog of NCBI NO: 21554054 NR Description: unknown [Arabidopsis thaliana]
  misc_feature (1)..(303): Homolog of NCBI NO: 18422638 NR Description: membrane protein common family
MMEVEGSMNRAPDQSSFLRSRRSKALYQFKQQKLPACKPVLTPISVITVFMLMGFVFIPIGLITLRASRDAIEIIDRYDVECIPEEYRTNKLLYITDSSIPKNCTRYLKVQKYMKAPIFIYYQLDNYYQNHRRYVKSRSDQQLLHGLEYSHTSSCEPEESSNGLPIVPCGLIAWSMFNDTFTFSRERTKLNVSRNNIAWKSDREHKFGKNVYPINFQNGTLIGGAKLDPKLPLSDQEDFIVWMRAAALLSFRKLYGRIEEDLEPGKVVEVNLMNNYNTYSFSGQKKLILSTSNWLGGRNDLPGHHLSCRWFLFRSHIHHLHVAPFEKSKALRRQFLEQEKPFKLRSCYILSLTYSYSRFIYIPTYSRAILCLYIYDHLGLRSI

SEQ ID NO: 30977 - protein, 382 aa, Arabidopsis thaliana
  peptide (1)..(382): Ceres Seq. ID no. 12324576
  misc_feature (63)..(302): Pfam Name: LEM3 (ligand-effect modulator 3) family / CDC50 family Pfam Description: LEM3 (ligand-effect modulator 3) family / CDC50
  misc_feature (19)..(303): Homolog of NCBI NO: 19570056 NR Description: similar to membrane protein common family
  misc_feature (28)..(302): Homolog of NCBI NO: 25347301 NR Description: T8K14.13 [imported] - Arabidopsis thaliana
  misc_feature (40)..(302): Homolog of NCBI NO: 15219220 NR Description: membrane protein common family; protein id:
  misc_feature (27)..(302): Homolog of NCBI NO: 25347303 NR Description: protein F3O9.16 [imported] - Arabidopsis thaliana
  misc_feature (12)..(302): Homolog of NCBI NO: 18399730 NR Description: membrane protein common family
  misc_feature (19)..(302): Homolog of NCBI NO: 18412377 NR Description: membrane protein common family
  misc_feature (14)..(302): Homolog of NCBI NO: 18404877 NR Description: membrane protein common family
  misc_feature (1)..(302): Homolog of NCBI NO: 9757735 NR Description: gb|AAD25612.1~gene_id:MCL19.21~similar to unknown
  misc_feature (7)..(302): Homolog of NCBI NO: 21554054 NR Description: unknown [Arabidopsis thaliana]
  misc_feature (1)..(302): Homolog of NCBI NO: 18422638 NR Description: membrane protein common family
MEVEGSMNRAPDQSSFLRSRRSKALYQFKQQKLPACKPVLTPISVITVFMLMGFVFIPIGLITLRASRDAIEIIDRYDVECIPEEYRTNKLLYITDSSIPKNCTRYLKVQKYMKAPIFIYYQLDNYYQNHRRYVKSRSDQQLLHGLEYSHTSSCEPEESSNGLPIVPCGLIAWSMFNDTFTFSRERTKLNVSRNNIAWKSDREHKFGKNVYPINFQNGTLIGGAKLDPKLPLSDQEDFIVWMRAAALLSFRKLYGRIEEDLEPGKVVEVNLMNNYNTYSFSGQKKLILSTSNWLGGRNDLPGHHLSCRWFLFRSHIHHLHVAPFEKSKALRRQFLEQEKPFKLRSCYILSLTYSYSRFIYIPTYSRAILCLYIYDHLGLRSI

SEQ ID NO: 30978 - protein, 376 aa, Arabidopsis thaliana
  peptide (1)..(376): Ceres Seq. ID no. 12324577
  misc_feature (57)..(296): Pfam Name: LEM3 (ligand-effect modulator 3) family / CDC50 family Pfam Description: LEM3 (ligand-effect modulator 3) family / CDC50
  misc_feature (13)..(297): Homolog of NCBI NO: 19570056 NR Description: similar to membrane protein common family
  misc_feature (22)..(296): Homolog of NCBI NO: 25347301 NR Description: T8K14.13 [imported] - Arabidopsis thaliana
  misc_feature (34)..(296): Homolog of NCBI NO: 15219220 NR Description: membrane protein common family; protein id:
  misc_feature (21)..(296): Homolog of NCBI NO: 25347303 NR Description: protein F3O9.16 [imported] - Arabidopsis thaliana
  misc_feature (6)..(296): Homolog of NCBI NO: 18399730 NR Description: membrane protein common family
  misc_feature (13)..(296): Homolog of NCBI NO: 18412377 NR Description: membrane protein common family
  misc_feature (8)..(296): Homolog of NCBI NO: 18404877 NR Description: membrane protein common family
  misc_feature (1)..(296): Homolog of NCBI NO: 9757735 NR Description: gb|AAD25612.1~gene_id:MCL19.21~similar to unknown
  misc_feature (1)..(296): Homolog of NCBI NO: 21554054 NR Description: unknown [Arabidopsis thaliana]
  misc_feature (1)..(296): Homolog of NCBI NO: 18422638 NR Description: membrane protein common family
MNRAPDQSSFLRSRRSKALYQFKQQKLPACKPVLTPISVITVFMLMGFVFIPIGLITLRASRDAIEIIDRYDVECIPEEYRTNKLLYITDSSIPKNCTRYLKVQKYMKAPIFIYYQLDNYYQNHRRYVKSRSDQQLLHGLEYSHTSSCEPEESSNGLPIVPCGLIAWSMFNDTFTFSRERTKLNVSRNNIAWKSDREHKFGKNVYPINFQNGTLIGGAKLDPKLPLSDQEDFIVWMRAAALLSFRKLYGRIEEDLEPGKVVEVNLMNNYNTYSFSGQKKLILSTSNWLGGRNDLPGHHLSCRWFLFRSHIHHLHVAPFEKSKALRRQFLEQEKPFKLRSCYILSLTYSYSRFIYIPTYSRAILCLYIYDHLGLRSI

SEQ ID NO: 30979 - DNA, 822 bp, Arabidopsis thaliana
  misc_feature (1)..(822): Ceres Seq. ID no. 12321976
  misc_feature: MA Experiment ID: 108461 Result: Up-regulated in Transcription
  misc_feature: MA Experiment 108461 PARAMETER Experiment Name: At_Germinating_Seeds_cDNA_P Parameter: Age (day) Value: 1 vs. 0
  misc_feature: MA Experiment 108461 PARAMETER Experiment Name: At_Germinating_Seeds_cDNA_P Parameter: Tissue Value: Germinating Seeds
  misc_feature: MA Experiment ID: 20000179 Result: Up-regulated in Transcription
  misc_feature: MA Experiment 20000179 PARAMETER Experiment Name: At_Germinating_Seeds_P Parameter: Age (hr) Value: 6 vs. 0
  misc_feature: MA Experiment 20000179 PARAMETER Experiment Name: At_Germinating_Seeds_P Parameter: Tissue Value: Germinating Seeds
  misc_feature: MA Experiment ID: 20000224 Result: Down-regulated in Transcription
aactttgtcccaaaaatttattatagagcgaaccaatcaaacactagttcaatgtctctttcgttgatttctggttcgattcatatctgcgctgagcttcgtctccgtcaatctccgtcgtgtttaacaatctcttcttcgcggccaaaatttctctcttcccgtagtaagcagttctctctcgaccattttcctcagatctcacgtccgatcaaagtcatcgcgagaagcgccatggagacgacggcggagacaattaccggcggtgttcccaacaacacgatgaagttattgttcgttgagatgggtgtcggttacgatcagcacgggcaagatgtgacatctgcggcgatgaaggcttgtaagaatgcaatttcttcgaattcgattcctgcttttaggaggggttcgattcctggagtttcatttggagaaatgaagttgcagattaagcttggagtgcctcattctcttcaccagcagctggatttggacaaggttaagtctatcttcccatatgggaagattgtgaatgtagaggtggtggatggaggactgatttgctcaagcggtgttctagtcgaagaaatgggtgatacaaatgaagattgctacatagtgaatgtcgcagtctatgtcggttactagtctatcgttcttgtatggtcgactcgacgccgggtttaacaatgtcaccctcgtcgatagaagagaaaaacaaaaacaaatgcagtcacttttagttgtatattttgatttcagaaccattttggtttgtaggcgtgcagcgtttggtgcggtctagaaataatcacgtttgcc

SEQ ID NO: 30980 - protein, 215 aa, Arabidopsis thaliana
  peptide (1)..(215): Ceres Seq. ID no. 12321977
  misc_feature (96)..(215): Homolog of NCBI NO: 16802555 NR Description: lmo0512 [Listeria monocytogenes EGD-e]
  misc_feature (96)..(215): Homolog of NCBI NO: 23098421 NR Description: hypothetical protein [Oceanobacillus iheyensis
  misc_feature (97)..(215): Homolog of NCBI NO: 23098097 NR Description: hypothetical protein [Oceanobacillus iheyensis
  misc_feature (95)..(215): Homolog of NCBI NO: 37520060 NR Description: hypothetical protein glr0491 [Gloeobacter
  misc_feature (36)..(172): Homolog of NCBI NO: 34912624 NR Description: P0410E01.16 [Oryza sativa (japonica
  misc_feature (136)..(173): Homolog of NCBI NO: 25373109 NR Description: F28N24.25 protein - Arabidopsis thaliana
  misc_feature (18)..(110): Homolog of NCBI NO: 25373109 NR Description: F28N24.25 protein - Arabidopsis thaliana
  misc_feature (18)..(215): Homolog of NCBI NO: 30690579 NR Description: expressed protein [Arabidopsis thaliana]
  misc_feature (19)..(215): Homolog of NCBI NO: 21954066 NR Description: unknown protein [Arabidopsis thaliana]
  misc_feature (18)..(215): Homolog of NCBI NO: 18396927 NR Description: expressed protein
NFVPKIYYRANQSNTSSMSLSLISGSIHICAELRLRQSPSCLTISSSRPKFLSSRSKQFSLDHFPQISRPIKVIARSAMETTAETITGGVPNNTMKLLFVEMGVGYDQHGQDVTSAAMKACKNAISSNSIPAFRRGSIPGVSFGEMKLQIKLGVPHSLHQQLDLDKVKSIFPYGKIVNVEVVDGGLICSSGVLVEEMGDTNEDCYIVNVAVYVGY

SEQ ID NO: 30981 - protein, 198 aa, Arabidopsis thaliana
  peptide (1)..(198): Ceres Seq. ID no. 12321978
  misc_feature (79)..(198): Homolog of NCBI NO: 16802555 NR Description: lmo0512 [Listeria monocytogenes EGD-e]
  misc_feature (79)..(198): Homolog of NCBI NO: 23098421 NR Description: hypothetical protein [Oceanobacillus iheyensis
  misc_feature (80)..(198): Homolog of NCBI NO: 23098097 NR Description: hypothetical protein [Oceanobacillus iheyensis
  misc_feature (78)..(198): Homolog of NCBI NO: 37520060 NR Description: hypothetical protein glr0491 [Gloeobacter
  misc_feature (19)..(155): Homolog of NCBI NO: 34912624 NR Description: P0410E01.16 [Oryza sativa (japonica
  misc_feature (119)..(156): Homolog of NCBI NO: 25373109 NR Description: F28N24.25 protein - Arabidopsis thaliana
  misc_feature (1)..(93): Homolog of NCBI NO: 25373109 NR Description: F28N24.25 protein - Arabidopsis thaliana
  misc_feature (1)..(198): Homolog of NCBI NO: 30690579 NR Description: expressed protein [Arabidopsis thaliana]
  misc_feature (2)..(198): Homolog of NCBI NO: 21954066 NR Description: unknown protein [Arabidopsis thaliana]
  misc_feature (1)..(198): Homolog of NCBI NO: 18396927 NR Description: expressed protein
MSLSLISGSIHICAELRLRQSPSCLTISSSRPKFLSSRSKQFSLDHFPQISRPIKVIARSAMETTAETITGGVPNNTMKLLFVEMGVGYDQHGQDVTSAAMKACKNAISSNSIPAFRRGSIPGVSFGEMKLQIKLGVPHSLHQQLDLDKVKSIFPYGKIVNVEVVDGGLICSSGVLVEEMGDTNEDCYIVNVAVYVGY

SEQ ID NO: 30982 - protein, 137 aa, Arabidopsis thaliana
  peptide (1)..(137): Ceres Seq. ID no. 12321979
  misc_feature (18)..(137): Homolog of NCBI NO: 16802555 NR Description: lmo0512 [Listeria monocytogenes EGD-e]
  misc_feature (18)..(137): Homolog of NCBI NO: 23098421 NR Description: hypothetical protein [Oceanobacillus iheyensis
  misc_feature (19)..(137): Homolog of NCBI NO: 23098097 NR Description: hypothetical protein [Oceanobacillus iheyensis
  misc_feature (17)..(137): Homolog of NCBI NO: 37520060 NR Description: hypothetical protein glr0491 [Gloeobacter
  misc_feature (1)..(94): Homolog of NCBI NO: 34912624 NR Description: P0410E01.16 [Oryza sativa (japonica
  misc_feature (58)..(95): Homolog of NCBI NO: 25373109 NR Description: F28N24.25 protein - Arabidopsis thaliana
  misc_feature (1)..(32): Homolog of NCBI NO: 25373109 NR Description: F28N24.25 protein - Arabidopsis thaliana
  misc_feature (1)..(137): Homolog of NCBI NO: 30690579 NR Description: expressed protein [Arabidopsis thaliana]
  misc_feature (1)..(137): Homolog of NCBI NO: 21954066 NR Description: unknown protein [Arabidopsis thaliana]
  misc_feature (1)..(137): Homolog of NCBI NO: 18396927 NR Description: expressed protein
METTAETITGGVPNNTMKLLFVEMGVGYDQHGQDVTSAAMKACKNAISSNSIPAFRRGSIPGVSFGEMKLQIKLGVPHSLHQQLDLDKVKSIFPYGKIVNVEVVDGGLICSSGVLVEEMGDTNEDCYIVNVAVYVGY

SEQ ID NO: 30983 - DNA, 1168 bp, Arabidopsis thaliana
  misc_feature (1)..(1168): Ceres Seq. ID no. 12324578
  misc_feature: MA Experiment ID: 108434 Result: Down-regulated in Transcription
  misc_feature: MA Experiment 108434 PARAMETER Experiment Name: At_Root_Tips_cDNA_P Parameter: Tissue Value: Root Tips
  misc_feature: MA Experiment ID: 108435 Result: Down-regulated in Transcription
  misc_feature: MA Experiment 108435 PARAMETER Experiment Name: At_stm_Mutants_cDNA_P Parameter: Plant Line Value: wt Landsburg vs stm
  misc_feature: MA Experiment 108435 PARAMETER Experiment Name: At_stm_Mutants_cDNA_P Parameter: Tissue Value: Shoot Apical Meristem Region
  misc_feature: MA Experiment ID: 108462 Result: Up-regulated in Transcription
  misc_feature: MA Experiment 108462 PARAMETER Experiment Name: At_Germinating_Seeds_cDNA_P Parameter: Age (day) Value: 2 vs. 0
  misc_feature: MA Experiment 108462 PARAMETER Experiment Name: At_Germinating_Seeds_cDNA_P Parameter: Tissue Value: Germinating Seeds
  misc_feature: MA Experiment ID: 108463 Result: Up-regulated in Transcription
  misc_feature: MA Experiment 108463 PARAMETER Experiment Name: At_Germinating_Seeds_cDNA_P Parameter: Age (day) Value: 3 vs. 0
  misc_feature: MA Experiment 108463 PARAMETER Experiment Name: At_Germinating_Seeds_cDNA_P Parameter: Tissue Value: Germinating Seeds
  misc_feature: MA Experiment ID: 108464 Result: Up-regulated in Transcription
  misc_feature: MA Experiment 108464 PARAMETER Experiment Name: At_Germinating_Seeds_cDNA_P Parameter: Age (day) Value: 4 vs. 0
  misc_feature: MA Experiment 108464 PARAMETER Experiment Name: At_Germinating_Seeds_cDNA_P Parameter: Tissue Value: Germinating Seeds
  misc_feature: MA Experiment ID: 108561 Result: Down-regulated in Transcription
  misc_feature: MA Experiment 108561 PARAMETER Experiment Name: At_100uM_ABA_cDNA_P Parameter: Timepoint (hr) Value: 6
  misc_feature: MA Experiment 108561 PARAMETER Experiment Name: At_100uM_ABA_cDNA_P Parameter: Tissue Value: Aerial
  misc_feature: MA Experiment 108561 PARAMETER Experiment Name: At_100uM_ABA_cDNA_P Parameter: Treatment Value: 100uM ABA vs. No Treatment
  misc_feature: MA Experiment ID: 20000071 Result: Down-regulated in Transcription
  misc_feature: MA Experiment 20000071 PARAMETER Experiment Name: At_100uM_ABA_Mutants_cDNA_P Parameter: Plant Line Value: CS8104
  misc_feature: MA Experiment 20000071 PARAMETER Experiment Name: At_100uM_ABA_Mutants_cDNA_P Parameter: Timepoint (hr) Value: 6
  misc_feature: MA Experiment 20000071 PARAMETER Experiment Name: At_100uM_ABA_Mutants_cDNA_P Parameter: Tissue Value: Aerial
  misc_feature: MA Experiment 20000071 PARAMETER Experiment Name: At_100uM_ABA_Mutants_cDNA_P Parameter: Treatment Value: 100uM ABA vs. No Treatment
  misc_feature: MA Experiment ID: 20000086 Result: Down-regulated in Transcription
  misc_feature: MA Experiment 20000086 PARAMETER Experiment Name: At_100uM_ABA_Mutants_cDNA_P Parameter: Plant Line Value: CS22
  misc_feature: MA Experiment 20000086 PARAMETER Experiment Name: At_100uM_ABA_Mutants_cDNA_P Parameter: Timepoint (hr) Value: 6
  misc_feature: MA Experiment 20000086 PARAMETER Experiment Name: At_100uM_ABA_Mutants_cDNA_P Parameter: Tissue Value: Aerial
  misc_feature: MA Experiment 20000086 PARAMETER Experiment Name: At_100uM_ABA_Mutants_cDNA_P Parameter: Treatment Value: 100uM ABA vs. No Treatment
  misc_feature: MA Experiment ID: 20000087 Result: Down-regulated in Transcription
  misc_feature: MA Experiment 20000087 PARAMETER Experiment Name: At_100uM_ABA_Mutants_cDNA_P Parameter: Plant Line Value: WS
  misc_feature: MA Experiment 20000087 PARAMETER Experiment Name: At_100uM_ABA_Mutants_cDNA_P Parameter: Timepoint (hr) Value: 6
  misc_feature: MA Experiment 20000087 PARAMETER Experiment Name: At_100uM_ABA_Mutants_cDNA_P Parameter: Tissue Value: Aerial
  misc_feature: MA Experiment 20000087 PARAMETER Experiment Name: At_100uM_ABA_Mutants_cDNA_P Parameter: Treatment Value: 100uM ABA vs. No Treatment
  misc_feature: MA Experiment ID: 20000113 Result: Up-regulated in Transcription
  misc_feature: MA Experiment 20000113 PARAMETER Experiment Name: At_42deg_Heat_cDNA_P Parameter: Temperature (deg C) Value: 42 vs. 22
  misc_feature: MA Experiment 20000113 PARAMETER Experiment Name: At_42deg_Heat_cDNA_P Parameter: Timepoint (hr) Value: 8
  misc_feature: MA Experiment 20000113 PARAMETER Experiment Name: At_42deg_Heat_cDNA_P Parameter: Tissue Value: Aerial
  misc_feature: MA Experiment ID: 20000144 Result: Down-regulated in Transcription
  misc_feature: MA Experiment 20000144 PARAMETER Experiment Name: At_42deg_Heat_cDNA_P Parameter: Temperature (deg C) Value: 42 vs. 22
  misc_feature: MA Experiment 20000144 PARAMETER Experiment Name: At_42deg_Heat_cDNA_P Parameter: Timepoint (hr) Value: 1
  misc_feature: MA Experiment 20000144 PARAMETER Experiment Name: At_42deg_Heat_cDNA_P Parameter: Tissue Value: Aerial
  misc_feature: MA Experiment ID: 20000184 Result: Up-regulated in Transcription
  misc_feature: MA Experiment 20000184 PARAMETER Experiment Name: At_Shoots__P Parameter: Age (day) Value: 7
  misc_feature: MA Experiment 20000184 PARAMETER Experiment Name: At_Shoots__P Parameter: Tissue Value: Shoots vs. Whole Plant
  misc_feature: MA Experiment ID: 20000264 Result: Down-regulated in Transcription
  misc_feature: MA Experiment 20000264 PARAMETER Experiment Name: At_Open_Flower_P Parameter: Age (day) Value: 21
  misc_feature: MA Experiment 20000264 PARAMETER Experiment Name: At_Open_Flower_P Parameter: Plant Line Value: WS
  misc_feature: MA Experiment 20000264 PARAMETER Experiment Name: At_Open_Flower_P Parameter: Tissue Value: Open Flower vs. Whole Plant
  misc_feature: MA Experiment ID: 20000268 Result: Down-regulated in Transcription
  misc_feature: MA Experiment 20000268 PARAMETER Experiment Name: At_100mM_NaCl__P Parameter: Age (day) Value: 14
  misc_feature: MA Experiment 20000268 PARAMETER Experiment Name: At_100mM_NaCl__P Parameter: Organism Value: A. thaliana
  misc_feature: MA Experiment 20000268 PARAMETER Experiment Name: At_100mM_NaCl__P Parameter: Plant Line Value: WS
  misc_feature: MA Experiment 20000268 PARAMETER Experiment Name: At_100mM_NaCl__P Parameter: Timepoint (hr) Value: 6
  misc_feature: MA Experiment 20000268 PARAMETER Experiment Name: At_100mM_NaCl__P Parameter: Tissue Value: Whole Plant
  misc_feature: MA Experiment 20000268 PARAMETER Experiment Name: At_100mM_NaCl__P Parameter: Treatment Value: 100mM NaCl vs. No Treatment
  misc_feature: MA Experiment ID: 20000288 Result: Down-regulated in Transcription
  misc_feature: MA Experiment 20000288 PARAMETER Experiment Name: At_Drought_P Parameter: Age (day) Value: 7
  misc_feature: MA Experiment 20000288 PARAMETER Experiment Name: At_Drought_P Parameter: Organism Value: A. thaliana
  misc_feature: MA Experiment 20000288 PARAMETER Experiment Name: At_Drought_P Parameter: Plant Line Value: WS
  misc_feature: MA Experiment 20000288 PARAMETER Experiment Name: At_Drought_P Parameter: Timepoint (hr) Value: 1
  misc_feature: MA Experiment 20000288 PARAMETER Experiment Name: At_Drought_P Parameter: Tissue Value: Whole Plant
  misc_feature: MA Experiment 20000288 PARAMETER Experiment Name: At_Drought_P Parameter: Treatment Value: Drought vs. No Drought
  misc_feature: MA Experiment ID: 20000441 Result: Up-regulated in Transcription
  misc_feature: MA Experiment 20000441 PARAMETER Experiment Name: At_1uM_BR-BRZ__P Parameter: Tissue Value: Shoot Apices
  misc_feature: MA Experiment 20000441 PARAMETER Experiment Name: At_1uM_BR-BRZ__P Parameter: Treatment Value: 1uM BR vs. No Treatment
  misc_feature: MA Experiment ID: 20000460 Result: Up-regulated in Transcription
  misc_feature: MA Experiment 20000460 PARAMETER Experiment Name: At_10percent_PEG_P Parameter: Age (day) Value: 12
  misc_feature: MA Experiment 20000460 PARAMETER Experiment Name: At_10percent_PEG_P Parameter: Organism Value: A. thaliana
  misc_feature: MA Experiment 20000460 PARAMETER Experiment Name: At_10percent_PEG_P Parameter: Plant Line Value: WS
  misc_feature: MA Experiment 20000460 PARAMETER Experiment Name: At_10percent_PEG_P Parameter: Timepoint (day) Value: 12
  misc_feature: MA Experiment 20000460 PARAMETER Experiment Name: At_10percent_PEG_P Parameter: Tissue Value: Whole Plant
  misc_feature: MA Experiment 20000460 PARAMETER Experiment Name: At_10percent_PEG_P Parameter: Treatment Value: 10percent PEG vs. No Treatment
  misc_feature: MA Experiment ID: 20000495 Result: Down-regulated in Transcription
  misc_feature: MA Experiment 20000495 PARAMETER Experiment Name: At_Guard_Cells_P Parameter: Harvest Date Value: 8/2/2002
  misc_feature: MA Experiment 20000495 PARAMETER Experiment Name: At_Guard_Cells_P Parameter: Organism Value: A. thaliana
  misc_feature: MA Experiment 20000495 PARAMETER Experiment Name: At_Guard_Cells_P Parameter: Tissue Value: Guard Cells vs. Leaves
  misc_feature: MA Experiment ID: 20000527 Result: Up-regulated in Transcription
  misc_feature: MA Experiment 20000527 PARAMETER Experiment Name: At_10percent_PEG_P Parameter: Age (day) Value: 20
  misc_feature: MA Experiment 20000527 PARAMETER Experiment Name: At_10percent_PEG_P Parameter: Organism Value: A. thaliana
  misc_feature: MA Experiment 20000527 PARAMETER Experiment Name: At_10percent_PEG_P Parameter: Plant Line Value: WS
  misc_feature: MA Experiment 20000527 PARAMETER Experiment Name: At_10percent_PEG_P Parameter: Timepoint (day) Value: 20
  misc_feature: MA Experiment 20000527 PARAMETER Experiment Name: At_10percent_PEG_P Parameter: Tissue Value: Whole Plant
  misc_feature: MA Experiment 20000527 PARAMETER Experiment Name: At_10percent_PEG_P Parameter: Treatment Value: 10percent PEG vs. No Treatment
  misc_feature: MA Experiment ID: 20001247 Result: Up-regulated in Transcription
  misc_feature: MA Experiment 20001247 PARAMETER Experiment Name: At_Far-red-induction_P Parameter: Age (day) Value: 7
  misc_feature: MA Experiment 20001247 PARAMETER Experiment Name: At_Far-red-induction_P Parameter: Light Value: Far-red vs. White
  misc_feature: MA Experiment 20001247 PARAMETER Experiment Name: At_Far-red-induction_P Parameter: Organism Value: A. thaliana
  misc_feature: MA Experiment 20001247 PARAMETER Experiment Name: At_Far-red-induction_P Parameter: Plant Line Value: Columbia
  misc_feature: MA Experiment 20001247 PARAMETER Experiment Name: At_Far-red-induction_P Parameter: Timepoint (hr) Value: 1
  misc_feature: MA Experiment 20001247 PARAMETER Experiment Name: At_Far-red-induction_P Parameter: Tissue Value: Whole Plant
  misc_feature: MA Experiment ID: 20001450 Result: Up-regulated in Transcription
  misc_feature: MA Experiment 20001450 PARAMETER Experiment Name: At_Far-red-induction_P Parameter: Age (day) Value: 7
  misc_feature: MA Experiment 20001450 PARAMETER Experiment Name: At_Far-red-induction_P Parameter: Light Value: Far-red vs. White
  misc_feature: MA Experiment 20001450 PARAMETER Experiment Name: At_Far-red-induction_P Parameter: Organism Value: A. thaliana
  misc_feature: MA Experiment 20001450 PARAMETER Experiment Name: At_Far-red-induction_P Parameter: Plant Line Value: Columbia
  misc_feature: MA Experiment 20001450 PARAMETER Experiment Name: At_Far-red-induction_P Parameter: Timepoint (hr) Value: 8
  misc_feature: MA Experiment 20001450 PARAMETER Experiment Name: At_Far-red-induction_P Parameter: Tissue Value: Whole Plant
  misc_feature: MA Experiment ID: 20001557 Result: Up-regulated in Transcription
  misc_feature: MA Experiment 20001557 PARAMETER Experiment Name: At_Drought_Soil_Dry_P Parameter: Age (day) Value: 27
  misc_feature: MA Experiment 20001557 PARAMETER Experiment Name: At_Drought_Soil_Dry_P Parameter: Organism Value: A. thaliana
  misc_feature: MA Experiment 20001557 PARAMETER Experiment Name: At_Drought_Soil_Dry_P Parameter: Plant Line Value: WS
  misc_feature: MA Experiment 20001557 PARAMETER Experiment Name: At_Drought_Soil_Dry_P Parameter: Post Timepoint (hr) Value: 3
  misc_feature: MA Experiment 20001557 PARAMETER Experiment Name: At_Drought_Soil_Dry_P Parameter: Post-Treatment Value: Re-Water vs. No Drought
  misc_feature: MA Experiment 20001557 PARAMETER Experiment Name: At_Drought_Soil_Dry_P Parameter: Timepoint (day) Value: 13
  misc_feature: MA Experiment 20001557 PARAMETER Experiment Name: At_Drought_Soil_Dry_P Parameter: Treatment Value: Drought vs. No Drought
  misc_feature: MA Experiment ID: 20001558 Result: Up-regulated in Transcription
  misc_feature: MA Experiment 20001558 PARAMETER Experiment Name: At_Drought_Soil_Dry_P Parameter: Age (day) Value: 27
  misc_feature: MA Experiment 20001558 PARAMETER Experiment Name: At_Drought_Soil_Dry_P Parameter: Organism Value: A. thaliana
  misc_feature: MA Experiment 20001558 PARAMETER Experiment Name: At_Drought_Soil_Dry_P Parameter: Plant Line Value: WS
  misc_feature: MA Experiment 20001558 PARAMETER Experiment Name: At_Drought_Soil_Dry_P Parameter: Post Timepoint (hr) Value: 6
  misc_feature: MA Experiment 20001558 PARAMETER Experiment Name: At_Drought_Soil_Dry_P Parameter: Post-Treatment Value: Re-Water vs. No Drought
  misc_feature: MA Experiment 20001558 PARAMETER Experiment Name: At_Drought_Soil_Dry_P Parameter: Timepoint (day) Value: 13
  misc_feature: MA Experiment 20001558 PARAMETER Experiment Name: At_Drought_Soil_Dry_P Parameter: Treatment Value: Drought vs. No Drought
  misc_feature: MA Experiment ID: 20001774 Result: Down-regulated in Transcription
  misc_feature: MA Experiment 20001774 PARAMETER Experiment Name: At_Far-red-enriched-adult_P Parameter: Age (day) Value: 31
  misc_feature: MA Experiment 20001774 PARAMETER Experiment Name: At_Far-red-enriched-adult_P Parameter: Light Value: Far-red enriched vs. White
  misc_feature: MA Experiment 20001774 PARAMETER Experiment Name: At_Far-red-enriched-adult_P Parameter: Organism Value: A. thaliana
  misc_feature: MA Experiment 20001774 PARAMETER Experiment Name: At_Far-red-enriched-adult_P Parameter: Plant Line Value: Columbia
  misc_feature: MA Experiment 20001774 PARAMETER Experiment Name: At_Far-red-enriched-adult_P Parameter: Timepoint (hr) Value: 72
  misc_feature: MA Experiment 20001774 PARAMETER Experiment Name: At_Far-red-enriched-adult_P Parameter: Tissue Value: Aerial
  misc_feature: MA Experiment ID: 20001904 Result: Down-regulated in Transcription
  misc_feature: MA Experiment 20001904 PARAMETER Experiment Name: At_Drought_Reproduction_P Parameter: Age (day) Value: 37
  misc_feature: MA Experiment 20001904 PARAMETER Experiment Name: At_Drought_Reproduction_P Parameter: Organism Value: A. thaliana
  misc_feature: MA Experiment 20001904 PARAMETER Experiment Name: At_Drought_Reproduction_P Parameter: Plant Line Value: WS
  misc_feature: MA Experiment 20001904 PARAMETER Experiment Name: At_Drought_Reproduction_P Parameter: Timepoint (day) Value: 7
  misc_feature: MA Experiment 20001904 PARAMETER Experiment Name: At_Drought_Reproduction_P Parameter: Tissue Value: Rosettes
  misc_feature: MA Experiment 20001904 PARAMETER Experiment Name: At_Drought_Reproduction_P Parameter: Treatment Value: Drought vs. No Drought
atcaaaaaatctctatccatccacaacaacaacaaaaactcaagaacaatatctccacttgatcactaccacattgtccaatcactctacaaagcctgtacgtacacaacaacattaccatggtgaaacaagaacgcaagatccaaaccagcagcacaaaaaaggaaatgcctttgtcatcatcaccatcttcttcttcttcttcttcatcttcttcctcgtcttcgtcttcgtgtaagaacaagaacaagaagagtaagattaagaagtacaaaggagtgaggatgagaagttggggatcatgggtctctgagattagggcaccaaatcaaaagacaaggatttggttaggttcttactcaacagctgaagcagctgctagagcttacgatgttgcactcttatgtctcaaaggccctcaagccaatctcaacttccctacttcttcttcttctcatcatcttcttgataatctcttagatgaaaatacccttttgtcccccaaatccatccaaagagtagctgctcaagctgccaactcatttaaccattttgcccctacttcatcagccgtctcgtcaccgtccgatcatgatcatcaccatgatgatgggatgcaatctttgatgggatcttttgtggacaatcatgtgtctttgatggattcaacatcttcatggtatgatgatcataatgggatgttcttgtttgataatggagctccattcaattactctcctcaactaaactcgacgacgatgctcgatgaatacttctacgaagatgctgacattccgctttggagtttcaattaatccgacggtccataatacatactttaattagttttctaaatcattttttaaattcttttttatatatgtaacatatatttaccctcgtcgtaattattcatttccaagttgtttgttgcttggagagaattgacgacggatacgattatataatataattgtaagtttttatatgtagcaaactcggtacaattcggatttaatagggatctaggaagttcacatgaacaagcgactcttttttttgtcacttctttgactttttcatgtgaggtttcttttcatcaattttttttaacaatgtgtgaaaatatttctgtattgtaatgatatatttcgcacaatagttttgc

SEQ ID NO: 30984 - protein, 231 aa, Arabidopsis thaliana
  peptide (1)..(231): Ceres Seq. ID no. 12324579
  misc_feature (48)..(112): Pfam Name: AP2 domain Pfam Description: AP2 domain
  misc_feature (23)..(156): Homolog of NCBI NO: 15239113 NR Description: transcription factor TINY, putative; protein id:
  misc_feature (20)..(159): Homolog of NCBI NO: 38605845 NR Description: OSJNBb0034G17.3 [Oryza sativa (japonica
  misc_feature (1)..(198): Homolog of NCBI NO: 15232340 NR Description: transcription factor - like protein; protein id:
  misc_feature (18)..(153): Homolog of NCBI NO: 38605848 NR Description: OSJNBb0034G17.6 [Oryza sativa (japonica
  misc_feature (10)..(164): Homolog of NCBI NO: 14140163 NR Description: putative AP2 domain containing protein [Oryza
  misc_feature (48)..(143): Homolog of NCBI NO: 34902130 NR Description: hypothetical protein [Oryza sativa (japonica
  misc_feature (13)..(230): Homolog of NCBI NO: 15219452 NR Description: transcription factor, putative; protein id:
  misc_feature (1)..(192): Homolog of NCBI NO: 15224024 NR Description: hypothetical protein; protein id: At1g77640.1
  misc_feature (1)..(231): Homolog of NCBI NO: 15219139 NR Description: TINY-like protein
  misc_feature (1)..(231): Homolog of NCBI NO: 21554056 NR Description: TINY-like protein [Arabidopsis thaliana]
MVKQERKIQTSSTKKEMPLSSSPSSSSSSSSSSSSSSSCKNKNKKSKIKKYKGVRMRSWGSWVSEIRAPNQKTRIWLGSYSTAEAAARAYDVALLCLKGPQANLNFPTSSSSHHLLDNLLDENTLLSPKSIQRVAAQAANSFNHFAPTSSAVSSPSDHDHHHDDGMQSLMGSFVDNHVSLMDSTSSWYDDHNGMFLFDNGAPFNYSPQLNSTTMLDEYFYEDADIPLWSFN

SEQ ID NO: 30985 - protein, 215 aa, Arabidopsis thaliana
  peptide (1)..(215): Ceres Seq. ID no. 12324580
  misc_feature (32)..(96): Pfam Name: AP2 domain Pfam Description: AP2 domain
  misc_feature (7)..(140): Homolog of NCBI NO: 15239113 NR Description: transcription factor TINY, putative; protein id:
  misc_feature (4)..(143): Homolog of NCBI NO: 38605845 NR Description: OSJNBb0034G17.3 [Oryza sativa (japonica
  misc_feature (1)..(182): Homolog of NCBI NO: 15232340 NR Description: transcription factor - like protein; protein id:
  misc_feature (2)..(137): Homolog of NCBI NO: 38605848 NR Description: OSJNBb0034G17.6 [Oryza sativa (japonica
  misc_feature (1)..(148): Homolog of NCBI NO: 14140163 NR Description: putative AP2 domain containing protein [Oryza
  misc_feature (32)..(127): Homolog of NCBI NO: 34902130 NR Description: hypothetical protein [Oryza sativa (japonica
  misc_feature (1)..(214): Homolog of NCBI NO: 15219452 NR Description: transcription factor, putative; protein id:
  misc_feature (1)..(176): Homolog of NCBI NO: 15224024 NR Description: hypothetical protein; protein id: At1g77640.1
  misc_feature (1)..(215): Homolog of NCBI NO: 15219139 NR Description: TINY-like protein
  misc_feature (1)..(215): Homolog of NCBI NO: 21554056 NR Description: TINY-like protein [Arabidopsis thaliana]
MPLSSSPSSSSSSSSSSSSSSSCKNKNKKSKIKKYKGVRMRSWGSWVSEIRAPNQKTRIWLGSYSTAEAAARAYDVALLCLKGPQANLNFPTSSSSHHLLDNLLDENTLLSPKSIQRVAAQAANSFNHFAPTSSAVSSPSDHDHHHDDGMQSLMGSFVDNHVSLMDSTSSWYDDHNGMFLFDNGAPFNYSPQLNSTTMLDEYFYEDADIPLWSFN

SEQ ID NO: 30986 - protein, 176 aa, Arabidopsis thaliana
  peptide (1)..(176): Ceres Seq. ID no. 12324581
  misc_feature (1)..(57): Pfam Name: AP2 domain Pfam Description: AP2 domain
  misc_feature (1)..(101): Homolog of NCBI NO: 15239113 NR Description: transcription factor TINY, putative; protein id:
  misc_feature (1)..(104): Homolog of NCBI NO: 38605845 NR Description: OSJNBb0034G17.3 [Oryza sativa (japonica
  misc_feature (1)..(143): Homolog of NCBI NO: 15232340 NR Description: transcription factor - like protein; protein id:
  misc_feature (1)..(98): Homolog of NCBI NO: 38605848 NR Description: OSJNBb0034G17.6 [Oryza sativa (japonica
  misc_feature (1)..(109): Homolog of NCBI NO: 14140163 NR Description: putative AP2 domain containing protein [Oryza
  misc_feature (1)..(88): Homolog of NCBI NO: 34902130 NR Description: hypothetical protein [Oryza sativa (japonica
  misc_feature (1)..(175): Homolog of NCBI NO: 15219452 NR Description: transcription factor, putative; protein id:
  misc_feature (1)..(137): Homolog of NCBI NO: 15224024 NR Description: hypothetical protein; protein id: At1g77640.1
  misc_feature (1)..(176): Homolog of NCBI NO: 15219139 NR Description: TINY-like protein
  misc_feature (1)..(176): Homolog of NCBI NO: 21554056 NR Description: TINY-like protein [Arabidopsis thaliana]
MRSWGSWVSEIRAPNQKTRIWLGSYSTAEAAARAYDVALLCLKGPQANLNFPTSSSSHHLLDNLLDENTLLSPKSIQRVAAQAANSFNHFAPTSSAVSSPSDHDHHHDDGMQSLMGSFVDNHVSLMDSTSSWYDDHNGMFLFDNGAPFNYSPQLNSTTMLDEYFYEDADIPLWSFN

SEQ ID NO: 30987 - DNA, 941 bp, Arabidopsis thaliana
  misc_feature (1)..(941): Ceres Seq. ID no. 12340295
  misc_feature: MA Experiment ID: 108569 Result: Up-regulated in Transcription
  misc_feature: MA Experiment 108569 PARAMETER Experiment Name: At_0.001%_MeJA__cDNA_P Parameter: Timepoint (hr) Value: 6
  misc_feature: MA Experiment 108569 PARAMETER Experiment Name: At_0.001%_MeJA__cDNA_P Parameter: Tissue Value: Aerial
  misc_feature: MA Experiment 108569 PARAMETER Experiment Name: At_0.001%_MeJA__cDNA_P Parameter: Treatment Value: 0.001% MeJA vs. No Treatment
  misc_feature: MA Experiment ID: 108573 Result: Up-regulated in Transcription
  misc_feature: MA Experiment 108573 PARAMETER Experiment Name: At_Drought_cDNA_P Parameter: Timepoint (hr) Value: 6
  misc_feature: MA Experiment 108573 PARAMETER Experiment Name: At_Drought_cDNA_P Parameter: Tissue Value: Aerial
  misc_feature: MA Experiment 108573 PARAMETER Experiment Name: At_Drought_cDNA_P Parameter: Treatment Value: Drought vs. No Drought
  misc_feature: MA Experiment ID: 20000111 Result: Up-regulated in Transcription
  misc_feature: MA Experiment 20000111 PARAMETER Experiment Name: At_42deg_Heat_cDNA_P Parameter: Temperature (deg C) Value: 42 vs. 22
  misc_feature: MA Experiment 20000111 PARAMETER Experiment Name: At_42deg_Heat_cDNA_P Parameter: Timepoint (hr) Value: 6
  misc_feature: MA Experiment 20000111 PARAMETER Experiment Name: At_42deg_Heat_cDNA_P Parameter: Tissue Value: Aerial
  misc_feature: MA Experiment ID: 20000112 Result: Up-regulated in Transcription
  misc_feature: MA Experiment 20000112 PARAMETER Experiment Name: At_42deg_Heat_cDNA_P Parameter: Temperature (deg C) Value: 42 vs. 22
  misc_feature: MA Experiment 20000112 PARAMETER Experiment Name: At_42deg_Heat_cDNA_P Parameter: Timepoint (hr) Value: 2
  misc_feature: MA Experiment 20000112 PARAMETER Experiment Name: At_42deg_Heat_cDNA_P Parameter: Tissue Value: Aerial
  misc_feature: MA Experiment ID: 20000113 Result: Up-regulated in Transcription
  misc_feature: MA Experiment 20000113 PARAMETER Experiment Name: At_42deg_Heat_cDNA_P Parameter: Temperature (deg C) Value: 42 vs. 22
  misc_feature: MA Experiment 20000113 PARAMETER Experiment Name: At_42deg_Heat_cDNA_P Parameter: Timepoint (hr) Value: 8
  misc_feature: MA Experiment 20000113 PARAMETER Experiment Name: At_42deg_Heat_cDNA_P Parameter: Tissue Value: Aerial
  misc_feature: MA Experiment ID: 20000224 Result: Down-regulated in Transcription
  misc_feature: MA Experiment ID: 20000227 Result: Down-regulated in Transcription
  misc_feature: MA Experiment 20000227 PARAMETER Experiment Name: At_Root-Tips-vs-Tops_P Parameter: Tissue Value: Root Tips vs. Root Tops
  misc_feature: MA Experiment ID: 20000234 Result: Down-regulated in Transcription
  misc_feature: MA Experiment 20000234 PARAMETER Experiment Name: At_Siliques_P Parameter: Age (day) Value: 21
  misc_feature: MA Experiment 20000234 PARAMETER Experiment Name: At_Siliques_P Parameter: Organism Value: A. thaliana
  misc_feature: MA Experiment 20000234 PARAMETER Experiment Name: At_Siliques_P Parameter: Plant Line Value: WS
  misc_feature: MA Experiment 20000234 PARAMETER Experiment Name: At_Siliques_P Parameter: Tissue Value: Less Than 5mm Siliques vs. Whole Plant
  misc_feature: MA Experiment ID: 20000264 Result: Down-regulated in Transcription
  misc_feature: MA Experiment 20000264 PARAMETER Experiment Name: At_Open_Flower_P Parameter: Age (day) Value: 21
  misc_feature: MA Experiment 20000264 PARAMETER Experiment Name: At_Open_Flower_P Parameter: Plant Line Value: WS
  misc_feature: MA Experiment 20000264 PARAMETER Experiment Name: At_Open_Flower_P Parameter: Tissue Value: Open Flower vs. Whole Plant
  misc_feature: MA Experiment ID: 20000265 Result: Down-regulated in Transcription
  misc_feature: MA Experiment 20000265 PARAMETER Experiment Name: At_Open_Flower_P Parameter: Age (day) Value: 21
  misc_feature: MA Experiment 20000265 PARAMETER Experiment Name: At_Open_Flower_P Parameter: Plant Line Value: WS
  misc_feature: MA Experiment 20000265 PARAMETER Experiment Name: At_Open_Flower_P Parameter: Tissue Value: Closed Flower vs. Whole Plant
  misc_feature: MA Experiment ID: 20000286 Result: Down-regulated in Transcription
  misc_feature: MA Experiment 20000286 PARAMETER Experiment Name: At_Open_Flower_P Parameter: Age (day) Value: 21
  misc_feature: MA Experiment 20000286 PARAMETER Experiment Name: At_Open_Flower_P Parameter: Plant Line Value: WS
  misc_feature: MA Experiment 20000286 PARAMETER Experiment Name: At_Open_Flower_P Parameter: Tissue Value: Half Open vs. Whole Plant
  misc_feature: MA Experiment ID: 20000496 Result: Down-regulated in Transcription
  misc_feature: MA Experiment 20000496 PARAMETER Experiment Name: At_Guard_Cells_P Parameter: Harvest Date Value: 7/19/2002
  misc_feature: MA Experiment 20000496 PARAMETER Experiment Name: At_Guard_Cells_P Parameter: Organism Value: Canola
  misc_feature: MA Experiment 20000496 PARAMETER Experiment Name: At_Guard_Cells_P Parameter: Tissue Value: Guard Cells vs. Leaves
  misc_feature: MA Experiment ID: 20000794 Result: Down-regulated in Transcription
  misc_feature: MA Experiment 20000794 PARAMETER Experiment Name: At_Petals_P Parameter: Age (day) Value: 23-25 days
  misc_feature: MA Experiment 20000794 PARAMETER Experiment Name: At_Petals_P Parameter: Plant Line Value: WS
  misc_feature: MA Experiment 20000794 PARAMETER Experiment Name: At_Petals_P Parameter: Tissue Value: Petals vs. Whole plant
  misc_feature: MA Experiment ID: 20001558 Result: Down-regulated in Transcription
  misc_feature: MA Experiment 20001558 PARAMETER Experiment Name: At_Drought_Soil_Dry_P Parameter: Age (day) Value: 27
  misc_feature: MA Experiment 20001558 PARAMETER Experiment Name: At_Drought_Soil_Dry_P Parameter: Organism Value: A. thaliana
  misc_feature: MA Experiment 20001558 PARAMETER Experiment Name: At_Drought_Soil_Dry_P Parameter: Plant Line Value: WS
  misc_feature: MA Experiment 20001558 PARAMETER Experiment Name: At_Drought_Soil_Dry_P Parameter: Post Timepoint (hr) Value: 6
  misc_feature: MA Experiment 20001558 PARAMETER Experiment Name: At_Drought_Soil_Dry_P Parameter: Post-Treatment Value: Re-Water vs. No Drought
  misc_feature: MA Experiment 20001558 PARAMETER Experiment Name: At_Drought_Soil_Dry_P Parameter: Timepoint (day) Value: 13
  misc_feature: MA Experiment 20001558 PARAMETER Experiment Name: At_Drought_Soil_Dry_P Parameter: Treatment Value: Drought vs. No Drought
  misc_feature: MA Experiment ID: 20001560 Result: Down-regulated in Transcription
  misc_feature: MA Experiment 20001560 PARAMETER Experiment Name: At_Drought_Soil_Dry_P Parameter: Age (day) Value: 28
  misc_feature: MA Experiment 20001560 PARAMETER Experiment Name: At_Drought_Soil_Dry_P Parameter: Organism Value: A. thaliana
  misc_feature: MA Experiment 20001560 PARAMETER Experiment Name: At_Drought_Soil_Dry_P Parameter: Plant Line Value: WS
  misc_feature: MA Experiment 20001560 PARAMETER Experiment Name: At_Drought_Soil_Dry_P Parameter: Post Timepoint (hr) Value: None
  misc_feature: MA Experiment 20001560 PARAMETER Experiment Name: At_Drought_Soil_Dry_P Parameter: Post-Treatment Value: None
  misc_feature: MA Experiment 20001560 PARAMETER Experiment Name: At_Drought_Soil_Dry_P Parameter: Timepoint (day) Value: 14
  misc_feature: MA Experiment 20001560 PARAMETER Experiment Name: At_Drought_Soil_Dry_P Parameter: Treatment Value: Drought vs. No Drought
gacaaaccaaaaaaaaagcctaaaaagccgaccttttttctttctttctctcctctacctctcagcttctgctggatctctccagcagacacgatcttgttcggagagattcgtaggggaccgatctatcaaggcttcaagggcaaacagaaatggaccacgacaagacaggatgccaaagcccacctgaaggtcccaagctatgtactaacaactgcggtttctttgaagcgctgccacaatgaacatgtgttctaagtgtcacaaggatatgttgttccaacagtagcagggcgctaagtttgcatctgcagtgtctggaacatcgtcatccagcaacatcataaaggaaacctttaccgctgcgttggtcgatattgaaaccaaatccgttgagccgatgactgtttctgtacagccatcctctgtccaagtcgttgcagaggtagtagcaccagaagaagctgcgaaaccaaagggaccaagccgatgtactacttgcaataagcgggttggcctgactggattcaaatgtcgctgtgggagcctcttctgcggaaaacacaccgctatgcagacatacatgactgctccttcaattaccatgctgctgcgcaagaggcgatagctaaggcaaacccggttgtgaaagcagagaagcttgacaaaatctgaaaatctaagtaaacttctctggtttcatcaggtggcctggtttttccttctcctgtctgtgtctggttcaagtattctcatgttaaaaaggttttatataaggtcgaatgaaagcgtgcttgatctttagcgtcttccatctctctgcaatatttgtggtgtggaactttctattatctgtgtttgcaagcagagaaacgtgctcttaaaaaaaatgctttgtgtgtttatctttctactatttttgagcactgtgttattgtttc

SEQ ID NO: 30988 - protein, 85 aa, Arabidopsis thaliana
  peptide (1)..(85): Ceres Seq. ID no. 12340296
DKPKKKPKKPTFFLSFSPLPLSFCWISPADTILFGEIRRGPIYQGFKGKQKWTTTRQDAKAHLKVPSYVLTTAVSLKRCHNEHVF

SEQ ID NO: 30989 - protein, 75 aa, Arabidopsis thaliana
  peptide (1)..(75): Ceres Seq. ID no. 12340297
  misc_feature (1)..(55): Homolog of NCBI NO: 15221329 NR Description: hypothetical protein; protein id: At1g12440.1
  misc_feature (1)..(55): Homolog of NCBI NO: 15225894 NR Description: putative zinc finger protein
  misc_feature (1)..(55): Homolog of NCBI NO: 14596167 NR Description: zinc finger-like protein [Arabidopsis thaliana]
  misc_feature (1)..(55): Homolog of NCBI NO: 15234402 NR Description: putative protein
  misc_feature (1)..(55): Homolog of NCBI NO: 18404102 NR Description: expressed protein
  misc_feature (1)..(55): Homolog of NCBI NO: 15231686 NR Description: zinc finger - like protein
  misc_feature (1)..(55): Homolog of NCBI NO: 35187687 NR Description: zinc-finger protein [Oryza sativa (indica
  misc_feature (1)..(55): Homolog of NCBI NO: 11361253 NR Description: hypothetical protein p85RF [imported] - Prunus
  misc_feature (1)..(55): Homolog of NCBI NO: 25082726 NR Description: expressed protein [Arabidopsis thaliana]
  misc_feature (1)..(55): Homolog of NCBI NO: 18403408 NR Description: expressed protein
MTVSVQPSSVQVVAEVVAPEEAAKPKGPSRCTTCNKRVGLTGFKCRCGSLFCGKHTAMQTYMTAPSITMLLRKRR

SEQ ID NO: 30990 - protein, 62 aa, Arabidopsis thaliana
  peptide (1)..(62): Ceres Seq. ID no. 12340298
  misc_feature (18)..(62): Homolog of NCBI NO: 8778645 NR Description: F5O11.17 [Arabidopsis thaliana]
TNQKKSLKSRPFFFLSLLYLSASAGSLQQTRSCSERFVGDRSIKASRANRNGPRQDRMPKPT

SEQ ID NO: 30991 - DNA, 1219 bp, Arabidopsis thaliana
  misc_feature (1)..(1219): Ceres Seq. ID no. 12481880
  misc_feature: MA Experiment ID: 108435 Result: Down-regulated in Transcription
  misc_feature: MA Experiment 108435 PARAMETER Experiment Name: At_stm_Mutants_cDNA_P Parameter: Plant Line Value: wt Landsburg vs stm
  misc_feature: MA Experiment 108435 PARAMETER Experiment Name: At_stm_Mutants_cDNA_P Parameter: Tissue Value: Shoot Apical Meristem Region
  misc_feature: MA Experiment ID: 108462 Result: Up-regulated in Transcription
  misc_feature: MA Experiment 108462 PARAMETER Experiment Name: At_Germinating_Seeds_cDNA_P Parameter: Age (day) Value: 2 vs. 0
  misc_feature: MA Experiment 108462 PARAMETER Experiment Name: At_Germinating_Seeds_cDNA_P Parameter: Tissue Value: Germinating Seeds
  misc_feature: MA Experiment ID: 108463 Result: Up-regulated in Transcription
  misc_feature: MA Experiment 108463 PARAMETER Experiment Name: At_Germinating_Seeds_cDNA_P Parameter: Age (day) Value: 3 vs. 0
  misc_feature: MA Experiment 108463 PARAMETER Experiment Name: At_Germinating_Seeds_cDNA_P Parameter: Tissue Value: Germinating Seeds
  misc_feature: MA Experiment ID: 108464 Result: Up-regulated in Transcription
  misc_feature: MA Experiment 108464 PARAMETER Experiment Name: At_Germinating_Seeds_cDNA_P Parameter: Age (day) Value: 4 vs. 0
  misc_feature: MA Experiment 108464 PARAMETER Experiment Name: At_Germinating_Seeds_cDNA_P Parameter: Tissue Value: Germinating Seeds
  misc_feature: MA Experiment ID: 108595 Result: Down-regulated in Transcription
  misc_feature: MA Experiment 108595 PARAMETER Experiment Name: At_Ler-pi_Ovule_cDNA_P Parameter: Plant Line Value: null
  misc_feature: MA Experiment ID: 20000087 Result: Down-regulated in Transcription
  misc_feature: MA Experiment 20000087 PARAMETER Experiment Name: At_100uM_ABA_Mutants_cDNA_P Parameter: Plant Line Value: WS
  misc_feature: MA Experiment 20000087 PARAMETER Experiment Name: At_100uM_ABA_Mutants_cDNA_P Parameter: Timepoint (hr) Value: 6
  misc_feature: MA Experiment 20000087 PARAMETER Experiment Name: At_100uM_ABA_Mutants_cDNA_P Parameter: Tissue Value: Aerial
  misc_feature: MA Experiment 20000087 PARAMETER Experiment Name: At_100uM_ABA_Mutants_cDNA_P Parameter: Treatment Value: 100uM ABA vs. No Treatment
  misc_feature: MA Experiment ID: 20000113 Result: Up-regulated in Transcription
  misc_feature: MA Experiment 20000113 PARAMETER Experiment Name: At_42deg_Heat_cDNA_P Parameter: Temperature (deg C) Value: 42 vs. 22
  misc_feature: MA Experiment 20000113 PARAMETER Experiment Name: At_42deg_Heat_cDNA_P Parameter: Timepoint (hr) Value: 8
  misc_feature: MA Experiment 20000113 PARAMETER Experiment Name: At_42deg_Heat_cDNA_P Parameter: Tissue Value: Aerial
  misc_feature: MA Experiment ID: 20000224 Result: Down-regulated in Transcription
  misc_feature: MA Experiment ID: 20000439 Result: Down-regulated in Transcription
  misc_feature: MA Experiment 20000439 PARAMETER Experiment Name: At_Roots__P Parameter: Age (day) Value: 14 vs. 21
  misc_feature: MA Experiment 20000439 PARAMETER Experiment Name: At_Roots__P Parameter: Organism Value: A. thaliana
  misc_feature: MA Experiment 20000439 PARAMETER Experiment Name: At_Roots__P Parameter: Tissue Value: Roots vs. Whole Plant
  misc_feature: MA Experiment ID: 20000495 Result: Down-regulated in Transcription
  misc_feature: MA Experiment 20000495 PARAMETER Experiment Name: At_Guard_Cells_P Parameter: Harvest Date Value: 8/2/2002
  misc_feature: MA Experiment 20000495 PARAMETER Experiment Name: At_Guard_Cells_P Parameter: Organism Value: A. thaliana
  misc_feature: MA Experiment 20000495 PARAMETER Experiment Name: At_Guard_Cells_P Parameter: Tissue Value: Guard Cells vs. Leaves
gtagtaattaccccgtttaacccgcgttaattacgcttgtgtccctacgcgcgtctcaaagatctctctcttctctggagaaaaaataaaacaaaagaacagcgttcgccgagagatatacatactcggatcagtcgtcaaaagctttggaatttgatacttttgatttttcgagaatcttgaaaatcagtcatgggttctggaaaagagcgtgacactttcgtctacctcgctaagctctctgagcaagctgagcgttatgaagaaatggtggaatcaatgaaaagtgttgcgaaattgaatgttgatctgacggtggaagagaggaacttactctctgtgggttacaagaacgtgattggttcaaggagagcttcgtggaggatcttctcgtcgattgaacaaaaggaagcagtgaaagggaatgatgttaatgtaaagaggatcaaagagtatatggagaaggttgagttagagctttctaacatatgcattgatattatgtctgtcttagatgagcatctcattccttcggcttccgagggtgaatctactgtcttcttcaacaagatgaaaggtgactattaccgctatcttgctgagttcaaatcagggaacgagaggaaagaggctgctgatcagtctttgaaagcctatgagattgctactactgctgctgaggctaagctccctccaacacaccctatcagattgggtttggctttgaatttctctgtcttctactacgagatcatgaacgcacctgaaagggcatgtcaccttgctaagcaggcgttcgatgaagctatctcagagcttgacactctgaacgaggaatcctacaaagatagcaccttaataatgcaactccttagggacaatctgaccttgtggacttctgacatctcagaagaaggaggagacgatgctcataagacgaatggttctgccaaacctggtgctggtggagacgatgcagagtgatatgatatgtgtgcacctggacaatatgtttcaagaactgaatgtgcggtgaataatagtgaaaagtagagtttctctgttccctatatcatgattgtctatgttacttgtactctggtttagccctaaatgtctctctggtttgaatgtattgcatgcctgtctcaggacactcttatttgtaattcactactgtcgtcttactatctatccttatggatccaatcttgaaact

SEQ ID NO: 30992 - protein, 263 aa, Arabidopsis thaliana
  peptide (1)..(263): Ceres Seq. ID no. 12481881
  misc_feature (7)..(242): Pfam Name: 14-3-3 protein Pfam Description: 14-3-3 protein
  misc_feature (1)..(263): Homolog of NCBI NO: 2822483 NR Description: 14-3-3 protein homolog [Maackia amurensis]
  misc_feature (1)..(263): Homolog of NCBI NO: 1168192 NR Description: 14-3-3-LIKE PROTEIN B (VFA-1433B)
  misc_feature (1)..(263): Homolog of NCBI NO: 1531629 NR Description: GF14 mu [Arabidopsis thaliana]
  misc_feature (1)..(263): Homolog of NCBI NO: 18406007 NR Description: 14-3-3 protein GF14 mu (grf9)
MGSGKERDTFVYLAKLSEQAERYEEMVESMKSVAKLNVDLTVEERNLLSVGYKNVIGSRRASWRIFSSIEQKEAVKGNDVNVKRIKEYMEKVELELSNICIDIMSVLDEHLIPSASEGESTVFFNKMKGDYYRYLAEFKSGNERKEAADQSLKAYEIATTAAEAKLPPTHPIRLGLALNFSVFYYEIMNAPERACHLAKQAFDEAISELDTLNEESYKDSTLIMQLLRDNLTLWTSDISEEGGDDAHKTNGSAKPGAGGDDAE

SEQ ID NO: 30993 - protein, 238 aa, Arabidopsis thaliana
  peptide (1)..(238): Ceres Seq. ID no. 12481882
  misc_feature (1)..(217): Pfam Name: 14-3-3 protein Pfam Description: 14-3-3 protein
  misc_feature (1)..(238): Homolog of NCBI NO: 2822483 NR Description: 14-3-3 protein homolog [Maackia amurensis]
  misc_feature (1)..(238): Homolog of NCBI NO: 1168192 NR Description: 14-3-3-LIKE PROTEIN B (VFA-1433B)
  misc_feature (1)..(238): Homolog of NCBI NO: 1531629 NR Description: GF14 mu [Arabidopsis thaliana]
  misc_feature (1)..(238): Homolog of NCBI NO: 18406007 NR Description: 14-3-3 protein GF14 mu (grf9)
MVESMKSVAKLNVDLTVEERNLLSVGYKNVIGSRRASWRIFSSIEQKEAVKGNDVNVKRIKEYMEKVELELSNICIDIMSVLDEHLIPSASEGESTVFFNKMKGDYYRYLAEFKSGNERKEAADQSLKAYEIATTAAEAKLPPTHPIRLGLALNFSVFYYEIMNAPERACHLAKQAFDEAISELDTLNEESYKDSTLIMQLLRDNLTLWTSDISEEGGDDAHKTNGSAKPGAGGDDAE

SEQ ID NO: 30994 - protein, 234 aa, Arabidopsis thaliana
  peptide (1)..(234): Ceres Seq. ID no. 12481883
  misc_feature (1)..(213): Pfam Name: 14-3-3 protein Pfam Description: 14-3-3 protein
  misc_feature (1)..(234): Homolog of NCBI NO: 2822483 NR Description: 14-3-3 protein homolog [Maackia amurensis]
  misc_feature (1)..(234): Homolog of NCBI NO: 1168192 NR Description: 14-3-3-LIKE PROTEIN B (VFA-1433B)
  misc_feature (1)..(234): Homolog of NCBI NO: 1531629 NR Description: GF14 mu [Arabidopsis thaliana]
  misc_feature (1)..(234): Homolog of NCBI NO: 18406007 NR Description: 14-3-3 protein GF14 mu (grf9)
MKSVAKLNVDLTVEERNLLSVGYKNVIGSRRASWRIFSSIEQKEAVKGNDVNVKRIKEYMEKVELELSNICIDIMSVLDEHLIPSASEGESTVFFNKMKGDYYRYLAEFKSGNERKEAADQSLKAYEIATTAAEAKLPPTHPIRLGLALNFSVFYYEIMNAPERACHLAKQAFDEAISELDTLNEESYKDSTLIMQLLRDNLTLWTSDISEEGGDDAHKTNGSAKPGAGGDDAE

SEQ ID NO: 30995 - DNA, 905 bp, Arabidopsis thaliana
  misc_feature (1)..(905): Ceres Seq. ID no. 13490791
  misc_feature: MA Experiment ID: 108434 Result: Down-regulated in Transcription
  misc_feature: MA Experiment 108434 PARAMETER Experiment Name: At_Root_Tips_cDNA_P Parameter: Tissue Value: Root Tips
  misc_feature: MA Experiment ID: 108461 Result: Up-regulated in Transcription
  misc_feature: MA Experiment 108461 PARAMETER Experiment Name: At_Germinating_Seeds_cDNA_P Parameter: Age (day) Value: 1 vs. 0
  misc_feature: MA Experiment 108461 PARAMETER Experiment Name: At_Germinating_Seeds_cDNA_P Parameter: Tissue Value: Germinating Seeds
  misc_feature: MA Experiment ID: 108462 Result: Up-regulated in Transcription
  misc_feature: MA Experiment 108462 PARAMETER Experiment Name: At_Germinating_Seeds_cDNA_P Parameter: Age (day) Value: 2 vs. 0
  misc_feature: MA Experiment 108462 PARAMETER Experiment Name: At_Germinating_Seeds_cDNA_P Parameter: Tissue Value: Germinating Seeds
  misc_feature: MA Experiment ID: 108463 Result: Up-regulated in Transcription
  misc_feature: MA Experiment 108463 PARAMETER Experiment Name: At_Germinating_Seeds_cDNA_P Parameter: Age (day) Value: 3 vs. 0
  misc_feature: MA Experiment 108463 PARAMETER Experiment Name: At_Germinating_Seeds_cDNA_P Parameter: Tissue Value: Germinating Seeds
  misc_feature: MA Experiment ID: 108464 Result: Up-regulated in Transcription
  misc_feature: MA Experiment 108464 PARAMETER Experiment Name: At_Germinating_Seeds_cDNA_P Parameter: Age (day) Value: 4 vs. 0
  misc_feature: MA Experiment 108464 PARAMETER Experiment Name: At_Germinating_Seeds_cDNA_P Parameter: Tissue Value: Germinating Seeds
  misc_feature: MA Experiment ID: 108488 Result: Up-regulated in Transcription
  misc_feature: MA Experiment ID: 108489 Result: Up-regulated in Transcription
  misc_feature: MA Experiment ID: 108501 Result: Down-regulated in Transcription
  misc_feature: MA Experiment 108501 PARAMETER Experiment Name: At_ap2_floral_buds_cDNA_P Parameter: Plant Line Value: ap2 (Ler.)
  misc_feature: MA Experiment 108501 PARAMETER Experiment Name: At_ap2_floral_buds_cDNA_P Parameter: Tissue Value: Closed Flower
  misc_feature: MA Experiment ID: 108607 Result: Down-regulated in Transcription
  misc_feature: MA Experiment 108607 PARAMETER Experiment Name: At_100uM_ABA_cDNA_P Parameter: Timepoint (hr) Value: 4
  misc_feature: MA Experiment 108607 PARAMETER Experiment Name: At_100uM_ABA_cDNA_P Parameter: Tissue Value: Aerial
  misc_feature: MA Experiment 108607 PARAMETER Experiment Name: At_100uM_ABA_cDNA_P Parameter: Treatment Value: 100uM ABA vs. No Treatment
  misc_feature: MA Experiment ID: 20000113 Result: Down-regulated in Transcription
  misc_feature: MA Experiment 20000113 PARAMETER Experiment Name: At_42deg_Heat_cDNA_P Parameter: Temperature (deg C) Value: 42 vs. 22
  misc_feature: MA Experiment 20000113 PARAMETER Experiment Name: At_42deg_Heat_cDNA_P Parameter: Timepoint (hr) Value: 8
  misc_feature: MA Experiment 20000113 PARAMETER Experiment Name: At_42deg_Heat_cDNA_P Parameter: Tissue Value: Aerial
  misc_feature: MA Experiment ID: 20000180 Result: Up-regulated in Transcription
  misc_feature: MA Experiment 20000180 PARAMETER Experiment Name: At_Germinating_Seeds_P Parameter: Age (hr) Value: 24 vs. 0
  misc_feature: MA Experiment 20000180 PARAMETER Experiment Name: At_Germinating_Seeds_P Parameter: Tissue Value: Germinating Seeds
  misc_feature: MA Experiment ID: 20000182 Result: Up-regulated in Transcription
  misc_feature: MA Experiment 20000182 PARAMETER Experiment Name: At_2mM_SA_P Parameter: Age (day) Value: 14
  misc_feature: MA Experiment 20000182 PARAMETER Experiment Name: At_2mM_SA_P Parameter: Organism Value: A. thaliana
  misc_feature: MA Experiment 20000182 PARAMETER Experiment Name: At_2mM_SA_P Parameter: Plant Line Value: WS
  misc_feature: MA Experiment 20000182 PARAMETER Experiment Name: At_2mM_SA_P Parameter: Timepoint (hr) Value: 6
  misc_feature: MA Experiment 20000182 PARAMETER Experiment Name: At_2mM_SA_P Parameter: Tissue Value: Aerial
  misc_feature: MA Experiment 20000182 PARAMETER Experiment Name: At_2mM_SA_P Parameter: Treatment Value: 2mM SA vs. No Treatment
  misc_feature: MA Experiment ID: 20000185 Result: Up-regulated in Transcription
  misc_feature: MA Experiment 20000185 PARAMETER Experiment Name: At_Roots__P Parameter: Age (day) Value: 7 vs. 21
  misc_feature: MA Experiment 20000185 PARAMETER Experiment Name: At_Roots__P Parameter: Organism Value: A. thaliana
  misc_feature: MA Experiment 20000185 PARAMETER Experiment Name: At_Roots__P Parameter: Tissue Value: Roots vs. Whole Plant
  misc_feature: MA Experiment ID: 20000224 Result: Down-regulated in Transcription
  misc_feature: MA Experiment ID: 20000227 Result: Down-regulated in Transcription
  misc_feature: MA Experiment 20000227 PARAMETER Experiment Name: At_Root-Tips-vs-Tops_P Parameter: Tissue Value: Root Tips vs. Root Tops
  misc_feature: MA Experiment ID: 20000234 Result: Down-regulated in Transcription
  misc_feature: MA Experiment 20000234 PARAMETER Experiment Name: At_Siliques_P Parameter: Age (day) Value: 21
  misc_feature: MA Experiment 20000234 PARAMETER Experiment Name: At_Siliques_P Parameter: Organism Value: A. thaliana
  misc_feature: MA Experiment 20000234 PARAMETER Experiment Name: At_Siliques_P Parameter: Plant Line Value: WS
  misc_feature: MA Experiment 20000234 PARAMETER Experiment Name: At_Siliques_P Parameter: Tissue Value: Less Than 5mm Siliques vs. Whole Plant
  misc_feature: MA Experiment ID: 20000235 Result: Down-regulated in Transcription
  misc_feature: MA Experiment 20000235 PARAMETER Experiment Name: At_Siliques_P Parameter: Age (day) Value: 21
  misc_feature: MA Experiment 20000235 PARAMETER Experiment Name: At_Siliques_P Parameter: Organism Value: A. thaliana
  misc_feature: MA Experiment 20000235 PARAMETER Experiment Name: At_Siliques_P Parameter: Plant Line Value: WS
  misc_feature: MA Experiment 20000235 PARAMETER Experiment Name: At_Siliques_P Parameter: Tissue Value: 5-10mm Siliques vs. Whole Plant
  misc_feature: MA Experiment ID: 20000264 Result: Down-regulated in Transcription
  misc_feature: MA Experiment 20000264 PARAMETER Experiment Name: At_Open_Flower_P Parameter: Age (day) Value: 21
  misc_feature: MA Experiment 20000264 PARAMETER Experiment Name: At_Open_Flower_P Parameter: Plant Line Value: WS
  misc_feature: MA Experiment 20000264 PARAMETER Experiment Name: At_Open_Flower_P Parameter: Tissue Value: Open Flower vs. Whole Plant
  misc_feature: MA Experiment ID: 20000265 Result: Down-regulated in Transcription
  misc_feature: MA Experiment 20000265 PARAMETER Experiment Name: At_Open_Flower_P Parameter: Age (day) Value: 21
  misc_feature: MA Experiment 20000265 PARAMETER Experiment Name: At_Open_Flower_P Parameter: Plant Line Value: WS
  misc_feature: MA Experiment 20000265 PARAMETER Experiment Name: At_Open_Flower_P Parameter: Tissue Value: Closed Flower vs. Whole Plant
  misc_feature: MA Experiment ID: 20000286 Result: Down-regulated in Transcription
  misc_feature: MA Experiment 20000286 PARAMETER Experiment Name: At_Open_Flower_P Parameter: Age (day) Value: 21
  misc_feature: MA Experiment 20000286 PARAMETER Experiment Name: At_Open_Flower_P Parameter: Plant Line Value: WS
  misc_feature: MA Experiment 20000286 PARAMETER Experiment Name: At_Open_Flower_P Parameter: Tissue Value: Half Open vs. Whole Plant
  misc_feature: MA Experiment ID: 20000437 Result: Down-regulated in Transcription
  misc_feature: MA Experiment 20000437 PARAMETER Experiment Name: At_Drought_P Parameter: Age (day) Value: 8
  misc_feature: MA Experiment 20000437 PARAMETER Experiment Name: At_Drought_P Parameter: Organism Value: A. thaliana
  misc_feature: MA Experiment 20000437 PARAMETER Experiment Name: At_Drought_P Parameter: Plant Line Value: WS
  misc_feature: MA Experiment 20000437 PARAMETER Experiment Name: At_Drought_P Parameter: Timepoint (hr) Value: 24
  misc_feature: MA Experiment 20000437 PARAMETER Experiment Name: At_Drought_P Parameter: Tissue Value: Whole Plant
  misc_feature: MA Experiment 20000437 PARAMETER Experiment Name: At_Drought_P Parameter: Treatment Value: Drought vs. No Drought
  misc_feature: MA Experiment ID: 20000438 Result: Down-regulated in Transcription
  misc_feature: MA Experiment 20000438 PARAMETER Experiment Name: At_Shoots__P Parameter: Age (day) Value: 14
  misc_feature: MA Experiment 20000438 PARAMETER Experiment Name: At_Shoots__P Parameter: Tissue Value: Shoots vs. Whole Plant
  misc_feature: MA Experiment ID: 20000439 Result: Up-regulated in Transcription
  misc_feature: MA Experiment 20000439 PARAMETER Experiment Name: At_Roots__P Parameter: Age (day) Value: 14 vs. 21
  misc_feature: MA Experiment 20000439 PARAMETER Experiment Name: At_Roots__P Parameter: Organism Value: A. thaliana
  misc_feature: MA Experiment 20000439 PARAMETER Experiment Name: At_Roots__P Parameter: Tissue Value: Roots vs. Whole Plant
  misc_feature: MA Experiment ID: 20000794 Result: Down-regulated in Transcription
  misc_feature: MA Experiment 20000794 PARAMETER Experiment Name: At_Petals_P Parameter: Age (day) Value: 23-25 days
  misc_feature: MA Experiment 20000794 PARAMETER Experiment Name: At_Petals_P Parameter: Plant Line Value: WS
  misc_feature: MA Experiment 20000794 PARAMETER Experiment Name: At_Petals_P Parameter: Tissue Value: Petals vs. Whole plant
  misc_feature: MA Experiment ID: 20001248 Result: Up-regulated in Transcription
  misc_feature: MA Experiment 20001248 PARAMETER Experiment Name: At_Far-red-induction_P Parameter: Age (day) Value: 7
  misc_feature: MA Experiment 20001248 PARAMETER Experiment Name: At_Far-red-induction_P Parameter: Light Value: Far-red vs. White
  misc_feature: MA Experiment 20001248 PARAMETER Experiment Name: At_Far-red-induction_P Parameter: Organism Value: A. thaliana
  misc_feature: MA Experiment 20001248 PARAMETER Experiment Name: At_Far-red-induction_P Parameter: Plant Line Value: Columbia
  misc_feature: MA Experiment 20001248 PARAMETER Experiment Name: At_Far-red-induction_P Parameter: Timepoint (hr) Value: 4
  misc_feature: MA Experiment 20001248 PARAMETER Experiment Name: At_Far-red-induction_P Parameter: Tissue Value: Whole Plant
  misc_feature: MA Experiment ID: 20001451 Result: Up-regulated in Transcription
  misc_feature: MA Experiment 20001451 PARAMETER Experiment Name: At_Far-red-induction_P Parameter: Age (day) Value: 7
  misc_feature: MA Experiment 20001451 PARAMETER Experiment Name: At_Far-red-induction_P Parameter: Light Value: Far-red vs. White
  misc_feature: MA Experiment 20001451 PARAMETER Experiment Name: At_Far-red-induction_P Parameter: Organism Value: A. thaliana
  misc_feature: MA Experiment 20001451 PARAMETER Experiment Name: At_Far-red-induction_P Parameter: Plant Line Value: Columbia
  misc_feature: MA Experiment 20001451 PARAMETER Experiment Name: At_Far-red-induction_P Parameter: Timepoint (hr) Value: 24
  misc_feature: MA Experiment 20001451 PARAMETER Experiment Name: At_Far-red-induction_P Parameter: Tissue Value: Whole Plant
  misc_feature: MA Experiment ID: 20001555 Result: Down-regulated in Transcription
  misc_feature: MA Experiment 20001555 PARAMETER Experiment Name: At_Drought_Soil_Dry_P Parameter: Age (day) Value: 24
  misc_feature: MA Experiment 20001555 PARAMETER Experiment Name: At_Drought_Soil_Dry_P Parameter: Organism Value: A. thaliana
  misc_feature: MA Experiment 20001555 PARAMETER Experiment Name: At_Drought_Soil_Dry_P Parameter: Plant Line Value: WS
  misc_feature: MA Experiment 20001555 PARAMETER Experiment Name: At_Drought_Soil_Dry_P Parameter: Post Timepoint (hr) Value: None
  misc_feature: MA Experiment 20001555 PARAMETER Experiment Name: At_Drought_Soil_Dry_P Parameter: Post-Treatment Value: None
  misc_feature: MA Experiment 20001555 PARAMETER Experiment Name: At_Drought_Soil_Dry_P Parameter: Timepoint (day) Value: 10
  misc_feature: MA Experiment 20001555 PARAMETER Experiment Name: At_Drought_Soil_Dry_P Parameter: Treatment Value: Drought vs. No Drought
  misc_feature: MA Experiment ID: 20001774 Result: Down-regulated in Transcription
  misc_feature: MA Experiment 20001774 PARAMETER Experiment Name: At_Far-red-enriched-adult_P Parameter: Age (day) Value: 31
  misc_feature: MA Experiment 20001774 PARAMETER Experiment Name: At_Far-red-enriched-adult_P Parameter: Light Value: Far-red enriched vs. White
  misc_feature: MA Experiment 20001774 PARAMETER Experiment Name: At_Far-red-enriched-adult_P Parameter: Organism Value: A. thaliana
  misc_feature: MA Experiment 20001774 PARAMETER Experiment Name: At_Far-red-enriched-adult_P Parameter: Plant Line Value: Columbia
  misc_feature: MA Experiment 20001774 PARAMETER Experiment Name: At_Far-red-enriched-adult_P Parameter: Timepoint (hr) Value: 72
  misc_feature: MA Experiment 20001774 PARAMETER Experiment Name: At_Far-red-enriched-adult_P Parameter: Tissue Value: Aerial
  misc_feature: MA Experiment ID: 20001905 Result: Up-regulated in Transcription
  misc_feature: MA Experiment 20001905 PARAMETER Experiment Name: At_Drought_Reproduction_P Parameter: Age (day) Value: 40
  misc_feature: MA Experiment 20001905 PARAMETER Experiment Name: At_Drought_Reproduction_P Parameter: Organism Value: A. thaliana
  misc_feature: MA Experiment 20001905 PARAMETER Experiment Name: At_Drought_Reproduction_P Parameter: Plant Line Value: WS
  misc_feature: MA Experiment 20001905 PARAMETER Experiment Name: At_Drought_Reproduction_P Parameter: Timepoint (day) Value: 10
  misc_feature: MA Experiment 20001905 PARAMETER Experiment Name: At_Drought_Reproduction_P Parameter: Tissue Value: Rosettes
  misc_feature: MA Experiment 20001905 PARAMETER Experiment Name: At_Drought_Reproduction_P Parameter: Treatment Value: Drought vs. No Drought
gttatataatgacaccataaccatttcttctcttcacaatctttacaagaatatctctcttctacagtaaacaaaaaatggcaatgaatggtttgtccaagatggctgtagccgccgcaactgctcttctcctagttctgaccattgtcccgggcgcagtagctgtgacttacactattgaatggaccactggtgtggactactcaggttgggctaccggaaagactttcagggttggtgacattctagagttcaagtatggttcttcccacacggtggatgtggttgacaaagccggatatgatggctgcgacgcctcctcctcgactgagaaccattccgatggagacaccaaaatcgatcttaagactgtaggaataaactatttcatctgttctacacctggtcactgcagaaccaatggcggcatgaagctagccgttaatgtcgtagccggttctgccggacctccggccactcccacgccaccttcttcaactccgggaactcctaccacaccggaatcacctccgtctggcggatcacccacacccaccacacccacacctggtgcaggttcaacttctcctcctcctccaccaaaggcaagtggtgcgtctaagggagtgatgagttacgttttggtgggagtctcgatggttttgggttatggtttgtggatgtaattggtttagagagccagggtggagtcagtgcttttgcctttttaaattattttggtttttggttgtaagagaatttgggtttgtgtgccacgtcagaagctcttcattattcgtaggatttttattatctcggcatttgattatcgttatcatcatcatcatcacattcacttattctcttgttgtaataaattatactattaattttcattttcgtcc

SEQ ID NO: 30996 - protein, 202 aa, Arabidopsis thaliana
  peptide (1)..(202): Ceres Seq. ID no. 13490792
  misc_feature (36)..(118): Pfam Name: Plastocyanin-like domain Pfam Description: Plastocyanin-like domain
  misc_feature (1)..(167): Homolog of NCBI NO: 38636764 NR Description: putative blue copper binding protein
  misc_feature (9)..(190): Homolog of NCBI NO: 2493318 NR Description: Blue copper protein precursor
  misc_feature (11)..(183): Homolog of NCBI NO: 14140127 NR Description: uclacyanin 3-like protein [Oryza sativa]
  misc_feature (9)..(200): Homolog of NCBI NO: 15232287 NR Description: plastocyanin-like domain containing protein
  misc_feature (9)..(183): Homolog of NCBI NO: 15232289 NR Description: uclacyanin 3 [Arabidopsis thaliana]
  misc_feature (1)..(129): Homolog of NCBI NO: 25282796 NR Description: uclacyanin II [imported] - Arabidopsis thaliana
  misc_feature (1)..(202): Homolog of NCBI NO: 25453522 NR Description: blue copper-binding protein II [imported] -
  misc_feature (1)..(202): Homolog of NCBI NO: 25453521 NR Description: blue copper-binding protein II [imported] -
  misc_feature (1)..(202): Homolog of NCBI NO: 21554060 NR Description: phytocyanin [Arabidopsis thaliana]
  misc_feature (1)..(202): Homolog of NCBI NO: 15224960 NR Description: uclacyanin II [Arabidopsis thaliana]
MAMNGLSKMAVAAATALLLVLTIVPGAVAVTYTIEWTTGVDYSGWATGKTFRVGDILEFKYGSSHTVDVVDKAGYDGCDASSSTENHSDGDTKIDLKTVGINYFICSTPGHCRTNGGMKLAVNVVAGSAGPPATPTPPSSTPGTPTTPESPPSGGSPTPTTPTPGAGSTSPPPPPKASGASKGVMSYVLVGVSMVLGYGLWM

SEQ ID NO: 30997 - protein, 200 aa, Arabidopsis thaliana
  peptide (1)..(200): Ceres Seq. ID no. 13490793
  misc_feature (34)..(116): Pfam Name: Plastocyanin-like domain Pfam Description: Plastocyanin-like domain
  misc_feature (1)..(165): Homolog of NCBI NO: 38636764 NR Description: putative blue copper binding protein
  misc_feature (7)..(188): Homolog of NCBI NO: 2493318 NR Description: Blue copper protein precursor
  misc_feature (9)..(181): Homolog of NCBI NO: 14140127 NR Description: uclacyanin 3-like protein [Oryza sativa]
  misc_feature (7)..(198): Homolog of NCBI NO: 15232287 NR Description: plastocyanin-like domain containing protein
  misc_feature (7)..(181): Homolog of NCBI NO: 15232289 NR Description: uclacyanin 3 [Arabidopsis thaliana]
  misc_feature (1)..(127): Homolog of NCBI NO: 25282796 NR Description: uclacyanin II [imported] - Arabidopsis thaliana
  misc_feature (1)..(200): Homolog of NCBI NO: 25453522 NR Description: blue copper-binding protein II [imported] -
  misc_feature (1)..(200): Homolog of NCBI NO: 25453521 NR Description: blue copper-binding protein II [imported] -
  misc_feature (1)..(200): Homolog of NCBI NO: 21554060 NR Description: phytocyanin [Arabidopsis thaliana]
  misc_feature (1)..(200): Homolog of NCBI NO: 15224960 NR Description: uclacyanin II [Arabidopsis thaliana]
MNGLSKMAVAAATALLLVLTIVPGAVAVTYTIEWTTGVDYSGWATGKTFRVGDILEFKYGSSHTVDVVDKAGYDGCDASSSTENHSDGDTKIDLKTVGINYFICSTPGHCRTNGGMKLAVNVVAGSAGPPATPTPPSSTPGTPTTPESPPSGGSPTPTTPTPGAGSTSPPPPPKASGASKGVMSYVLVGVSMVLGYGLWM

SEQ ID NO: 30998 - protein, 194 aa, Arabidopsis thaliana
  peptide (1)..(194): Ceres Seq. ID no. 13490794
  misc_feature (28)..(110): Pfam Name: Plastocyanin-like domain Pfam Description: Plastocyanin-like domain
  misc_feature (1)..(159): Homolog of NCBI NO: 38636764 NR Description: putative blue copper binding protein
  misc_feature (1)..(182): Homolog of NCBI NO: 2493318 NR Description: Blue copper protein precursor
  misc_feature (3)..(175): Homolog of NCBI NO: 14140127 NR Description: uclacyanin 3-like protein [Oryza sativa]
  misc_feature (1)..(192): Homolog of NCBI NO: 15232287 NR Description: plastocyanin-like domain containing protein
  misc_feature (1)..(175): Homolog of NCBI NO: 15232289 NR Description: uclacyanin 3 [Arabidopsis thaliana]
  misc_feature (1)..(121): Homolog of NCBI NO: 25282796 NR Description: uclacyanin II [imported] - Arabidopsis thaliana
  misc_feature (1)..(194): Homolog of NCBI NO: 25453522 NR Description: blue copper-binding protein II [imported] -
  misc_feature (1)..(194): Homolog of NCBI NO: 25453521 NR Description: blue copper-binding protein II [imported] -
  misc_feature (1)..(194): Homolog of NCBI NO: 21554060 NR Description: phytocyanin [Arabidopsis thaliana]
  misc_feature (1)..(194): Homolog of NCBI NO: 15224960 NR Description: uclacyanin II [Arabidopsis thaliana]
MAVAAATALLLVLTIVPGAVAVTYTIEWTTGVDYSGWATGKTFRVGDILEFKYGSSHTVDVVDKAGYDGCDASSSTENHSDGDTKIDLKTVGINYFICSTPGHCRTNGGMKLAVNVVAGSAGPPATPTPPSSTPGTPTTPESPPSGGSPTPTTPTPGAGSTSPPPPPKASGASKGVMSYVLVGVSMVLGYGLWM

SEQ ID NO: 30999 - DNA, 1904 bp, Arabidopsis thaliana
  misc_feature (1)..(1904): Ceres Seq. ID no. 12338555
  misc_feature: MA Experiment ID: 20000185 Result: Down-regulated in Transcription
  misc_feature: MA Experiment 20000185 PARAMETER Experiment Name: At_Roots__P Parameter: Age (day) Value: 7 vs. 21
  misc_feature: MA Experiment 20000185 PARAMETER Experiment Name: At_Roots__P Parameter: Organism Value: A. thaliana
  misc_feature: MA Experiment 20000185 PARAMETER Experiment Name: At_Roots__P Parameter: Tissue Value: Roots vs. Whole Plant
  misc_feature: MA Experiment ID: 20000234 Result: Down-regulated in Transcription
  misc_feature: MA Experiment 20000234 PARAMETER Experiment Name: At_Siliques_P Parameter: Age (day) Value: 21
  misc_feature: MA Experiment 20000234 PARAMETER Experiment Name: At_Siliques_P Parameter: Organism Value: A. thaliana
  misc_feature: MA Experiment 20000234 PARAMETER Experiment Name: At_Siliques_P Parameter: Plant Line Value: WS
  misc_feature: MA Experiment 20000234 PARAMETER Experiment Name: At_Siliques_P Parameter: Tissue Value: Less Than 5mm Siliques vs. Whole Plant
  misc_feature: MA Experiment ID: 20000235 Result: Down-regulated in Transcription
  misc_feature: MA Experiment 20000235 PARAMETER Experiment Name: At_Siliques_P Parameter: Age (day) Value: 21
  misc_feature: MA Experiment 20000235 PARAMETER Experiment Name: At_Siliques_P Parameter: Organism Value: A. thaliana
  misc_feature: MA Experiment 20000235 PARAMETER Experiment Name: At_Siliques_P Parameter: Plant Line Value: WS
  misc_feature: MA Experiment 20000235 PARAMETER Experiment Name: At_Siliques_P Parameter: Tissue Value: 5-10mm Siliques vs. Whole Plant
  misc_feature: MA Experiment ID: 20000264 Result: Down-regulated in Transcription
  misc_feature: MA Experiment 20000264 PARAMETER Experiment Name: At_Open_Flower_P Parameter: Age (day) Value: 21
  misc_feature: MA Experiment 20000264 PARAMETER Experiment Name: At_Open_Flower_P Parameter: Plant Line Value: WS
  misc_feature: MA Experiment 20000264 PARAMETER Experiment Name: At_Open_Flower_P Parameter: Tissue Value: Open Flower vs. Whole Plant
  misc_feature: MA Experiment ID: 20000265 Result: Down-regulated in Transcription
  misc_feature: MA Experiment 20000265 PARAMETER Experiment Name: At_Open_Flower_P Parameter: Age (day) Value: 21
  misc_feature: MA Experiment 20000265 PARAMETER Experiment Name: At_Open_Flower_P Parameter: Plant Line Value: WS
  misc_feature: MA Experiment 20000265 PARAMETER Experiment Name: At_Open_Flower_P Parameter: Tissue Value: Closed Flower vs. Whole Plant
  misc_feature: MA Experiment ID: 20000286 Result: Down-regulated in Transcription
  misc_feature: MA Experiment 20000286 PARAMETER Experiment Name: At_Open_Flower_P Parameter: Age (day) Value: 21
  misc_feature: MA Experiment 20000286 PARAMETER Experiment Name: At_Open_Flower_P Parameter: Plant Line Value: WS
  misc_feature: MA Experiment 20000286 PARAMETER Experiment Name: At_Open_Flower_P Parameter: Tissue Value: Half Open vs. Whole Plant
  misc_feature: MA Experiment ID: 20000438 Result: Down-regulated in Transcription
  misc_feature: MA Experiment 20000438 PARAMETER Experiment Name: At_Shoots__P Parameter: Age (day) Value: 14
  misc_feature: MA Experiment 20000438 PARAMETER Experiment Name: At_Shoots__P Parameter: Tissue Value: Shoots vs. Whole Plant
  misc_feature: MA Experiment ID: 20000439 Result: Down-regulated in Transcription
  misc_feature: MA Experiment 20000439 PARAMETER Experiment Name: At_Roots__P Parameter: Age (day) Value: 14 vs. 21
  misc_feature: MA Experiment 20000439 PARAMETER Experiment Name: At_Roots__P Parameter: Organism Value: A. thaliana
  misc_feature: MA Experiment 20000439 PARAMETER Experiment Name: At_Roots__P Parameter: Tissue Value: Roots vs. Whole Plant
  misc_feature: MA Experiment ID: 20001757 Result: Up-regulated in Transcription
  misc_feature: MA Experiment 20001757 PARAMETER Experiment Name: At_50mM_NH4NO3_L-to-H_P Parameter: Timepoint (hr) Value: 6
  misc_feature: MA Experiment 20001757 PARAMETER Experiment Name: At_50mM_NH4NO3_L-to-H_P Parameter: Tissue Value: Leaf
  misc_feature: MA Experiment 20001757 PARAMETER Experiment Name: At_50mM_NH4NO3_L-to-H_P Parameter: Treatment Value: 50mM NH4NO3 vs 100mM Mannitol
ttttacgaatccacatattcctggatcaacgggaacccttcgtttctttcccacccgcgtgttatcccgtttctcaaatttctcatctttccgggaaaattcactttttttttttcctgggaagattcgttgtgttgtgaattttagtgggcaccttcaaattttcgattttttttttattttccttgtctcttacctgatttggtgatttattattacatcaaccactcgattcgttagatttccggatttgaaaaagagtcaccaacttgtacggattctcgttttggggatcgagtattgctgatttgtgattttgttgtttttgggtactttccctttgtggattcggatctggttggtggctttgtcaaatgggcgcattagatgagggatgtttgaatctggagctcgacattggaatgaaaaatggctgcattgagcttgctttcgagcaccaacctgagactttagcaatccaagacgctgtcaaacttctcttgcaaggtcttcatgaagatgtcaatcgggaaggcatcaaaaagactcctttccgtgtcgccaaggcccttcgtgaagggaccagaggttataagcaaaaggtgaaggactatgtacagagtgctctgtttccagaagcagggttggatgaaggagttgggcaagcaggaggagtcggaggacttgttgttgtcagagacctcgatcattactcttactgtgaatcttgcttgcttccttttcatgtcaagtgtcacataggttatgtcccatcgggccagagagtgttaggactgagcaagttctctagagtcactgatgttttcgccaagcggctccaagaccctcagcgtttggctgatgatatttgttcagctctccaacattgggtcaaaccagctggagtcgctgttgttcttgaatgctctcacattcacttccccagtttggacttggactctctgaacttgtctagccaccgtggatttgtgaagctactggtttcctcggggtcaggagttttcgaggatgaaagctcgaatctttggggtgaatttcagagtttcttgatgttcaaaggtgtaaaaacgcaagctttgtgcagaaatggcagctctgtgaaagagtggtgcccaagcgttaaaagctcgtctaaattatcacctgaagttgacccggaaatggtttctgctgttgtttccatcctgaaatcactgggagaagatccgttgaggaaagaactcattgctacaccaactcgattcctcaaatggatgttgaacttccaaagaaccaacctcgaaatgaagctaaacagctttaaccctgccaaagtcaatggcgaggtcaaagagaaaaggctgcactgtgagctgaacatgcccttctggtcaatgtgtgaacatcatttgcttcctttctatggagttgttcatattggctacttttgtgctgaaggatccaaccccaaccctgttggaagttcactcatgaaagcgattgtacacttttatgggttcaagcttcaagtgcaagagaggatgactcgacagatcgctgaaacgctatcgcctcttgttggcggggatgtgattgttgtggcggaagctgggcatacttgtatgatctctagaggaattgagaagtttggaagcagcaccgcgacaatcgcagttttgggtcggttttcgagtgacaattccgcaagagcgatgtttctagacaagatccatacaactaatgccttgaagacagagtcaagctctccattttgagatggtttcatgtctgtttgttgtcttttttttatgcttctgcttgtcttctcttttttttgttatatgataaatacttcggaagttgctaaacttcggaagcaaaccaatgatttcttggttttgatt

SEQ ID NO: 31000 - protein, 466 aa, Arabidopsis thaliana
  peptide (1)..(466): Ceres Seq. ID no. 12338557
  misc_feature (34)..(189): Homolog of NCBI NO: 13699224 NR Description: GTP cyclohydrolase I [Physarum polycephalum]
  misc_feature (35)..(187): Homolog of NCBI NO: 37521149 NR Description: GTP cyclohydrolase I [Gloeobacter violaceus]
  misc_feature (21)..(187): Homolog of NCBI NO: 21673611 NR Description: GTP cyclohydrolase I [Chlorobium tepidum TLS]
  misc_feature (34)..(221): Homolog of NCBI NO: 14009659 NR Description: GTP cyclohydrolase I [Physarum polycephalum]
  misc_feature (34)..(232): Homolog of NCBI NO: 13699226 NR Description: GTP cyclohydrolase I [Physarum polycephalum]
  misc_feature (28)..(221): Homolog of NCBI NO: 6016111 NR Description: GTP cyclohydrolase I (GTP-CH-I)
  misc_feature (71)..(458): Homolog of NCBI NO: 38346071 NR Description: OSJNBa0084K01.11 [Oryza sativa (japonica
  misc_feature (1)..(452): Homolog of NCBI NO: 17979018 NR Description: GTP cyclohydrolase I [Lycopersicon esculentum]
  misc_feature (1)..(466): Homolog of NCBI NO: 19909132 NR Description: GTP cyclohydrolase I [Arabidopsis thaliana]
  misc_feature (1)..(466): Homolog of NCBI NO: 15231435 NR Description: GTP cyclohydrolase I
MGALDEGCLNLELDIGMKNGCIELAFEHQPETLAIQDAVKLLLQGLHEDVNREGIKKTPFRVAKALREGTRGYKQKVKDYVQSALFPEAGLDEGVGQAGGVGGLVVVRDLDHYSYCESCLLPFHVKCHIGYVPSGQRVLGLSKFSRVTDVFAKRLQDPQRLADDICSALQHWVKPAGVAVVLECSHIHFPSLDLDSLNLSSHRGFVKLLVSSGSGVFEDESSNLWGEFQSFLMFKGVKTQALCRNGSSVKEWCPSVKSSSKLSPEVDPEMVSAVVSILKSLGEDPLRKELIATPTRFLKWMLNFQRTNLEMKLNSFNPAKVNGEVKEKRLHCELNMPFWSMCEHHLLPFYGVVHIGYFCAEGSNPNPVGSSLMKAIVHFYGFKLQVQERMTRQIAETLSPLVGGDVIVVAEAGHTCMISRGIEKFGSSTATIAVLGRFSSDNSARAMFLDKIHTTNALKTESSSPF

SEQ ID NO: 31001 - protein, 450 aa, Arabidopsis thaliana
  peptide (1)..(450): Ceres Seq. ID no. 12338558
  misc_feature (18)..(173): Homolog of NCBI NO: 13699224 NR Description: GTP cyclohydrolase I [Physarum polycephalum]
  misc_feature (19)..(171): Homolog of NCBI NO: 37521149 NR Description: GTP cyclohydrolase I [Gloeobacter violaceus]
  misc_feature (5)..(171): Homolog of NCBI NO: 21673611 NR Description: GTP cyclohydrolase I [Chlorobium tepidum TLS]
  misc_feature (18)..(205): Homolog of NCBI NO: 14009659 NR Description: GTP cyclohydrolase I [Physarum polycephalum]
  misc_feature (18)..(216): Homolog of NCBI NO: 13699226 NR Description: GTP cyclohydrolase I [Physarum polycephalum]
  misc_feature (12)..(205): Homolog of NCBI NO: 6016111 NR Description: GTP cyclohydrolase I (GTP-CH-I)
  misc_feature (55)..(442): Homolog of NCBI NO: 38346071 NR Description: OSJNBa0084K01.11 [Oryza sativa (japonica
  misc_feature (1)..(436): Homolog of NCBI NO: 17979018 NR Description: GTP cyclohydrolase I [Lycopersicon esculentum]
  misc_feature (1)..(450): Homolog of NCBI NO: 19909132 NR Description: GTP cyclohydrolase I [Arabidopsis thaliana]
  misc_feature (1)..(450): Homolog of NCBI NO: 15231435 NR Description: GTP cyclohydrolase I
MKNGCIELAFEHQPETLAIQDAVKLLLQGLHEDVNREGIKKTPFRVAKALREGTRGYKQKVKDYVQSALFPEAGLDEGVGQAGGVGGLVVVRDLDHYSYCESCLLPFHVKCHIGYVPSGQRVLGLSKFSRVTDVFAKRLQDPQRLADDICSALQHWVKPAGVAVVLECSHIHFPSLDLDSLNLSSHRGFVKLLVSSGSGVFEDESSNLWGEFQSFLMFKGVKTQALCRNGSSVKEWCPSVKSSSKLSPEVDPEMVSAVVSILKSLGEDPLRKELIATPTRFLKWMLNFQRTNLEMKLNSFNPAKVNGEVKEKRLHCELNMPFWSMCEHHLLPFYGVVHIGYFCAEGSNPNPVGSSLMKAIVHFYGFKLQVQERMTRQIAETLSPLVGGDVIVVAEAGHTCMISRGIEKFGSSTATIAVLGRFSSDNSARAMFLDKIHTTNALKTESSSPF

SEQ ID NO: 31002 - protein, 234 aa, Arabidopsis thaliana
  peptide (1)..(234): Ceres Seq. ID no. 12338559
  misc_feature (19)..(221): Homolog of NCBI NO: 37521149 NR Description: GTP cyclohydrolase I [Gloeobacter violaceus]
  misc_feature (44)..(221): Homolog of NCBI NO: 13699226 NR Description: GTP cyclohydrolase I [Physarum polycephalum]
  misc_feature (36)..(222): Homolog of NCBI NO: 4503949 NR Description: GTP cyclohydrolase 1 (dopa-responsive dystonia)
  misc_feature (33)..(224): Homolog of NCBI NO: 6016111 NR Description: GTP cyclohydrolase I (GTP-CH-I)
  misc_feature (32)..(224): Homolog of NCBI NO: 22298852 NR Description: GTP cyclohydrolase I [Thermosynechococcus
  misc_feature (5)..(217): Homolog of NCBI NO: 16605516 NR Description: GTP cyclohydrolase I [Danio rerio]
  misc_feature (1)..(226): Homolog of NCBI NO: 38346071 NR Description: OSJNBa0084K01.11 [Oryza sativa (japonica
  misc_feature (1)..(220): Homolog of NCBI NO: 17979018 NR Description: GTP cyclohydrolase I [Lycopersicon esculentum]
  misc_feature (1)..(234): Homolog of NCBI NO: 19909132 NR Description: GTP cyclohydrolase I [Arabidopsis thaliana]
  misc_feature (1)..(234): Homolog of NCBI NO: 15231435 NR Description: GTP cyclohydrolase I
MFKGVKTQALCRNGSSVKEWCPSVKSSSKLSPEVDPEMVSAVVSILKSLGEDPLRKELIATPTRFLKWMLNFQRTNLEMKLNSFNPAKVNGEVKEKRLHCELNMPFWSMCEHHLLPFYGVVHIGYFCAEGSNPNPVGSSLMKAIVHFYGFKLQVQERMTRQIAETLSPLVGGDVIVVAEAGHTCMISRGIEKFGSSTATIAVLGRFSSDNSARAMFLDKIHTTNALKTESSSPF

SEQ ID NO: 31003 - DNA, 1698 bp, Arabidopsis thaliana
  misc_feature (1)..(1698): Ceres Seq. ID no. 12396660
  misc_feature: MA Experiment ID: 108434 Result: Up-regulated in Transcription
  misc_feature: MA Experiment 108434 PARAMETER Experiment Name: At_Root_Tips_cDNA_P Parameter: Tissue Value: Root Tips
  misc_feature: MA Experiment ID: 108462 Result: Down-regulated in Transcription
  misc_feature: MA Experiment 108462 PARAMETER Experiment Name: At_Germinating_Seeds_cDNA_P Parameter: Age (day) Value: 2 vs. 0
  misc_feature: MA Experiment 108462 PARAMETER Experiment Name: At_Germinating_Seeds_cDNA_P Parameter: Tissue Value: Germinating Seeds
  misc_feature: MA Experiment ID: 108463 Result: Down-regulated in Transcription
  misc_feature: MA Experiment 108463 PARAMETER Experiment Name: At_Germinating_Seeds_cDNA_P Parameter: Age (day) Value: 3 vs. 0
  misc_feature: MA Experiment 108463 PARAMETER Experiment Name: At_Germinating_Seeds_cDNA_P Parameter: Tissue Value: Germinating Seeds
  misc_feature: MA Experiment ID: 108464 Result: Down-regulated in Transcription
  misc_feature: MA Experiment 108464 PARAMETER Experiment Name: At_Germinating_Seeds_cDNA_P Parameter: Age (day) Value: 4 vs. 0
  misc_feature: MA Experiment 108464 PARAMETER Experiment Name: At_Germinating_Seeds_cDNA_P Parameter: Tissue Value: Germinating Seeds
  misc_feature: MA Experiment ID: 108573 Result: Up-regulated in Transcription
  misc_feature: MA Experiment 108573 PARAMETER Experiment Name: At_Drought_cDNA_P Parameter: Timepoint (hr) Value: 6
  misc_feature: MA Experiment 108573 PARAMETER Experiment Name: At_Drought_cDNA_P Parameter: Tissue Value: Aerial
  misc_feature: MA Experiment 108573 PARAMETER Experiment Name: At_Drought_cDNA_P Parameter: Treatment Value: Drought vs. No Drought
  misc_feature: MA Experiment ID: 20000112 Result: Up-regulated in Transcription
  misc_feature: MA Experiment 20000112 PARAMETER Experiment Name: At_42deg_Heat_cDNA_P Parameter: Temperature (deg C) Value: 42 vs. 22
  misc_feature: MA Experiment 20000112 PARAMETER Experiment Name: At_42deg_Heat_cDNA_P Parameter: Timepoint (hr) Value: 2
  misc_feature: MA Experiment 20000112 PARAMETER Experiment Name: At_42deg_Heat_cDNA_P Parameter: Tissue Value: Aerial
  misc_feature: MA Experiment ID: 20000144 Result: Up-regulated in Transcription
  misc_feature: MA Experiment 20000144 PARAMETER Experiment Name: At_42deg_Heat_cDNA_P Parameter: Temperature (deg C) Value: 42 vs. 22
  misc_feature: MA Experiment 20000144 PARAMETER Experiment Name: At_42deg_Heat_cDNA_P Parameter: Timepoint (hr) Value: 1
  misc_feature: MA Experiment 20000144 PARAMETER Experiment Name: At_42deg_Heat_cDNA_P Parameter: Tissue Value: Aerial
  misc_feature: MA Experiment ID: 20001557 Result: Up-regulated in Transcription
  misc_feature: MA Experiment 20001557 PARAMETER Experiment Name: At_Drought_Soil_Dry_P Parameter: Age (day) Value: 27
  misc_feature: MA Experiment 20001557 PARAMETER Experiment Name: At_Drought_Soil_Dry_P Parameter: Organism Value: A. thaliana
  misc_feature: MA Experiment 20001557 PARAMETER Experiment Name: At_Drought_Soil_Dry_P Parameter: Plant Line Value: WS
  misc_feature: MA Experiment 20001557 PARAMETER Experiment Name: At_Drought_Soil_Dry_P Parameter: Post Timepoint (hr) Value: 3
  misc_feature: MA Experiment 20001557 PARAMETER Experiment Name: At_Drought_Soil_Dry_P Parameter: Post-Treatment Value: Re-Water vs. No Drought
  misc_feature: MA Experiment 20001557 PARAMETER Experiment Name: At_Drought_Soil_Dry_P Parameter: Timepoint (day) Value: 13
  misc_feature: MA Experiment 20001557 PARAMETER Experiment Name: At_Drought_Soil_Dry_P Parameter: Treatment Value: Drought vs. No Drought
aagctaagctctagaaacaccgcctttaacgtctcgctgcaccatttttcatcgttgatcagtcgtcgatcctcttgagtgatttgattttagactttctagttatcaaactcgaaagatggattctgtccttgtagtgggcattgcatcggttattctcggtgcgttgatcgctgtactcttcttcggtagctacttccggaagcggacatcggaggtgcaatccatggccaaagcggagcctcaggatccgatccggaatccaaagtcgaatcatcctgctccgaagaagaatcatcccaaatctcaagcgtccgataagaatcagaacaaacggcatcatcctttagatttaaacacgttgaaaggccacggtgatgctgttactggactctgtttctcgtccgatggaaagagcttggccacagcttgcgctgatggagtaatcagggtgttcaagctagatgatgcatcaagcaaaagcttcaaatttttaaggataaatcttcctgctggaggacatccaaccgccgtggcatttgctgacgatgcctcatctattgttgtggcttgtcatcatatgtctggttcatctttgtacatgtacggtgaagataagcaaaaggatcagcaagggaagcttcctcttcctagtatcaaatgggaccaccatcatattcatgagaagagatcagtgcttaccatctctggagctactgcaacttacggtactgctgatggaagtgttgtcattgcctcttgttctgaagggactgatatcgtcctttggcatgggaaaactgggaggaatttgggacatgttgatacaaaccagttgaagaaccacatggcagctgtatcaccaaatggacgttttttggcagctgcagcatttactgcagatgtgaaagtgtgggaaattgtgtatcagaaagatggttctgtgaaagaggtttcaagagttatgcaacttaaaggccacaagagtgcagtgacttggttatgcttttctccaaactcagagcaaatcatcaccgcttcaaaagatggttcaataagagtctggaacatcaatgtccgttatcatcttgatgaggatccaaagactttgaaggtgttcccgattccactttgcgactcaggaggcaatccgttgcactatgatcgtctcagcttatgcccagagggaaagatattggcagcaagccatggttccacattgcagtggttatgtgctgaaactggaaatgtcttggacacagctgagaaagcccacgaaggggatatcacatgcatatcttgggcacccaaggctattacagttggggaaagacatgccatggttttggggacatcaggcgatgacaagaaagtgaagctgtgggaagctccaaagtcgcaatctttgtaggctctcgcatacacgtagtcccttgatgacatgaggcgtatttaaacggtacaacttgcgaggaaaaaaactctaataggttttgtttcgagtcccaagttgggatcaaatgaagggtggtttaaagtccttcttgttaccaagtgtcttttaacttctgaagttttgaattttgctcataggactagtacaacactcacagtcttctatgttttccaaattaaggaaatttaaaaagcacacaacaacactaagaaatatgaatcgattaaaattattatacgcag

SEQ ID NO: 31004 - protein, 430 aa, Arabidopsis thaliana
  peptide (1)..(430): Ceres Seq. ID no. 12396661
  misc_feature (50)..(394): Homolog of NCBI NO: 4704417 NR Description: WS beta-transducin repeats protein [Homo sapiens]
  misc_feature (6)..(394): Homolog of NCBI NO: 22760172 NR Description: unnamed protein product [Homo sapiens]
  misc_feature (6)..(394): Homolog of NCBI NO: 15277891 NR Description: Similar to transducin (beta)-like 2 [Homo sapiens]
  misc_feature (6)..(394): Homolog of NCBI NO: 7549793 NR Description: transducin (beta)-like 2, isoform 1
  misc_feature (43)..(390): Homolog of NCBI NO: 27696175 NR Description: Similar to transducin (beta)-like 2 [Xenopus
  misc_feature (253)..(425): Homolog of NCBI NO: 14091657 NR Description: F6N15.8-like protein [Mangifera indica]
  misc_feature (3)..(429): Homolog of NCBI NO: 30102987 NR Description: putative WD repeat protein
  misc_feature (1)..(141): Homolog of NCBI NO: 7486549 NR Description: hypothetical protein F6N15.8 - Arabidopsis
  misc_feature (123)..(430): Homolog of NCBI NO: 7486549 NR Description: hypothetical protein F6N15.8 - Arabidopsis
  misc_feature (1)..(430): Homolog of NCBI NO: 18411222 NR Description: putative WD repeat membrane protein
MDSVLVVGIASVILGALIAVLFFGSYFRKRTSEVQSMAKAEPQDPIRNPKSNHPAPKKNHPKSQASDKNQNKRHHPLDLNTLKGHGDAVTGLCFSSDGKSLATACADGVIRVFKLDDASSKSFKFLRINLPAGGHPTAVAFADDASSIVVACHHMSGSSLYMYGEDKQKDQQGKLPLPSIKWDHHHIHEKRSVLTISGATATYGTADGSVVIASCSEGTDIVLWHGKTGRNLGHVDTNQLKNHMAAVSPNGRFLAAAAFTADVKVWEIVYQKDGSVKEVSRVMQLKGHKSAVTWLCFSPNSEQIITASKDGSIRVWNINVRYHLDEDPKTLKVFPIPLCDSGGNPLHYDRLSLCPEGKILAASHGSTLQWLCAETGNVLDTAEKAHEGDITCISWAPKAITVGERHAMVLGTSGDDKKVKLWEAPKSQSL

SEQ ID NO: 31005 - protein, 394 aa, Arabidopsis thaliana
  peptide (1)..(394): Ceres Seq. ID no. 12396662
  misc_feature (14)..(358): Homolog of NCBI NO: 4704417 NR Description: WS beta-transducin repeats protein [Homo sapiens]
  misc_feature (1)..(358): Homolog of NCBI NO: 15277891 NR Description: Similar to transducin (beta)-like 2 [Homo sapiens]
  misc_feature (1)..(358): Homolog of NCBI NO: 22760172 NR Description: unnamed protein product [Homo sapiens]
  misc_feature (1)..(358): Homolog of NCBI NO: 7549793 NR Description: transducin (beta)-like 2, isoform 1
  misc_feature (7)..(354): Homolog of NCBI NO: 27696175 NR Description: Similar to transducin (beta)-like 2 [Xenopus
  misc_feature (217)..(389): Homolog of NCBI NO: 14091657 NR Description: F6N15.8-like protein [Mangifera indica]
  misc_feature (1)..(393): Homolog of NCBI NO: 30102987 NR Description: putative WD repeat protein
  misc_feature (1)..(105): Homolog of NCBI NO: 7486549 NR Description: hypothetical protein F6N15.8 - Arabidopsis
  misc_feature (87)..(394): Homolog of NCBI NO: 7486549 NR Description: hypothetical protein F6N15.8 - Arabidopsis
  misc_feature (1)..(394): Homolog of NCBI NO: 18411222 NR Description: putative WD repeat membrane protein
MAKAEPQDPIRNPKSNHPAPKKNHPKSQASDKNQNKRHHPLDLNTLKGHGDAVTGLCFSSDGKSLATACADGVIRVFKLDDASSKSFKFLRINLPAGGHPTAVAFADDASSIVVACHHMSGSSLYMYGEDKQKDQQGKLPLPSIKWDHHHIHEKRSVLTISGATATYGTADGSVVIASCSEGTDIVLWHGKTGRNLGHVDTNQLKNHMAAVSPNGRFLAAAAFTADVKVWEIVYQKDGSVKEVSRVMQLKGHKSAVTWLCFSPNSEQIITASKDGSIRVWNINVRYHLDEDPKTLKVFPIPLCDSGGNPLHYDRLSLCPEGKILAASHGSTLQWLCAETGNVLDTAEKAHEGDITCISWAPKAITVGERHAMVLGTSGDDKKVKLWEAPKSQSL

SEQ ID NO: 31006 - protein, 276 aa, Arabidopsis thaliana
  peptide (1)..(276): Ceres Seq. ID no. 12396663
  misc_feature (1)..(240): Homolog of NCBI NO: 31543845 NR Description: transducin (beta)-like 2 [Mus musculus]
  misc_feature (1)..(240): Homolog of NCBI NO: 4704417 NR Description: WS beta-transducin repeats protein [Homo sapiens]
  misc_feature (1)..(240): Homolog of NCBI NO: 15277891 NR Description: Similar to transducin (beta)-like 2 [Homo sapiens]
  misc_feature (1)..(240): Homolog of NCBI NO: 22760172 NR Description: unnamed protein product [Homo sapiens]
  misc_feature (1)..(240): Homolog of NCBI NO: 7549793 NR Description: transducin (beta)-like 2, isoform 1
  misc_feature (1)..(236): Homolog of NCBI NO: 27696175 NR Description: Similar to transducin (beta)-like 2 [Xenopus
  misc_feature (99)..(271): Homolog of NCBI NO: 14091657 NR Description: F6N15.8-like protein [Mangifera indica]
  misc_feature (1)..(275): Homolog of NCBI NO: 30102987 NR Description: putative WD repeat protein
  misc_feature (1)..(276): Homolog of NCBI NO: 7486549 NR Description: hypothetical protein F6N15.8 - Arabidopsis
  misc_feature (1)..(276): Homolog of NCBI NO: 18411222 NR Description: putative WD repeat membrane protein
MSGSSLYMYGEDKQKDQQGKLPLPSIKWDHHHIHEKRSVLTISGATATYGTADGSVVIASCSEGTDIVLWHGKTGRNLGHVDTNQLKNHMAAVSPNGRFLAAAAFTADVKVWEIVYQKDGSVKEVSRVMQLKGHKSAVTWLCFSPNSEQIITASKDGSIRVWNINVRYHLDEDPKTLKVFPIPLCDSGGNPLHYDRLSLCPEGKILAASHGSTLQWLCAETGNVLDTAEKAHEGDITCISWAPKAITVGERHAMVLGTSGDDKKVKLWEAPKSQSL

SEQ ID NO: 31007 - DNA, 991 bp, Arabidopsis thaliana
  misc_feature (1)..(991): Ceres Seq. ID no. 13645938
  misc_feature: MA Experiment ID: 20000264 Result: Up-regulated in Transcription
  misc_feature: MA Experiment 20000264 PARAMETER Experiment Name: At_Open_Flower_P Parameter: Age (day) Value: 21
  misc_feature: MA Experiment 20000264 PARAMETER Experiment Name: At_Open_Flower_P Parameter: Plant Line Value: WS
  misc_feature: MA Experiment 20000264 PARAMETER Experiment Name: At_Open_Flower_P Parameter: Tissue Value: Open Flower vs. Whole Plant
  misc_feature: MA Experiment ID: 20000265 Result: Up-regulated in Transcription
  misc_feature: MA Experiment 20000265 PARAMETER Experiment Name: At_Open_Flower_P Parameter: Age (day) Value: 21
  misc_feature: MA Experiment 20000265 PARAMETER Experiment Name: At_Open_Flower_P Parameter: Plant Line Value: WS
  misc_feature: MA Experiment 20000265 PARAMETER Experiment Name: At_Open_Flower_P Parameter: Tissue Value: Closed Flower vs. Whole Plant
  misc_feature: MA Experiment ID: 20000286 Result: Up-regulated in Transcription
  misc_feature: MA Experiment 20000286 PARAMETER Experiment Name: At_Open_Flower_P Parameter: Age (day) Value: 21
  misc_feature: MA Experiment 20000286 PARAMETER Experiment Name: At_Open_Flower_P Parameter: Plant Line Value: WS
  misc_feature: MA Experiment 20000286 PARAMETER Experiment Name: At_Open_Flower_P Parameter: Tissue Value: Half Open vs. Whole Plant
  misc_feature: MA Experiment ID: 20000495 Result: Down-regulated in Transcription
  misc_feature: MA Experiment 20000495 PARAMETER Experiment Name: At_Guard_Cells_P Parameter: Harvest Date Value: 8/2/2002
  misc_feature: MA Experiment 20000495 PARAMETER Experiment Name: At_Guard_Cells_P Parameter: Organism Value: A. thaliana
  misc_feature: MA Experiment 20000495 PARAMETER Experiment Name: At_Guard_Cells_P Parameter: Tissue Value: Guard Cells vs. Leaves
  misc_feature: MA Experiment ID: 20000794 Result: Up-regulated in Transcription
  misc_feature: MA Experiment 20000794 PARAMETER Experiment Name: At_Petals_P Parameter: Age (day) Value: 23-25 days
  misc_feature: MA Experiment 20000794 PARAMETER Experiment Name: At_Petals_P Parameter: Plant Line Value: WS
  misc_feature: MA Experiment 20000794 PARAMETER Experiment Name: At_Petals_P Parameter: Tissue Value: Petals vs. Whole plant
  misc_feature: MA Experiment ID: 20001909 Result: Up-regulated in Transcription
  misc_feature: MA Experiment 20001909 PARAMETER Experiment Name: At_Drought_Reproduction_P Parameter: Age (day) Value: 35
  misc_feature: MA Experiment 20001909 PARAMETER Experiment Name: At_Drought_Reproduction_P Parameter: Organism Value: A. thaliana
  misc_feature: MA Experiment 20001909 PARAMETER Experiment Name: At_Drought_Reproduction_P Parameter: Plant Line Value: WS
  misc_feature: MA Experiment 20001909 PARAMETER Experiment Name: At_Drought_Reproduction_P Parameter: Timepoint (day) Value: 5
  misc_feature: MA Experiment 20001909 PARAMETER Experiment Name: At_Drought_Reproduction_P Parameter: Tissue Value: Flowers
  misc_feature: MA Experiment 20001909 PARAMETER Experiment Name: At_Drought_Reproduction_P Parameter: Treatment Value: Drought vs. No Drought
acacaaaacctggtgttttttctctcgtcgtcgtttggtcgtgtcctaagacaagaaccggcgaacgaagaacaaactttttgaatctaacatccgaaagaaagagagaaaatgtcgtttacaggaacattggataaatgcaaggcctgtgacaaaaccgtgtacgtgatggatttgttaacattagagggtaatacttatcacaaatcatgtttcagatgcacccattgcaaaggcactctcgtgataagcaattactcatcaatggatggagttctttactgtaagccacacttcgaacagcttttcaaagaatctggcaattacagcaagaattttcaggcaggaaagaccgagaagcccaatgatcatctgactcgaactccaagcaagttatcatcattcttcagtggaacacaagacaaatgtgcgacttgtaagaagacggtttacccacttgagaaagtaacaatggaaggagaaagttaccacaagacttgcttcaggtgcacacacagtggttgtcctttgactcactcttcttacgcttctcttaatggcgtcctctactgtaaagtccacttcaatcagctctttctcgagaaaggcagttacaatcacgtccatcaagccgctgctaaccaccgtcgatccgcctcttctggtggcgcttctcctccttctgatgatcacaaacctgacgacaccgcctcaattcccgaagcaaaagaagatgacgctgcccctgaagctgcaggagaagaggagcctgagccggtcgttgagtcttgaaaatgtcgtggaggaatgatcttatcagttctcaagtttgaagtttttatatgcgtttctgtttaatgaatatataaatacaaattgttgttgtttcttcttgtaaattcttgtaaagttttaaagctctttttggagagaatctgttgtaaacaaaatctttaacatccaattttttttgaagaggatatttttaacc

SEQ ID NO: 31008 - protein, 226 aa, Arabidopsis thaliana
  peptide (1)..(226): Ceres Seq. ID no. 13645939
  misc_feature (106)..(163): Pfam Name: LIM domain Pfam Description: LIM domain
  misc_feature (1)..(161): Homolog of NCBI NO: 11282608 NR Description: transcription factor L2 [imported] - Arabidopsis
  misc_feature (1)..(188): Homolog of NCBI NO: 15225592 NR Description: LIM-domain protein -related [Arabidopsis
  misc_feature (1)..(205): Homolog of NCBI NO: 15228188 NR Description: transcription factor L2 [Arabidopsis thaliana]
  misc_feature (1)..(183): Homolog of NCBI NO: 7489184 NR Description: probable transcription factor SF3 - common
  misc_feature (1)..(226): Homolog of NCBI NO: 4321401 NR Description: LIM domain protein PLIM-2 [Helianthus annuus]
  misc_feature (1)..(208): Homolog of NCBI NO: 8515104 NR Description: LIM domain protein PLIM-2 [Nicotiana tabacum]
  misc_feature (1)..(214): Homolog of NCBI NO: 15223476 NR Description: LIM domain protein -related [Arabidopsis thaliana]
  misc_feature (1)..(214): Homolog of NCBI NO: 25354704 NR Description: T1N6.19 protein - Arabidopsis thaliana
  misc_feature (2)..(213): Homolog of NCBI NO: 15233063 NR Description: LIM domain protein [Arabidopsis thaliana]
  misc_feature (1)..(226): Homolog of NCBI NO: 15225897 NR Description: LIM-domain protein -related [Arabidopsis
MSFTGTLDKCKACDKTVYVMDLLTLEGNTYHKSCFRCTHCKGTLVISNYSSMDGVLYCKPHFEQLFKESGNYSKNFQAGKTEKPNDHLTRTPSKLSSFFSGTQDKCATCKKTVYPLEKVTMEGESYHKTCFRCTHSGCPLTHSSYASLNGVLYCKVHFNQLFLEKGSYNHVHQAAANHRRSASSGGASPPSDDHKPDDTASIPEAKEDDAAPEAAGEEEPEPVVES

SEQ ID NO: 31009 - protein, 207 aa, Arabidopsis thaliana
  peptide (1)..(207): Ceres Seq. ID no. 13645940
  misc_feature (87)..(144): Pfam Name: LIM domain Pfam Description: LIM domain
  misc_feature (1)..(142): Homolog of NCBI NO: 11282608 NR Description: transcription factor L2 [imported] - Arabidopsis
  misc_feature (1)..(169): Homolog of NCBI NO: 15225592 NR Description: LIM-domain protein -related [Arabidopsis
  misc_feature (1)..(186): Homolog of NCBI NO: 15228188 NR Description: transcription factor L2 [Arabidopsis thaliana]
  misc_feature (1)..(164): Homolog of NCBI NO: 7489184 NR Description: probable transcription factor SF3 - common
  misc_feature (1)..(207): Homolog of NCBI NO: 4321401 NR Description: LIM domain protein PLIM-2 [Helianthus annuus]
  misc_feature (1)..(189): Homolog of NCBI NO: 8515104 NR Description: LIM domain protein PLIM-2 [Nicotiana tabacum]
  misc_feature (1)..(195): Homolog of NCBI NO: 15223476 NR Description: LIM domain protein -related [Arabidopsis thaliana]
  misc_feature (1)..(195): Homolog of NCBI NO: 25354704 NR Description: T1N6.19 protein - Arabidopsis thaliana
  misc_feature (1)..(194): Homolog of NCBI NO: 15233063 NR Description: LIM domain protein [Arabidopsis thaliana]
  misc_feature (1)..(207): Homolog of NCBI NO: 15225897 NR Description: LIM-domain protein -related [Arabidopsis
MDLLTLEGNTYHKSCFRCTHCKGTLVISNYSSMDGVLYCKPHFEQLFKESGNYSKNFQAGKTEKPNDHLTRTPSKLSSFFSGTQDKCATCKKTVYPLEKVTMEGESYHKTCFRCTHSGCPLTHSSYASLNGVLYCKVHFNQLFLEKGSYNHVHQAAANHRRSASSGGASPPSDDHKPDDTASIPEAKEDDAAPEAAGEEEPEPVVES

SEQ ID NO: 31010 - protein, 175 aa, Arabidopsis thaliana
  peptide (1)..(175): Ceres Seq. ID no. 13645941
  misc_feature (55)..(112): Pfam Name: LIM domain Pfam Description: LIM domain
  misc_feature (1)..(110): Homolog of NCBI NO: 11282608 NR Description: transcription factor L2 [imported] - Arabidopsis
  misc_feature (1)..(137): Homolog of NCBI NO: 15225592 NR Description: LIM-domain protein -related [Arabidopsis
  misc_feature (1)..(154): Homolog of NCBI NO: 15228188 NR Description: transcription factor L2 [Arabidopsis thaliana]
  misc_feature (1)..(132): Homolog of NCBI NO: 7489184 NR Description: probable transcription factor SF3 - common
  misc_feature (1)..(175): Homolog of NCBI NO: 4321401 NR Description: LIM domain protein PLIM-2 [Helianthus annuus]
  misc_feature (1)..(157): Homolog of NCBI NO: 8515104 NR Description: LIM domain protein PLIM-2 [Nicotiana tabacum]
  misc_feature (1)..(163): Homolog of NCBI NO: 15223476 NR Description: LIM domain protein -related [Arabidopsis thaliana]
  misc_feature (1)..(163): Homolog of NCBI NO: 25354704 NR Description: T1N6.19 protein - Arabidopsis thaliana
  misc_feature (1)..(162): Homolog of NCBI NO: 15233063 NR Description: LIM domain protein [Arabidopsis thaliana]
  misc_feature (1)..(175): Homolog of NCBI NO: 15225897 NR Description: LIM-domain protein -related [Arabidopsis
MDGVLYCKPHFEQLFKESGNYSKNFQAGKTEKPNDHLTRTPSKLSSFFSGTQDKCATCKKTVYPLEKVTMEGESYHKTCFRCTHSGCPLTHSSYASLNGVLYCKVHFNQLFLEKGSYNHVHQAAANHRRSASSGGASPPSDDHKPDDTASIPEAKEDDAAPEAAGEEEPEPVVES

SEQ ID NO: 31011 - DNA, 1266 bp, Arabidopsis thaliana
  misc_feature (1)..(1266): Ceres Seq. ID no. 13497673
  misc_feature: MA Experiment ID: 108434 Result: Down-regulated in Transcription
  misc_feature: MA Experiment 108434 PARAMETER Experiment Name: At_Root_Tips_cDNA_P Parameter: Tissue Value: Root Tips
  misc_feature: MA Experiment ID: 108435 Result: Up-regulated in Transcription
  misc_feature: MA Experiment 108435 PARAMETER Experiment Name: At_stm_Mutants_cDNA_P Parameter: Plant Line Value: wt Landsburg vs stm
  misc_feature: MA Experiment 108435 PARAMETER Experiment Name: At_stm_Mutants_cDNA_P Parameter: Tissue Value: Shoot Apical Meristem Region
  misc_feature: MA Experiment ID: 108464 Result: Down-regulated in Transcription
  misc_feature: MA Experiment 108464 PARAMETER Experiment Name: At_Germinating_Seeds_cDNA_P Parameter: Age (day) Value: 4 vs. 0
  misc_feature: MA Experiment 108464 PARAMETER Experiment Name: At_Germinating_Seeds_cDNA_P Parameter: Tissue Value: Germinating Seeds
  misc_feature: MA Experiment ID: 108473 Result: Down-regulated in Transcription
  misc_feature: MA Experiment 108473 PARAMETER Experiment Name: At_Drought_Flowers_cDNA_P Parameter: Timepoint (hr) Value: 7 d
  misc_feature: MA Experiment 108473 PARAMETER Experiment Name: At_Drought_Flowers_cDNA_P Parameter: Tissue Value: Flower
  misc_feature: MA Experiment 108473 PARAMETER Experiment Name: At_Drought_Flowers_cDNA_P Parameter: Treatment Value: Drought vs. No Drought
  misc_feature: MA Experiment ID: 108569 Result: Up-regulated in Transcription
  misc_feature: MA Experiment 108569 PARAMETER Experiment Name: At_0.001%_MeJA__cDNA_P Parameter: Timepoint (hr) Value: 6
  misc_feature: MA Experiment 108569 PARAMETER Experiment Name: At_0.001%_MeJA__cDNA_P Parameter: Tissue Value: Aerial
  misc_feature: MA Experiment 108569 PARAMETER Experiment Name: At_0.001%_MeJA__cDNA_P Parameter: Treatment Value: 0.001% MeJA vs. No Treatment
  misc_feature: MA Experiment ID: 108574 Result: Up-regulated in Transcription
  misc_feature: MA Experiment 108574 PARAMETER Experiment Name: At_Wounding__cDNA_P Parameter: Timepoint (hr) Value: 1
  misc_feature: MA Experiment 108574 PARAMETER Experiment Name: At_Wounding__cDNA_P Parameter: Tissue Value: Aerial
  misc_feature: MA Experiment 108574 PARAMETER Experiment Name: At_Wounding__cDNA_P Parameter: Treatment Value: Wounding vs. No Wounding
  misc_feature: MA Experiment ID: 108576 Result: Down-regulated in Transcription
  misc_feature: MA Experiment 108576 PARAMETER Experiment Name: At_42deg_Heat_cDNA_P Parameter: Temperature (deg C) Value: 42 vs. 22
  misc_feature: MA Experiment 108576 PARAMETER Experiment Name: At_42deg_Heat_cDNA_P Parameter: Timepoint (hr) Value: 1
  misc_feature: MA Experiment 108576 PARAMETER Experiment Name: At_42deg_Heat_cDNA_P Parameter: Tissue Value: Aerial
  misc_feature: MA Experiment ID: 108585 Result: Up-regulated in Transcription
  misc_feature: MA Experiment 108585 PARAMETER Experiment Name: At_5mM_NaNP_cDNA_P Parameter: Timepoint (hr) Value: 6
  misc_feature: MA Experiment 108585 PARAMETER Experiment Name: At_5mM_NaNP_cDNA_P Parameter: Tissue Value: Aerial
  misc_feature: MA Experiment 108585 PARAMETER Experiment Name: At_5mM_NaNP_cDNA_P Parameter: Treatment Value: null
  misc_feature: MA Experiment ID: 108595 Result: Up-regulated in Transcription
  misc_feature: MA Experiment 108595 PARAMETER Experiment Name: At_Ler-pi_Ovule_cDNA_P Parameter: Plant Line Value: null
  misc_feature: MA Experiment ID: 108668 Result: Down-regulated in Transcription
  misc_feature: MA Experiment 108668 PARAMETER Experiment Name: At_2mM_SA_cDNA_P Parameter: Plant Line Value: WS
  misc_feature: MA Experiment 108668 PARAMETER Experiment Name: At_2mM_SA_cDNA_P Parameter: Timepoint (hr) Value: 6
  misc_feature: MA Experiment 108668 PARAMETER Experiment Name: At_2mM_SA_cDNA_P Parameter: Treatment Value: 2mM SA vs. No Treatment
  misc_feature: MA Experiment ID: 20000070 Result: Up-regulated in Transcription
  misc_feature: MA Experiment 20000070 PARAMETER Experiment Name: At_100uM_ABA_Mutants_cDNA_P Parameter: Plant Line Value: CS24
  misc_feature: MA Experiment 20000070 PARAMETER Experiment Name: At_100uM_ABA_Mutants_cDNA_P Parameter: Timepoint (hr) Value: 6
  misc_feature: MA Experiment 20000070 PARAMETER Experiment Name: At_100uM_ABA_Mutants_cDNA_P Parameter: Tissue Value: Aerial
  misc_feature: MA Experiment 20000070 PARAMETER Experiment Name: At_100uM_ABA_Mutants_cDNA_P Parameter: Treatment Value: 100uM ABA vs. No Treatment
  misc_feature: MA Experiment ID: 20000087 Result: Up-regulated in Transcription
  misc_feature: MA Experiment 20000087 PARAMETER Experiment Name: At_100uM_ABA_Mutants_cDNA_P Parameter: Plant Line Value: WS
  misc_feature: MA Experiment 20000087 PARAMETER Experiment Name: At_100uM_ABA_Mutants_cDNA_P Parameter: Timepoint (hr) Value: 6
  misc_feature: MA Experiment 20000087 PARAMETER Experiment Name: At_100uM_ABA_Mutants_cDNA_P Parameter: Tissue Value: Aerial
  misc_feature: MA Experiment 20000087 PARAMETER Experiment Name: At_100uM_ABA_Mutants_cDNA_P Parameter: Treatment Value: 100uM ABA vs. No Treatment
  misc_feature: MA Experiment ID: 20000112 Result: Down-regulated in Transcription
  misc_feature: MA Experiment 20000112 PARAMETER Experiment Name: At_42deg_Heat_cDNA_P Parameter: Temperature (deg C) Value: 42 vs. 22
  misc_feature: MA Experiment 20000112 PARAMETER Experiment Name: At_42deg_Heat_cDNA_P Parameter: Timepoint (hr) Value: 2
  misc_feature: MA Experiment 20000112 PARAMETER Experiment Name: At_42deg_Heat_cDNA_P Parameter: Tissue Value: Aerial
  misc_feature: MA Experiment ID: 20000113 Result: Down-regulated in Transcription
  misc_feature: MA Experiment 20000113 PARAMETER Experiment Name: At_42deg_Heat_cDNA_P Parameter: Temperature (deg C) Value: 42 vs. 22
  misc_feature: MA Experiment 20000113 PARAMETER Experiment Name: At_42deg_Heat_cDNA_P Parameter: Timepoint (hr) Value: 8
  misc_feature: MA Experiment 20000113 PARAMETER Experiment Name: At_42deg_Heat_cDNA_P Parameter: Tissue Value: Aerial
  misc_feature: MA Experiment ID: 20000180 Result: Up-regulated in Transcription
  misc_feature: MA Experiment 20000180 PARAMETER Experiment Name: At_Germinating_Seeds_P Parameter: Age (hr) Value: 24 vs. 0
  misc_feature: MA Experiment 20000180 PARAMETER Experiment Name: At_Germinating_Seeds_P Parameter: Tissue Value: Germinating Seeds
  misc_feature: MA Experiment ID: 20000185 Result: Down-regulated in Transcription
  misc_feature: MA Experiment 20000185 PARAMETER Experiment Name: At_Roots__P Parameter: Age (day) Value: 7 vs. 21
  misc_feature: MA Experiment 20000185 PARAMETER Experiment Name: At_Roots__P Parameter: Organism Value: A. thaliana
  misc_feature: MA Experiment 20000185 PARAMETER Experiment Name: At_Roots__P Parameter: Tissue Value: Roots vs. Whole Plant
  misc_feature: MA Experiment ID: 20000211 Result: Up-regulated in Transcription
  misc_feature: MA Experiment 20000211 PARAMETER Experiment Name: At_0.001percent_MeJA__P Parameter: Age (day) Value: 14
  misc_feature: MA Experiment 20000211 PARAMETER Experiment Name: At_0.001percent_MeJA__P Parameter: Organism Value: A. thaliana
  misc_feature: MA Experiment 20000211 PARAMETER Experiment Name: At_0.001percent_MeJA__P Parameter: Plant Line Value: WS
  misc_feature: MA Experiment 20000211 PARAMETER Experiment Name: At_0.001percent_MeJA__P Parameter: Timepoint (hr) Value: 1
  misc_feature: MA Experiment 20000211 PARAMETER Experiment Name: At_0.001percent_MeJA__P Parameter: Tissue Value: Aerial
  misc_feature: MA Experiment 20000211 PARAMETER Experiment Name: At_0.001percent_MeJA__P Parameter: Treatment Value: 0.001percent MeJA vs. No Treatment
  misc_feature: MA Experiment ID: 20000224 Result: Up-regulated in Transcription
  misc_feature: MA Experiment ID: 20000264 Result: Up-regulated in Transcription
  misc_feature: MA Experiment 20000264 PARAMETER Experiment Name: At_Open_Flower_P Parameter: Age (day) Value: 21
  misc_feature: MA Experiment 20000264 PARAMETER Experiment Name: At_Open_Flower_P Parameter: Plant Line Value: WS
  misc_feature: MA Experiment 20000264 PARAMETER Experiment Name: At_Open_Flower_P Parameter: Tissue Value: Open Flower vs. Whole Plant
  misc_feature: MA Experiment ID: 20000265 Result: Up-regulated in Transcription
  misc_feature: MA Experiment 20000265 PARAMETER Experiment Name: At_Open_Flower_P Parameter: Age (day) Value: 21
  misc_feature: MA Experiment 20000265 PARAMETER Experiment Name: At_Open_Flower_P Parameter: Plant Line Value: WS
  misc_feature: MA Experiment 20000265 PARAMETER Experiment Name: At_Open_Flower_P Parameter: Tissue Value: Closed Flower vs. Whole Plant
  misc_feature: MA Experiment ID: 20000286 Result: Up-regulated in Transcription
  misc_feature: MA Experiment 20000286 PARAMETER Experiment Name: At_Open_Flower_P Parameter: Age (day) Value: 21
  misc_feature: MA Experiment 20000286 PARAMETER Experiment Name: At_Open_Flower_P Parameter: Plant Line Value: WS
  misc_feature: MA Experiment 20000286 PARAMETER Experiment Name: At_Open_Flower_P Parameter: Tissue Value: Half Open vs. Whole Plant
  misc_feature: MA Experiment ID: 20000437 Result: Down-regulated in Transcription
  misc_feature: MA Experiment 20000437 PARAMETER Experiment Name: At_Drought_P Parameter: Age (day) Value: 8
  misc_feature: MA Experiment 20000437 PARAMETER Experiment Name: At_Drought_P Parameter: Organism Value: A. thaliana
  misc_feature: MA Experiment 20000437 PARAMETER Experiment Name: At_Drought_P Parameter: Plant Line Value: WS
  misc_feature: MA Experiment 20000437 PARAMETER Experiment Name: At_Drought_P Parameter: Timepoint (hr) Value: 24
  misc_feature: MA Experiment 20000437 PARAMETER Experiment Name: At_Drought_P Parameter: Tissue Value: Whole Plant
  misc_feature: MA Experiment 20000437 PARAMETER Experiment Name: At_Drought_P Parameter: Treatment Value: Drought vs. No Drought
  misc_feature: MA Experiment ID: 20000438 Result: Down-regulated in Transcription
  misc_feature: MA Experiment 20000438 PARAMETER Experiment Name: At_Shoots__P Parameter: Age (day) Value: 14
  misc_feature: MA Experiment 20000438 PARAMETER Experiment Name: At_Shoots__P Parameter: Tissue Value: Shoots vs. Whole Plant
  misc_feature: MA Experiment ID: 20000495 Result: Up-regulated in Transcription
  misc_feature: MA Experiment 20000495 PARAMETER Experiment Name: At_Guard_Cells_P Parameter: Harvest Date Value: 8/2/2002
  misc_feature: MA Experiment 20000495 PARAMETER Experiment Name: At_Guard_Cells_P Parameter: Organism Value: A. thaliana
  misc_feature: MA Experiment 20000495 PARAMETER Experiment Name: At_Guard_Cells_P Parameter: Tissue Value: Guard Cells vs. Leaves
  misc_feature: MA Experiment ID: 20000794 Result: Down-regulated in Transcription
  misc_feature: MA Experiment 20000794 PARAMETER Experiment Name: At_Petals_P Parameter: Age (day) Value: 23-25 days
  misc_feature: MA Experiment 20000794 PARAMETER Experiment Name: At_Petals_P Parameter: Plant Line Value: WS
  misc_feature: MA Experiment 20000794 PARAMETER Experiment Name: At_Petals_P Parameter: Tissue Value: Petals vs. Whole plant
  misc_feature: MA Experiment ID: 20001248 Result: Down-regulated in Transcription
  misc_feature: MA Experiment 20001248 PARAMETER Experiment Name: At_Far-red-induction_P Parameter: Age (day) Value: 7
  misc_feature: MA Experiment 20001248 PARAMETER Experiment Name: At_Far-red-induction_P Parameter: Light Value: Far-red vs. White
  misc_feature: MA Experiment 20001248 PARAMETER Experiment Name: At_Far-red-induction_P Parameter: Organism Value: A. thaliana
  misc_feature: MA Experiment 20001248 PARAMETER Experiment Name: At_Far-red-induction_P Parameter: Plant Line Value: Columbia
  misc_feature: MA Experiment 20001248 PARAMETER Experiment Name: At_Far-red-induction_P Parameter: Timepoint (hr) Value: 4
  misc_feature: MA Experiment 20001248 PARAMETER Experiment Name: At_Far-red-induction_P Parameter: Tissue Value: Whole Plant
  misc_feature: MA Experiment ID: 20001450 Result: Down-regulated in Transcription
  misc_feature: MA Experiment 20001450 PARAMETER Experiment Name: At_Far-red-induction_P Parameter: Age (day) Value: 7
  misc_feature: MA Experiment 20001450 PARAMETER Experiment Name: At_Far-red-induction_P Parameter: Light Value: Far-red vs. White
  misc_feature: MA Experiment 20001450 PARAMETER Experiment Name: At_Far-red-induction_P Parameter: Organism Value: A. thaliana
  misc_feature: MA Experiment 20001450 PARAMETER Experiment Name: At_Far-red-induction_P Parameter: Plant Line Value: Columbia
  misc_feature: MA Experiment 20001450 PARAMETER Experiment Name: At_Far-red-induction_P Parameter: Timepoint (hr) Value: 8
  misc_feature: MA Experiment 20001450 PARAMETER Experiment Name: At_Far-red-induction_P Parameter: Tissue Value: Whole Plant
  misc_feature: MA Experiment ID: 20001451 Result: Down-regulated in Transcription
  misc_feature: MA Experiment 20001451 PARAMETER Experiment Name: At_Far-red-induction_P Parameter: Age (day) Value: 7
  misc_feature: MA Experiment 20001451 PARAMETER Experiment Name: At_Far-red-induction_P Parameter: Light Value: Far-red vs. White
  misc_feature: MA Experiment 20001451 PARAMETER Experiment Name: At_Far-red-induction_P Parameter: Organism Value: A. thaliana
  misc_feature: MA Experiment 20001451 PARAMETER Experiment Name: At_Far-red-induction_P Parameter: Plant Line Value: Columbia
  misc_feature: MA Experiment 20001451 PARAMETER Experiment Name: At_Far-red-induction_P Parameter: Timepoint (hr) Value: 24
  misc_feature: MA Experiment 20001451 PARAMETER Experiment Name: At_Far-red-induction_P Parameter: Tissue Value: Whole Plant
  misc_feature: MA Experiment ID: 20001560 Result: Up-regulated in Transcription
  misc_feature: MA Experiment 20001560 PARAMETER Experiment Name: At_Drought_Soil_Dry_P Parameter: Age (day) Value: 28
  misc_feature: MA Experiment 20001560 PARAMETER Experiment Name: At_Drought_Soil_Dry_P Parameter: Organism Value: A. thaliana
  misc_feature: MA Experiment 20001560 PARAMETER Experiment Name: At_Drought_Soil_Dry_P Parameter: Plant Line Value: WS
  misc_feature: MA Experiment 20001560 PARAMETER Experiment Name: At_Drought_Soil_Dry_P Parameter: Post Timepoint (hr) Value: None
  misc_feature: MA Experiment 20001560 PARAMETER Experiment Name: At_Drought_Soil_Dry_P Parameter: Post-Treatment Value: None
  misc_feature: MA Experiment 20001560 PARAMETER Experiment Name: At_Drought_Soil_Dry_P Parameter: Timepoint (day) Value: 14
  misc_feature: MA Experiment 20001560 PARAMETER Experiment Name: At_Drought_Soil_Dry_P Parameter: Treatment Value: Drought vs. No Drought
  misc_feature: MA Experiment ID: 20001911 Result: Down-regulated in Transcription
  misc_feature: MA Experiment 20001911 PARAMETER Experiment Name: At_Drought_Reproduction_P Parameter: Age (day) Value: 40
  misc_feature: MA Experiment 20001911 PARAMETER Experiment Name: At_Drought_Reproduction_P Parameter: Organism Value: A. thaliana
  misc_feature: MA Experiment 20001911 PARAMETER Experiment Name: At_Drought_Reproduction_P Parameter: Plant Line Value: WS
  misc_feature: MA Experiment 20001911 PARAMETER Experiment Name: At_Drought_Reproduction_P Parameter: Timepoint (day) Value: 10
  misc_feature: MA Experiment 20001911 PARAMETER Experiment Name: At_Drought_Reproduction_P Parameter: Tissue Value: Flowers
  misc_feature: MA Experiment 20001911 PARAMETER Experiment Name: At_Drought_Reproduction_P Parameter: Treatment Value: Drought vs. No Drought
ctgtgaataaatttatgtgtgaaaaaaaattgtacgttggaatagtgaaaaccctaactgacaaaatcagtaacattacacaagctgtgttccattaaagtctgtgtttatatacaaagaacttgctcattcctcaaagcatccacacataatcacgatgaagctctttgttcatctctctatcttcttctccatcctcttcatcactctcccatcttcttacagctgcaccgaaaatgacaagaatgccctccttcaaatcaagaaagcacttggcaatcctccccttctatcctcctggaacccccgaaccgactgttgtaccggctggaccggcgtcgaatgcactaaccgtcgcgttaccggtctcagcgttacctccggcgaagtctccggtcagatctcgtaccagatcggcgacctcgttgacctccgtacactagatttcagctacctgccacacctcaccggaaacatcccacgcaccatcaccaaactcaagaacctcaacactctctacttgaagcacactagtctctccggtccgattcctgattacatcagcgagctcaagagcctcacgttcttggacctttcttttaaccaatttaccggtccaattcccggttcgctatctcagatgccgaagcttgaagccattcaaatcaacgataataagctaaccggttctataccaaactctttcggttcttttgttggcaacgtccctaatctctacttgtctaacaataagctgtcaggaaaaataccggaatcgttgtctaaatacgacttcaacgcagtggatttgtcgggaaatggtttcgaaggagatgcctttatgttcttcggacggaacaaaacaacagtacgagtggatttgtcgagaaacatgtttaatttcgatctcgtcaaggttaagttcgctagaagcatagtttcgttggatctgagccagaaccatatctacgggaagataccaccagcactgactaaactacacctcgagcatttcaacgtgagcgacaaccatctctgcggaaaaatcccaagtggcggtctacttcagacctttgaaccatctgccttcgctcacaacatctgtctttgtggaactccccttaaggcttgttaatttggtttaatcttggcggaagaataaaaataatgttgaatatgttatgatgatgtgttcattatcaccgccaaaccaagtttattgtttctttgttatgaatttaatttaatggcaagaattggttacgt

SEQ ID NO: 31012 - protein, 325 aa, Arabidopsis thaliana
  peptide (1)..(325): Ceres Seq. ID no. 13497674
  misc_feature (282)..(304): Pfam Name: Leucine Rich Repeat Pfam Description: Leucine Rich Repeat
  misc_feature (7)..(325): Homolog of NCBI NO: 34068091 NR Description: polygalacturonase inhibiting protein [Prunus
  misc_feature (1)..(325): Homolog of NCBI NO: 21667647 NR Description: polygalacturonase-inhibiting protein [Vitis
  misc_feature (8)..(325): Homolog of NCBI NO: 21593869 NR Description: polygalacturonase inhibiting protein 1
  misc_feature (7)..(325): Homolog of NCBI NO: 18148376 NR Description: polygalacturonase-inhibitor protein [Citrus sp.
  misc_feature (7)..(325): Homolog of NCBI NO: 15240182 NR Description: polygalacturonase inhibiting protein (PGIP1)
  misc_feature (7)..(325): Homolog of NCBI NO: 18148925 NR Description: polygalacturonase-inhibitor protein [Citrus sp.
  misc_feature (1)..(202): Homolog of NCBI NO: 12322044 NR Description: unknown protein; 756-145 [Arabidopsis thaliana]
  misc_feature (1)..(325): Homolog of NCBI NO: 7637423 NR Description: leucine-rich repeat protein FLR1 [Arabidopsis
  misc_feature (1)..(325): Homolog of NCBI NO: 16323089 NR Description: At3g12148/T23B7.11 [Arabidopsis thaliana]
  misc_feature (1)..(325): Homolog of NCBI NO: 9294113 NR Description: leucine-rich repeat protein FLR1 [Arabidopsis
MKLFVHLSIFFSILFITLPSSYSCTENDKNALLQIKKALGNPPLLSSWNPRTDCCTGWTGVECTNRRVTGLSVTSGEVSGQISYQIGDLVDLRTLDFSYLPHLTGNIPRTITKLKNLNTLYLKHTSLSGPIPDYISELKSLTFLDLSFNQFTGPIPGSLSQMPKLEAIQINDNKLTGSIPNSFGSFVGNVPNLYLSNNKLSGKIPESLSKYDFNAVDLSGNGFEGDAFMFFGRNKTTVRVDLSRNMFNFDLVKVKFARSIVSLDLSQNHIYGKIPPALTKLHLEHFNVSDNHLCGKIPSGGLLQTFEPSAFAHNICLCGTPLKAC

SEQ ID NO: 31013 - protein, 164 aa, Arabidopsis thaliana
  peptide (1)..(164): Ceres Seq. ID no. 13497675
  misc_feature (121)..(143): Pfam Name: Leucine Rich Repeat Pfam Description: Leucine Rich Repeat
  misc_feature (1)..(164): Homolog of NCBI NO: 34068091 NR Description: polygalacturonase inhibiting protein [Prunus
  misc_feature (1)..(164): Homolog of NCBI NO: 21667647 NR Description: polygalacturonase-inhibiting protein [Vitis
  misc_feature (1)..(164): Homolog of NCBI NO: 21593869 NR Description: polygalacturonase inhibiting protein 1
  misc_feature (1)..(164): Homolog of NCBI NO: 18148376 NR Description: polygalacturonase-inhibitor protein [Citrus sp.
  misc_feature (1)..(164): Homolog of NCBI NO: 15240182 NR Description: polygalacturonase inhibiting protein (PGIP1)
  misc_feature (1)..(164): Homolog of NCBI NO: 18148925 NR Description: polygalacturonase-inhibitor protein [Citrus sp.
  misc_feature (1)..(41): Homolog of NCBI NO: 12322044 NR Description: unknown protein; 756-145 [Arabidopsis thaliana]
  misc_feature (1)..(164): Homolog of NCBI NO: 7637423 NR Description: leucine-rich repeat protein FLR1 [Arabidopsis
  misc_feature (1)..(164): Homolog of NCBI NO: 16323089 NR Description: At3g12148/T23B7.11 [Arabidopsis thaliana]
  misc_feature (1)..(164): Homolog of NCBI NO: 9294113 NR Description: leucine-rich repeat protein FLR1 [Arabidopsis
MPKLEAIQINDNKLTGSIPNSFGSFVGNVPNLYLSNNKLSGKIPESLSKYDFNAVDLSGNGFEGDAFMFFGRNKTTVRVDLSRNMFNFDLVKVKFARSIVSLDLSQNHIYGKIPPALTKLHLEHFNVSDNHLCGKIPSGGLLQTFEPSAFAHNICLCGTPLKAC

SEQ ID NO: 31014 - DNA, 1336 bp, Arabidopsis thaliana
  misc_feature (1)..(1336): Ceres Seq. ID no. 12322726
  misc_feature: MA Experiment ID: 108462 Result: Up-regulated in Transcription
  misc_feature: MA Experiment 108462 PARAMETER Experiment Name: At_Germinating_Seeds_cDNA_P Parameter: Age (day) Value: 2 vs. 0
  misc_feature: MA Experiment 108462 PARAMETER Experiment Name: At_Germinating_Seeds_cDNA_P Parameter: Tissue Value: Germinating Seeds
  misc_feature: MA Experiment ID: 108463 Result: Up-regulated in Transcription
  misc_feature: MA Experiment 108463 PARAMETER Experiment Name: At_Germinating_Seeds_cDNA_P Parameter: Age (day) Value: 3 vs. 0
  misc_feature: MA Experiment 108463 PARAMETER Experiment Name: At_Germinating_Seeds_cDNA_P Parameter: Tissue Value: Germinating Seeds
  misc_feature: MA Experiment ID: 108464 Result: Up-regulated in Transcription
  misc_feature: MA Experiment 108464 PARAMETER Experiment Name: At_Germinating_Seeds_cDNA_P Parameter: Age (day) Value: 4 vs. 0
  misc_feature: MA Experiment 108464 PARAMETER Experiment Name: At_Germinating_Seeds_cDNA_P Parameter: Tissue Value: Germinating Seeds
  misc_feature: MA Experiment ID: 108573 Result: Down-regulated in Transcription
  misc_feature: MA Experiment 108573 PARAMETER Experiment Name: At_Drought_cDNA_P Parameter: Timepoint (hr) Value: 6
  misc_feature: MA Experiment 108573 PARAMETER Experiment Name: At_Drought_cDNA_P Parameter: Tissue Value: Aerial
  misc_feature: MA Experiment 108573 PARAMETER Experiment Name: At_Drought_cDNA_P Parameter: Treatment Value: Drought vs. No Drought
  misc_feature: MA Experiment ID: 108577 Result: Down-regulated in Transcription
  misc_feature: MA Experiment 108577 PARAMETER Experiment Name: At_42deg_Heat_cDNA_P Parameter: Temperature (deg C) Value: 42 vs. 22
  misc_feature: MA Experiment 108577 PARAMETER Experiment Name: At_42deg_Heat_cDNA_P Parameter: Timepoint (hr) Value: 6
  misc_feature: MA Experiment 108577 PARAMETER Experiment Name: At_42deg_Heat_cDNA_P Parameter: Tissue Value: Aerial
  misc_feature: MA Experiment ID: 20000111 Result: Down-regulated in Transcription
  misc_feature: MA Experiment 20000111 PARAMETER Experiment Name: At_42deg_Heat_cDNA_P Parameter: Temperature (deg C) Value: 42 vs. 22
  misc_feature: MA Experiment 20000111 PARAMETER Experiment Name: At_42deg_Heat_cDNA_P Parameter: Timepoint (hr) Value: 6
  misc_feature: MA Experiment 20000111 PARAMETER Experiment Name: At_42deg_Heat_cDNA_P Parameter: Tissue Value: Aerial
  misc_feature: MA Experiment ID: 20000113 Result: Down-regulated in Transcription
  misc_feature: MA Experiment 20000113 PARAMETER Experiment Name: At_42deg_Heat_cDNA_P Parameter: Temperature (deg C) Value: 42 vs. 22
  misc_feature: MA Experiment 20000113 PARAMETER Experiment Name: At_42deg_Heat_cDNA_P Parameter: Timepoint (hr) Value: 8
  misc_feature: MA Experiment 20000113 PARAMETER Experiment Name: At_42deg_Heat_cDNA_P Parameter: Tissue Value: Aerial
  misc_feature: MA Experiment ID: 20000180 Result: Up-regulated in Transcription
  misc_feature: MA Experiment 20000180 PARAMETER Experiment Name: At_Germinating_Seeds_P Parameter: Age (hr) Value: 24 vs. 0
  misc_feature: MA Experiment 20000180 PARAMETER Experiment Name: At_Germinating_Seeds_P Parameter: Tissue Value: Germinating Seeds
  misc_feature: MA Experiment ID: 20000185 Result: Down-regulated in Transcription
  misc_feature: MA Experiment 20000185 PARAMETER Experiment Name: At_Roots__P Parameter: Age (day) Value: 7 vs. 21
  misc_feature: MA Experiment 20000185 PARAMETER Experiment Name: At_Roots__P Parameter: Organism Value: A. thaliana
  misc_feature: MA Experiment 20000185 PARAMETER Experiment Name: At_Roots__P Parameter: Tissue Value: Roots vs. Whole Plant
  misc_feature: MA Experiment ID: 20000224 Result: Up-regulated in Transcription
  misc_feature: MA Experiment ID: 20000438 Result: Down-regulated in Transcription
  misc_feature: MA Experiment 20000438 PARAMETER Experiment Name: At_Shoots__P Parameter: Age (day) Value: 14
  misc_feature: MA Experiment 20000438 PARAMETER Experiment Name: At_Shoots__P Parameter: Tissue Value: Shoots vs. Whole Plant
  misc_feature: MA Experiment ID: 20000439 Result: Down-regulated in Transcription
  misc_feature: MA Experiment 20000439 PARAMETER Experiment Name: At_Roots__P Parameter: Age (day) Value: 14 vs. 21
  misc_feature: MA Experiment 20000439 PARAMETER Experiment Name: At_Roots__P Parameter: Organism Value: A. thaliana
  misc_feature: MA Experiment 20000439 PARAMETER Experiment Name: At_Roots__P Parameter: Tissue Value: Roots vs. Whole Plant
  misc_feature: MA Experiment ID: 20000496 Result: Up-regulated in Transcription
  misc_feature: MA Experiment 20000496 PARAMETER Experiment Name: At_Guard_Cells_P Parameter: Harvest Date Value: 7/19/2002
  misc_feature: MA Experiment 20000496 PARAMETER Experiment Name: At_Guard_Cells_P Parameter: Organism Value: Canola
  misc_feature: MA Experiment 20000496 PARAMETER Experiment Name: At_Guard_Cells_P Parameter: Tissue Value: Guard Cells vs. Leaves
  misc_feature: MA Experiment ID: 20001905 Result: Down-regulated in Transcription
  misc_feature: MA Experiment 20001905 PARAMETER Experiment Name: At_Drought_Reproduction_P Parameter: Age (day) Value: 40
  misc_feature: MA Experiment 20001905 PARAMETER Experiment Name: At_Drought_Reproduction_P Parameter: Organism Value: A. thaliana
  misc_feature: MA Experiment 20001905 PARAMETER Experiment Name: At_Drought_Reproduction_P Parameter: Plant Line Value: WS
  misc_feature: MA Experiment 20001905 PARAMETER Experiment Name: At_Drought_Reproduction_P Parameter: Timepoint (day) Value: 10
  misc_feature: MA Experiment 20001905 PARAMETER Experiment Name: At_Drought_Reproduction_P Parameter: Tissue Value: Rosettes
  misc_feature: MA Experiment 20001905 PARAMETER Experiment Name: At_Drought_Reproduction_P Parameter: Treatment Value: Drought vs. No Drought
aaaaacttagaaagcagagaagagttaaagtgttagagagagagagagacagagatcggagatgtgtagcaacaaagcaagtccggtcgtcggagaagaaaaacagagtacgagatcatcgaagaggatcaagaagagaaaaaacagagaagctaccaccaccatggaggataagtcttcttccaatcttgacgcgtctcgtaagatcagaacaaaaacgaaaaaacccaaatttctcagtctcaagctcgagctcaacacttctcacgagatcaacgagaatcccagaagcaagaagagcaagaagaagaacaacaacaaaaaacagagcaagaagaaagaaccggatacgacgccgtttaaggagaagaagagagcagagactactactacactggggggaggagagaaagaagaagagcaatacgacaccgttgcagcttacctcttcaattccgccaccgacagtacaatttcttcgatccacgatctcctcccttcctccgcggccaccgatgtagattgcggcggagaaaggaataatctttctccgtatgatcgtcaagaccacggatcgtcgtcgtcttcccttctaaggacggcgatgaggaaaggagcgagcgaggaggaggagacgacggaggagcggtgggtgagttattcagaggttgtggaggaagtgatgagtcggagcgggactccacgttgttgcggcggaggcgatggaaacgatggccggccttcgttggctctgaagcttgattatgagcagatcatggaggcttggtcggataaaggtacgctttatgtcgacggagaaccgccgcagacagtgccggacttgcatgcttccgctgatgggtttaatgacggcggagaggcggggaatttatgggcagtgccggagatggaaacgacggagaggttatggagagggcatagagaagccagcttgctccggtataaagagaaacggcaaaaccgtcttttctctaagcggattcgatatcaagttcgtaaactcaatgccgagaaacgtcctcgtgttaaaggccggtttgtaaaaagagaggattcataaaccacctaagtgacggatgtttagtatttcatgatattgctattttgtgacttgttgagaagttaaggctcaaccggagtataccgagaactgaagatgatattggtctgtataggggtcttgaccagctcggttatgcaaaagtttcggttttgtttggccgcctagctttggttctcttattagaaaagtcaactaatttgtaccaaatcatctgaacaataatgataataaaaatgagaagttaatgggtgc

SEQ ID NO: 31015 - protein, 339 aa, Arabidopsis thaliana
  peptide (1)..(339): Ceres Seq. ID no. 12322727
  misc_feature (299)..(338): Pfam Name: CCT motif Pfam Description: CCT motif
  misc_feature (106)..(336): Homolog of NCBI NO: 18409053 NR Description: CONSTANS B-box zinc finger family protein
  misc_feature (280)..(337): Homolog of NCBI NO: 18390719 NR Description: expressed protein
  misc_feature (226)..(339): Homolog of NCBI NO: 18416659 NR Description: putative protein
  misc_feature (199)..(336): Homolog of NCBI NO: 30689221 NR Description: CONSTANS B-box zinc finger family protein
  misc_feature (199)..(336): Homolog of NCBI NO: 25403018 NR Description: probable zinc finger protein [imported] -
  misc_feature (199)..(336): Homolog of NCBI NO: 20260550 NR Description: unknown protein [Arabidopsis thaliana]
  misc_feature (226)..(336): Homolog of NCBI NO: 13702811 NR Description: putative zinc finger protein [Oryza sativa]
  misc_feature (35)..(339): Homolog of NCBI NO: 21554072 NR Description: unknown [Arabidopsis thaliana]
  misc_feature (1)..(339): Homolog of NCBI NO: 18417359 NR Description: putative protein
  misc_feature (35)..(332): Homolog of NCBI NO: 11357545 NR Description: hypothetical protein F18O22.160 - Arabidopsis
MCSNKASPVVGEEKQSTRSSKRIKKRKNREATTTMEDKSSSNLDASRKIRTKTKKPKFLSLKLELNTSHEINENPRSKKSKKKNNNKKQSKKKEPDTTPFKEKKRAETTTTLGGGEKEEEQYDTVAAYLFNSATDSTISSIHDLLPSSAATDVDCGGERNNLSPYDRQDHGSSSSSLLRTAMRKGASEEEETTEERWVSYSEVVEEVMSRSGTPRCCGGGDGNDGRPSLALKLDYEQIMEAWSDKGTLYVDGEPPQTVPDLHASADGFNDGGEAGNLWAVPEMETTERLWRGHREASLLRYKEKRQNRLFSKRIRYQVRKLNAEKRPRVKGRFVKREDS

SEQ ID NO: 31016 - protein, 305 aa, Arabidopsis thaliana
  peptide (1)..(305): Ceres Seq. ID no. 12322728
  misc_feature (265)..(304): Pfam Name: CCT motif Pfam Description: CCT motif
  misc_feature (72)..(302): Homolog of NCBI NO: 18409053 NR Description: CONSTANS B-box zinc finger family protein
  misc_feature (246)..(303): Homolog of NCBI NO: 18390719 NR Description: expressed protein
  misc_feature (192)..(305): Homolog of NCBI NO: 18416659 NR Description: putative protein
  misc_feature (165)..(302): Homolog of NCBI NO: 30689221 NR Description: CONSTANS B-box zinc finger family protein
  misc_feature (165)..(302): Homolog of NCBI NO: 25403018 NR Description: probable zinc finger protein [imported] -
  misc_feature (165)..(302): Homolog of NCBI NO: 20260550 NR Description: unknown protein [Arabidopsis thaliana]
  misc_feature (192)..(302): Homolog of NCBI NO: 13702811 NR Description: putative zinc finger protein [Oryza sativa]
  misc_feature (1)..(305): Homolog of NCBI NO: 21554072 NR Description: unknown [Arabidopsis thaliana]
  misc_feature (1)..(305): Homolog of NCBI NO: 18417359 NR Description: putative protein
  misc_feature (1)..(298): Homolog of NCBI NO: 11357545 NR Description: hypothetical protein F18O22.160 - Arabidopsis
MEDKSSSNLDASRKIRTKTKKPKFLSLKLELNTSHEINENPRSKKSKKKNNNKKQSKKKEPDTTPFKEKKRAETTTTLGGGEKEEEQYDTVAAYLFNSATDSTISSIHDLLPSSAATDVDCGGERNNLSPYDRQDHGSSSSSLLRTAMRKGASEEEETTEERWVSYSEVVEEVMSRSGTPRCCGGGDGNDGRPSLALKLDYEQIMEAWSDKGTLYVDGEPPQTVPDLHASADGFNDGGEAGNLWAVPEMETTERLWRGHREASLLRYKEKRQNRLFSKRIRYQVRKLNAEKRPRVKGRFVKREDS

SEQ ID NO: 31017 - protein, 172 aa, Arabidopsis thaliana
  peptide (1)..(172): Ceres Seq. ID no. 12322729
KLRKQRRVKVLERERDRDRRCVATKQVRSSEKKNRVRDHRRGSRREKTEKLPPPWRISLLPILTRLVRSEQKRKNPNFSVSSSSSTLLTRSTRIPEARRARRRTTTKNRARRKNRIRRRLRRRREQRLLLHWGEERKKKSNTTPLQLTSSIPPPTVQFLRSTISSLPPRPPM

SEQ ID NO: 31018 - DNA, 789 bp, Arabidopsis thaliana
  misc_feature (1)..(789): Ceres Seq. ID no. 12397073
  misc_feature: MA Experiment ID: 108434 Result: Down-regulated in Transcription
  misc_feature: MA Experiment 108434 PARAMETER Experiment Name: At_Root_Tips_cDNA_P Parameter: Tissue Value: Root Tips
  misc_feature: MA Experiment ID: 108462 Result: Up-regulated in Transcription
  misc_feature: MA Experiment 108462 PARAMETER Experiment Name: At_Germinating_Seeds_cDNA_P Parameter: Age (day) Value: 2 vs. 0
  misc_feature: MA Experiment 108462 PARAMETER Experiment Name: At_Germinating_Seeds_cDNA_P Parameter: Tissue Value: Germinating Seeds
  misc_feature: MA Experiment ID: 108463 Result: Up-regulated in Transcription
  misc_feature: MA Experiment 108463 PARAMETER Experiment Name: At_Germinating_Seeds_cDNA_P Parameter: Age (day) Value: 3 vs. 0
  misc_feature: MA Experiment 108463 PARAMETER Experiment Name: At_Germinating_Seeds_cDNA_P Parameter: Tissue Value: Germinating Seeds
  misc_feature: MA Experiment ID: 108605 Result: Down-regulated in Transcription
  misc_feature: MA Experiment 108605 PARAMETER Experiment Name: At_100uM_ABA_cDNA_P Parameter: Timepoint (hr) Value: 6
  misc_feature: MA Experiment 108605 PARAMETER Experiment Name: At_100uM_ABA_cDNA_P Parameter: Tissue Value: Aerial
  misc_feature: MA Experiment 108605 PARAMETER Experiment Name: At_100uM_ABA_cDNA_P Parameter: Treatment Value: 100uM ABA vs. No Treatment
  misc_feature: MA Experiment ID: 20000180 Result: Up-regulated in Transcription
  misc_feature: MA Experiment 20000180 PARAMETER Experiment Name: At_Germinating_Seeds_P Parameter: Age (hr) Value: 24 vs. 0
  misc_feature: MA Experiment 20000180 PARAMETER Experiment Name: At_Germinating_Seeds_P Parameter: Tissue Value: Germinating Seeds
  misc_feature: MA Experiment ID: 20000227 Result: Down-regulated in Transcription
  misc_feature: MA Experiment 20000227 PARAMETER Experiment Name: At_Root-Tips-vs-Tops_P Parameter: Tissue Value: Root Tips vs. Root Tops
  misc_feature: MA Experiment ID: 20000794 Result: Up-regulated in Transcription
  misc_feature: MA Experiment 20000794 PARAMETER Experiment Name: At_Petals_P Parameter: Age (day) Value: 23-25 days
  misc_feature: MA Experiment 20000794 PARAMETER Experiment Name: At_Petals_P Parameter: Plant Line Value: WS
  misc_feature: MA Experiment 20000794 PARAMETER Experiment Name: At_Petals_P Parameter: Tissue Value: Petals vs. Whole plant
  misc_feature: MA Experiment ID: 20001247 Result: Down-regulated in Transcription
  misc_feature: MA Experiment 20001247 PARAMETER Experiment Name: At_Far-red-induction_P Parameter: Age (day) Value: 7
  misc_feature: MA Experiment 20001247 PARAMETER Experiment Name: At_Far-red-induction_P Parameter: Light Value: Far-red vs. White
  misc_feature: MA Experiment 20001247 PARAMETER Experiment Name: At_Far-red-induction_P Parameter: Organism Value: A. thaliana
  misc_feature: MA Experiment 20001247 PARAMETER Experiment Name: At_Far-red-induction_P Parameter: Plant Line Value: Columbia
  misc_feature: MA Experiment 20001247 PARAMETER Experiment Name: At_Far-red-induction_P Parameter: Timepoint (hr) Value: 1
  misc_feature: MA Experiment 20001247 PARAMETER Experiment Name: At_Far-red-induction_P Parameter: Tissue Value: Whole Plant
  misc_feature: MA Experiment ID: 20001459 Result: Up-regulated in Transcription
  misc_feature: MA Experiment 20001459 PARAMETER Experiment Name: At_50mM_NH4NO3_L-to-H_P Parameter: Age (day) Value: Undefined
  misc_feature: MA Experiment 20001459 PARAMETER Experiment Name: At_50mM_NH4NO3_L-to-H_P Parameter: Organism Value: Undefined
  misc_feature: MA Experiment 20001459 PARAMETER Experiment Name: At_50mM_NH4NO3_L-to-H_P Parameter: Plant Line Value: Undefined
  misc_feature: MA Experiment 20001459 PARAMETER Experiment Name: At_50mM_NH4NO3_L-to-H_P Parameter: Timepoint (hr) Value: 4
  misc_feature: MA Experiment 20001459 PARAMETER Experiment Name: At_50mM_NH4NO3_L-to-H_P Parameter: Tissue Value: Siliques
  misc_feature: MA Experiment 20001459 PARAMETER Experiment Name: At_50mM_NH4NO3_L-to-H_P Parameter: Treatment Value: 50mM NH4NO3 vs. 100mM Manitol
  misc_feature: MA Experiment ID: 20001911 Result: Up-regulated in Transcription
  misc_feature: MA Experiment 20001911 PARAMETER Experiment Name: At_Drought_Reproduction_P Parameter: Age (day) Value: 40
  misc_feature: MA Experiment 20001911 PARAMETER Experiment Name: At_Drought_Reproduction_P Parameter: Organism Value: A. thaliana
  misc_feature: MA Experiment 20001911 PARAMETER Experiment Name: At_Drought_Reproduction_P Parameter: Plant Line Value: WS
  misc_feature: MA Experiment 20001911 PARAMETER Experiment Name: At_Drought_Reproduction_P Parameter: Timepoint (day) Value: 10
  misc_feature: MA Experiment 20001911 PARAMETER Experiment Name: At_Drought_Reproduction_P Parameter: Tissue Value: Flowers
  misc_feature: MA Experiment 20001911 PARAMETER Experiment Name: At_Drought_Reproduction_P Parameter: Treatment Value: Drought vs. No Drought
acacaatcaaccactttccttttttcattcgtctcaatttctctcatgacgagtagtagtggaagcctcaaactagagatccacactgatgacaagacgccgggaaagtggagcgtaccgctcggcgatgatgttttccgaagttcttgagcgggggaggaggctcggagaaggctgtgttcggtgaggggtctctttttagcccgtttttgttcgggaagtactttgatccgtcagacgcctttccgttgtgggaatttgaagctgaggttttgctggcgagccttaggagcttaggacagtgtagagtcgattggtctcagacggatcaagcttatgtccttaaatccgatatccccgtggtggggaaaaataacgtgcaggtgtacgtggacattaacggaagagtgatggagattagtggccaatggaacagcaacaagaaagcggcgaccaacagtgactggagaagcggccggtggtgggaacatggctatgtccgccgtctcgagctccctagcgatgccgacgccaaatactctgaagctttcctctctaacaacgacgattactctttcttagagatccgaatccctaagataaattctaagaacaagttttaatctgatcatgtcgccttgacgagttttaactttagattcttttcgtaattttgttttctttagttaactattattatagatatgaaattctgtggtagagacacaatggatgaatgatatgttatatatacatactataaaatatatcaaatataacatatcgatt

SEQ ID NO: 31019 - protein, 70 aa, Arabidopsis thaliana
  peptide (1)..(70): Ceres Seq. ID no. 12397074
  misc_feature (1)..(63): Homolog of NCBI NO: 462322 NR Description: 18.3 KD CLASS I HEAT SHOCK PROTEIN (HSP 18.3)
  misc_feature (1)..(67): Homolog of NCBI NO: 123548 NR Description: 17.8 KD CLASS I HEAT SHOCK PROTEIN (CLONE
  misc_feature (1)..(64): Homolog of NCBI NO: 4185754 NR Description: cytosolic I small heat shock protein HSP17.2IB
  misc_feature (1)..(67): Homolog of NCBI NO: 18073561 NR Description: 20.5 kDa heat-shock protein [Helianthus annuus]
  misc_feature (1)..(67): Homolog of NCBI NO: 11276924 NR Description: heat-shock protein, low molecular weight
  misc_feature (1)..(67): Homolog of NCBI NO: 71495 NR Description: heat shock protein (clone DChsp17.7) - carrot
  misc_feature (1)..(67): Homolog of NCBI NO: 15220832 NR Description: 17.6 kDa heat shock protein (AA 1-156); protein
  misc_feature (1)..(67): Homolog of NCBI NO: 7441323 NR Description: heat shock protein 18p - common tobacco
  misc_feature (1)..(63): Homolog of NCBI NO: 16930753 NR Description: small heat shock protein [Retama raetam]
  misc_feature (1)..(70): Homolog of NCBI NO: 18423654 NR Description: expressed protein
MEISGQWNSNKKAATNSDWRSGRWWEHGYVRRLELPSDADAKYSEAFLSNNDDYSFLEIRIPKINSKNKF

SEQ ID NO: 31020 - protein, 49 aa, Arabidopsis thaliana
  peptide (1)..(49): Ceres Seq. ID no. 12397075
  misc_feature (16)..(49): Homolog of NCBI NO: 18423654 NR Description: expressed protein
TQSTTFLFSFVSISLMTSSSGSLKLEIHTDDKTPGKWSVPLGDDVFRSS

SEQ ID NO: 31021 - DNA, 670 bp, Arabidopsis thaliana
  misc_feature (1)..(670): Ceres Seq. ID no. 12601447
  misc_feature: MA Experiment ID: 108434 Result: Up-regulated in Transcription
  misc_feature: MA Experiment 108434 PARAMETER Experiment Name: At_Root_Tips_cDNA_P Parameter: Tissue Value: Root Tips
  misc_feature: MA Experiment ID: 108461 Result: Up-regulated in Transcription
  misc_feature: MA Experiment 108461 PARAMETER Experiment Name: At_Germinating_Seeds_cDNA_P Parameter: Age (day) Value: 1 vs. 0
  misc_feature: MA Experiment 108461 PARAMETER Experiment Name: At_Germinating_Seeds_cDNA_P Parameter: Tissue Value: Germinating Seeds
  misc_feature: MA Experiment ID: 108595 Result: Up-regulated in Transcription
  misc_feature: MA Experiment 108595 PARAMETER Experiment Name: At_Ler-pi_Ovule_cDNA_P Parameter: Plant Line Value: null
  misc_feature: MA Experiment ID: 108607 Result: Down-regulated in Transcription
  misc_feature: MA Experiment 108607 PARAMETER Experiment Name: At_100uM_ABA_cDNA_P Parameter: Timepoint (hr) Value: 4
  misc_feature: MA Experiment 108607 PARAMETER Experiment Name: At_100uM_ABA_cDNA_P Parameter: Tissue Value: Aerial
  misc_feature: MA Experiment 108607 PARAMETER Experiment Name: At_100uM_ABA_cDNA_P Parameter: Treatment Value: 100uM ABA vs. No Treatment
  misc_feature: MA Experiment ID: 108668 Result: Down-regulated in Transcription
  misc_feature: MA Experiment 108668 PARAMETER Experiment Name: At_2mM_SA_cDNA_P Parameter: Plant Line Value: WS
  misc_feature: MA Experiment 108668 PARAMETER Experiment Name: At_2mM_SA_cDNA_P Parameter: Timepoint (hr) Value: 6
  misc_feature: MA Experiment 108668 PARAMETER Experiment Name: At_2mM_SA_cDNA_P Parameter: Treatment Value: 2mM SA vs. No Treatment
aaatatcactaacccaaaaacaaaacaaaaaatgggtttcattggtaagagtgtattagtgagtctcgtagcactttggtgcttcacttcctctgtcttcactgaagaagtgaaccataagactcaaaccccttctctagctcctgctcctgctccttaccaccacggccaccaccacccacaccctcctcatcaccaccaccctcaccctcaccctcacccccacccaccggccaaatctcctgttaaacccccggttaaggcaccagtgtctccaccagccaaacctccggttaagcccccggtttacccacccaccaaagccccggtgaaacccccatctaaacccccggtcaagccacctgtttccccaccagccaaacctccggttaagccaccagtttaccctccaaccaaagctccagttaagcccccaactaaacccccagtcaagccaccagtttaccctccaaccaaagccccggttaagcccccaactaaacccccggtcaagccaccagtttccccaccagccaaacctccagttaagcccccggtttaccctcctaccaaagctccggttaagcctccggtttctcctccgacgaagccacctgttacaccgccggtttacccgcctaagttcaaccgtagtctagtcgccgttcgg

SEQ ID NO: 31022 - protein, 223 aa, Arabidopsis thaliana
  peptide (1)..(223): Ceres Seq. ID no. 12601448
  misc_feature (42)..(217): Pfam Name: Formin Homology 2 Domain Pfam Description: Formin Homology 2 Domain
  misc_feature (42)..(217): Pfam Name: Formin Homology 2 Domain Pfam Description: Formin Homology 2 Domain
  misc_feature (41)..(213): Homolog of NCBI NO: 480109 NR Description: EPPT protein - hydromedusa (Podocoryne carnea)
  misc_feature (41)..(213): Homolog of NCBI NO: 480109 NR Description: EPPT protein - hydromedusa (Podocoryne carnea)
  misc_feature (41)..(213): Homolog of NCBI NO: 480109 NR Description: EPPT protein - hydromedusa (Podocoryne carnea)
  misc_feature (41)..(213): Homolog of NCBI NO: 480109 NR Description: EPPT protein - hydromedusa (Podocoryne carnea)
  misc_feature (41)..(213): Homolog of NCBI NO: 480109 NR Description: EPPT protein - hydromedusa (Podocoryne carnea)
  misc_feature (41)..(213): Homolog of NCBI NO: 480109 NR Description: EPPT protein - hydromedusa (Podocoryne carnea)
  misc_feature (41)..(213): Homolog of NCBI NO: 480109 NR Description: EPPT protein - hydromedusa (Podocoryne carnea)
  misc_feature (41)..(213): Homolog of NCBI NO: 480109 NR Description: EPPT protein - hydromedusa (Podocoryne carnea)
  misc_feature (11)..(213): Homolog of NCBI NO: 15217879 NR Description: prolin-rich protein, putative; protein id:
  misc_feature (28)..(222): Homolog of NCBI NO: 15217879 NR Description: prolin-rich protein, putative; protein id:
  misc_feature (41)..(213): Homolog of NCBI NO: 480109 NR Description: EPPT protein - hydromedusa (Podocoryne carnea)
  misc_feature (41)..(213): Homolog of NCBI NO: 480109 NR Description: EPPT protein - hydromedusa (Podocoryne carnea)
  misc_feature (41)..(213): Homolog of NCBI NO: 480109 NR Description: EPPT protein - hydromedusa (Podocoryne carnea)
  misc_feature (41)..(213): Homolog of NCBI NO: 480109 NR Description: EPPT protein - hydromedusa (Podocoryne carnea)
  misc_feature (41)..(213): Homolog of NCBI NO: 480109 NR Description: EPPT protein - hydromedusa (Podocoryne carnea)
  misc_feature (41)..(213): Homolog of NCBI NO: 480109 NR Description: EPPT protein - hydromedusa (Podocoryne carnea)
  misc_feature (41)..(213): Homolog of NCBI NO: 480109 NR Description: EPPT protein - hydromedusa (Podocoryne carnea)
  misc_feature (41)..(213): Homolog of NCBI NO: 480109 NR Description: EPPT protein - hydromedusa (Podocoryne carnea)
  misc_feature (28)..(222): Homolog of NCBI NO: 15217879 NR Description: prolin-rich protein, putative; protein id:
  misc_feature (11)..(213): Homolog of NCBI NO: 15217879 NR Description: prolin-rich protein, putative; protein id:
NITNPKTKQKMGFIGKSVLVSLVALWCFTSSVFTEEVNHKTQTPSLAPAPAPYHHGHHHPHPPHHHHPHPHPHPHPPAKSPVKPPVKAPVSPPAKPPVKPPVYPPTKAPVKPPSKPPVKPPVSPPAKPPVKPPVYPPTKAPVKPPTKPPVKPPVYPPTKAPVKPPTKPPVKPPVSPPAKPPVKPPVYPPTKAPVKPPVSPPTKPPVTPPVYPPKFNRSLVAVR

SEQ ID NO: 31023 - protein, 213 aa, Arabidopsis thaliana
  peptide (1)..(213): Ceres Seq. ID no. 12601449
  misc_feature (32)..(207): Pfam Name: Formin Homology 2 Domain Pfam Description: Formin Homology 2 Domain
  misc_feature (32)..(207): Pfam Name: Formin Homology 2 Domain Pfam Description: Formin Homology 2 Domain
  misc_feature (31)..(203): Homolog of NCBI NO: 480109 NR Description: EPPT protein - hydromedusa (Podocoryne carnea)
  misc_feature (31)..(203): Homolog of NCBI NO: 480109 NR Description: EPPT protein - hydromedusa (Podocoryne carnea)
  misc_feature (31)..(203): Homolog of NCBI NO: 480109 NR Description: EPPT protein - hydromedusa (Podocoryne carnea)
  misc_feature (31)..(203): Homolog of NCBI NO: 480109 NR Description: EPPT protein - hydromedusa (Podocoryne carnea)
  misc_feature (31)..(203): Homolog of NCBI NO: 480109 NR Description: EPPT protein - hydromedusa (Podocoryne carnea)
  misc_feature (31)..(203): Homolog of NCBI NO: 480109 NR Description: EPPT protein - hydromedusa (Podocoryne carnea)
  misc_feature (31)..(203): Homolog of NCBI NO: 480109 NR Description: EPPT protein - hydromedusa (Podocoryne carnea)
  misc_feature (31)..(203): Homolog of NCBI NO: 480109 NR Description: EPPT protein - hydromedusa (Podocoryne carnea)
  misc_feature (1)..(203): Homolog of NCBI NO: 15217879 NR Description: prolin-rich protein, putative; protein id:
  misc_feature (18)..(212): Homolog of NCBI NO: 15217879 NR Description: prolin-rich protein, putative; protein id:
  misc_feature (31)..(203): Homolog of NCBI NO: 480109 NR Description: EPPT protein - hydromedusa (Podocoryne carnea)
  misc_feature (31)..(203): Homolog of NCBI NO: 480109 NR Description: EPPT protein - hydromedusa (Podocoryne carnea)
  misc_feature (31)..(203): Homolog of NCBI NO: 480109 NR Description: EPPT protein - hydromedusa (Podocoryne carnea)
  misc_feature (31)..(203): Homolog of NCBI NO: 480109 NR Description: EPPT protein - hydromedusa (Podocoryne carnea)
  misc_feature (31)..(203): Homolog of NCBI NO: 480109 NR Description: EPPT protein - hydromedusa (Podocoryne carnea)
  misc_feature (31)..(203): Homolog of NCBI NO: 480109 NR Description: EPPT protein - hydromedusa (Podocoryne carnea)
  misc_feature (31)..(203): Homolog of NCBI NO: 480109 NR Description: EPPT protein - hydromedusa (Podocoryne carnea)
  misc_feature (31)..(203): Homolog of NCBI NO: 480109 NR Description: EPPT protein - hydromedusa (Podocoryne carnea)
  misc_feature (18)..(212): Homolog of NCBI NO: 15217879 NR Description: prolin-rich protein, putative; protein id:
  misc_feature (1)..(203): Homolog of NCBI NO: 15217879 NR Description: prolin-rich protein, putative; protein id:
MGFIGKSVLVSLVALWCFTSSVFTEEVNHKTQTPSLAPAPAPYHHGHHHPHPPHHHHPHPHPHPHPPAKSPVKPPVKAPVSPPAKPPVKPPVYPPTKAPVKPPSKPPVKPPVSPPAKPPVKPPVYPPTKAPVKPPTKPPVKPPVYPPTKAPVKPPTKPPVKPPVSPPAKPPVKPPVYPPTKAPVKPPVSPPTKPPVTPPVYPPKFNRSLVAVR

SEQ ID NO: 31024 - DNA, 2380 bp, Arabidopsis thaliana
  misc_feature (1)..(2380): Ceres Seq. ID no. 12330997
  misc_feature: MA Experiment ID: 108434 Result: Down-regulated in Transcription
  misc_feature: MA Experiment 108434 PARAMETER Experiment Name: At_Root_Tips_cDNA_P Parameter: Tissue Value: Root Tips
  misc_feature: MA Experiment ID: 108488 Result: Down-regulated in Transcription
  misc_feature: MA Experiment ID: 108561 Result: Up-regulated in Transcription
  misc_feature: MA Experiment 108561 PARAMETER Experiment Name: At_100uM_ABA_cDNA_P Parameter: Timepoint (hr) Value: 6
  misc_feature: MA Experiment 108561 PARAMETER Experiment Name: At_100uM_ABA_cDNA_P Parameter: Tissue Value: Aerial
  misc_feature: MA Experiment 108561 PARAMETER Experiment Name: At_100uM_ABA_cDNA_P Parameter: Treatment Value: 100uM ABA vs. No Treatment
  misc_feature: MA Experiment ID: 108572 Result: Up-regulated in Transcription
  misc_feature: MA Experiment 108572 PARAMETER Experiment Name: At_Drought_cDNA_P Parameter: Timepoint (hr) Value: 1
  misc_feature: MA Experiment 108572 PARAMETER Experiment Name: At_Drought_cDNA_P Parameter: Tissue Value: Aerial
  misc_feature: MA Experiment 108572 PARAMETER Experiment Name: At_Drought_cDNA_P Parameter: Treatment Value: Drought vs. No Drought
  misc_feature: MA Experiment ID: 108573 Result: Up-regulated in Transcription
  misc_feature: MA Experiment 108573 PARAMETER Experiment Name: At_Drought_cDNA_P Parameter: Timepoint (hr) Value: 6
  misc_feature: MA Experiment 108573 PARAMETER Experiment Name: At_Drought_cDNA_P Parameter: Tissue Value: Aerial
  misc_feature: MA Experiment 108573 PARAMETER Experiment Name: At_Drought_cDNA_P Parameter: Treatment Value: Drought vs. No Drought
  misc_feature: MA Experiment ID: 108585 Result: Up-regulated in Transcription
  misc_feature: MA Experiment 108585 PARAMETER Experiment Name: At_5mM_NaNP_cDNA_P Parameter: Timepoint (hr) Value: 6
  misc_feature: MA Experiment 108585 PARAMETER Experiment Name: At_5mM_NaNP_cDNA_P Parameter: Tissue Value: Aerial
  misc_feature: MA Experiment 108585 PARAMETER Experiment Name: At_5mM_NaNP_cDNA_P Parameter: Treatment Value: null
  misc_feature: MA Experiment ID: 20000070 Result: Up-regulated in Transcription
  misc_feature: MA Experiment 20000070 PARAMETER Experiment Name: At_100uM_ABA_Mutants_cDNA_P Parameter: Plant Line Value: CS24
  misc_feature: MA Experiment 20000070 PARAMETER Experiment Name: At_100uM_ABA_Mutants_cDNA_P Parameter: Timepoint (hr) Value: 6
  misc_feature: MA Experiment 20000070 PARAMETER Experiment Name: At_100uM_ABA_Mutants_cDNA_P Parameter: Tissue Value: Aerial
  misc_feature: MA Experiment 20000070 PARAMETER Experiment Name: At_100uM_ABA_Mutants_cDNA_P Parameter: Treatment Value: 100uM ABA vs. No Treatment
  misc_feature: MA Experiment ID: 20000184 Result: Down-regulated in Transcription
  misc_feature: MA Experiment 20000184 PARAMETER Experiment Name: At_Shoots__P Parameter: Age (day) Value: 7
  misc_feature: MA Experiment 20000184 PARAMETER Experiment Name: At_Shoots__P Parameter: Tissue Value: Shoots vs. Whole Plant
  misc_feature: MA Experiment ID: 20000234 Result: Down-regulated in Transcription
  misc_feature: MA Experiment 20000234 PARAMETER Experiment Name: At_Siliques_P Parameter: Age (day) Value: 21
  misc_feature: MA Experiment 20000234 PARAMETER Experiment Name: At_Siliques_P Parameter: Organism Value: A. thaliana
  misc_feature: MA Experiment 20000234 PARAMETER Experiment Name: At_Siliques_P Parameter: Plant Line Value: WS
  misc_feature: MA Experiment 20000234 PARAMETER Experiment Name: At_Siliques_P Parameter: Tissue Value: Less Than 5mm Siliques vs. Whole Plant
  misc_feature: MA Experiment ID: 20000235 Result: Down-regulated in Transcription
  misc_feature: MA Experiment 20000235 PARAMETER Experiment Name: At_Siliques_P Parameter: Age (day) Value: 21
  misc_feature: MA Experiment 20000235 PARAMETER Experiment Name: At_Siliques_P Parameter: Organism Value: A. thaliana
  misc_feature: MA Experiment 20000235 PARAMETER Experiment Name: At_Siliques_P Parameter: Plant Line Value: WS
  misc_feature: MA Experiment 20000235 PARAMETER Experiment Name: At_Siliques_P Parameter: Tissue Value: 5-10mm Siliques vs. Whole Plant
  misc_feature: MA Experiment ID: 20000265 Result: Down-regulated in Transcription
  misc_feature: MA Experiment 20000265 PARAMETER Experiment Name: At_Open_Flower_P Parameter: Age (day) Value: 21
  misc_feature: MA Experiment 20000265 PARAMETER Experiment Name: At_Open_Flower_P Parameter: Plant Line Value: WS
  misc_feature: MA Experiment 20000265 PARAMETER Experiment Name: At_Open_Flower_P Parameter: Tissue Value: Closed Flower vs. Whole Plant
  misc_feature: MA Experiment ID: 20000438 Result: Down-regulated in Transcription
  misc_feature: MA Experiment 20000438 PARAMETER Experiment Name: At_Shoots__P Parameter: Age (day) Value: 14
  misc_feature: MA Experiment 20000438 PARAMETER Experiment Name: At_Shoots__P Parameter: Tissue Value: Shoots vs. Whole Plant
  misc_feature: MA Experiment ID: 20000794 Result: Up-regulated in Transcription
  misc_feature: MA Experiment 20000794 PARAMETER Experiment Name: At_Petals_P Parameter: Age (day) Value: 23-25 days
  misc_feature: MA Experiment 20000794 PARAMETER Experiment Name: At_Petals_P Parameter: Plant Line Value: WS
  misc_feature: MA Experiment 20000794 PARAMETER Experiment Name: At_Petals_P Parameter: Tissue Value: Petals vs. Whole plant
  misc_feature: MA Experiment ID: 20001905 Result: Up-regulated in Transcription
  misc_feature: MA Experiment 20001905 PARAMETER Experiment Name: At_Drought_Reproduction_P Parameter: Age (day) Value: 40
  misc_feature: MA Experiment 20001905 PARAMETER Experiment Name: At_Drought_Reproduction_P Parameter: Organism Value: A. thaliana
  misc_feature: MA Experiment 20001905 PARAMETER Experiment Name: At_Drought_Reproduction_P Parameter: Plant Line Value: WS
  misc_feature: MA Experiment 20001905 PARAMETER Experiment Name: At_Drought_Reproduction_P Parameter: Timepoint (day) Value: 10
  misc_feature: MA Experiment 20001905 PARAMETER Experiment Name: At_Drought_Reproduction_P Parameter: Tissue Value: Rosettes
  misc_feature: MA Experiment 20001905 PARAMETER Experiment Name: At_Drought_Reproduction_P Parameter: Treatment Value: Drought vs. No Drought
  misc_feature: MA Experiment ID: 20001906 Result: Up-regulated in Transcription
  misc_feature: MA Experiment 20001906 PARAMETER Experiment Name: At_Drought_Reproduction_P Parameter: Age (day) Value: 35
  misc_feature: MA Experiment 20001906 PARAMETER Experiment Name: At_Drought_Reproduction_P Parameter: Organism Value: A. thaliana
  misc_feature: MA Experiment 20001906 PARAMETER Experiment Name: At_Drought_Reproduction_P Parameter: Plant Line Value: WS
  misc_feature: MA Experiment 20001906 PARAMETER Experiment Name: At_Drought_Reproduction_P Parameter: Timepoint (day) Value: 5
  misc_feature: MA Experiment 20001906 PARAMETER Experiment Name: At_Drought_Reproduction_P Parameter: Tissue Value: Siliques
  misc_feature: MA Experiment 20001906 PARAMETER Experiment Name: At_Drought_Reproduction_P Parameter: Treatment Value: Drought vs. No Drought
  misc_feature: MA Experiment ID: 20001908 Result: Up-regulated in Transcription
  misc_feature: MA Experiment 20001908 PARAMETER Experiment Name: At_Drought_Reproduction_P Parameter: Age (day) Value: 40
  misc_feature: MA Experiment 20001908 PARAMETER Experiment Name: At_Drought_Reproduction_P Parameter: Organism Value: A. thaliana
  misc_feature: MA Experiment 20001908 PARAMETER Experiment Name: At_Drought_Reproduction_P Parameter: Plant Line Value: WS
  misc_feature: MA Experiment 20001908 PARAMETER Experiment Name: At_Drought_Reproduction_P Parameter: Timepoint (day) Value: 10
  misc_feature: MA Experiment 20001908 PARAMETER Experiment Name: At_Drought_Reproduction_P Parameter: Tissue Value: Siliques
  misc_feature: MA Experiment 20001908 PARAMETER Experiment Name: At_Drought_Reproduction_P Parameter: Treatment Value: Drought vs. No Drought
ctcgaggtcttagggttttagctgttgacttgtcgcagcttcactggagaattgaatgaattttcttatggtttcaggaaggtgatgaatgttgagatcgatttgatttcaatcaacgttcaatgaagattgtgatgatttctcataagatggatttgattttggttttcataatcgtaatcggaggatctattttccgacgagtttctgctaatttcaccgaaccttgtaacggaagatgcggtggattgactctgccttatcctttcgggttttcaaacggttgttcgatccgattcgattgctctgcggcggagaaaccgatgatcggagacttttccgttcaaaacgtgacggaaaacagtatatttgtcggtctctctcacaattgtactcggaagattgaagatatgaatccgcttttcggcgagaatttcgcaccgacgtcggagaacagtttcttgatggagaattgcaaccgtaccaccgatggatgttcgatcaaacagaagtttttggagaatgtgctgaaacttaaaagttgtgatgctactggaaacataagttgtttttctttagatagtaattcgagttcgaagaactcagctaagtttttcagtatgaagacattaaggaacagctcgtgtagtttgttgttctcgtcgatagctttcgagtctgtaggtgtcaatgcgggtatagcgttagagtttgagagagttcggttaggttggtggcttaagggaggttgccagagcggaacttgcgcggctaacaccgattgtacagacgttgaaactcctcatggatatgcaggacaccggtgctcatgtcttgacggtttccacggtgacggatacaccaacccttgccagagagcactaccggagtgccgtggttccaagctcgtgtggagacattgtagatctaatcttattactattgtaggaggaactgttggtggagcgtttttactagctggcttggctcttttgttcttttgtaagcgggtctactcctttgagaagtcatttaagcgcaaagcgtcttttgtctgaagctgcagggaactcgagtgtcgcctttttcccttacaaggaaatcgagaaagcgacagatggtttctctgaaaagcagaagctaggaataggtgcatatggtacggtctatagaggaaagctccaaaatgatgaatgggttgctatcaaaagactcagacatagagattcagaaagtcttgaccaagtcatgaatgagatcaagcttctttcctctgtgagtcacccgaatcttgtccgtctcttagggtgttgtatagaacaaggcgatccagttcttgtttatgagtacatgccgaatggaactctatcagaacatctacaaagagatagagggagtggccttccatggaccttgcgtctcactgttgctactcaaacagctaaagcaatcgcgtatctccactcttcaatgaacccgccaatctatcaccgtgacatcaaatctaccaatatccttcttgattatgatttcaactccaaagttgcggatttcgggctctctagactgggaatgacggaatcttcccacatatcaacggctcctcaagggactcctggttatcttgacccgcagtaccatcaatgctttcatctttctgataagagcgacgtctacagctttggagtcgtccttgccgagattataacgggattgaaagtcgttgatttcacacgtccccataccgaaatcaacttagcagctcttgctgttgacaaaatcgggtcaggttgtatcgatgagataatagacccgattcttgacttggatctcgacgcatggactctctcatccatacacaccgtggctgagcttgcatttcgatgcttagccttccacagtgacatgagaccgacaatgaccgaagtagcggacgagcttgaacagataagactcagtggttggattccaagcatgagcttggattcaccagccggttctctccgttcatctgatcgaggaagcgaaagatcagttaaacaatcatcaataggaagcagaagagtcgttatccctcagaaacaacctgattgcctcgcatccgtcgaagagattagcgatagctcacccatctcagttcaagatccttggttaagtgcacaaagctcaccgtctacaaatacattgctcggtaacattccaagatgatagtatgatctcaaaacacgattaccactttcttgtttatataagtccctcttttgtgtagctttcacaatcattcagtgtttataatgctaagtagagagattaacaatggtgaaaacaggtttatacatgagttataatgtaaacgatcttgaaacaagatctttcaatc

SEQ ID NO: 31025 - protein, 319 aa, Arabidopsis thaliana
  peptide (1)..(319): Ceres Seq. ID no. 12330998
  misc_feature (1)..(235): Homolog of NCBI NO: 15222572 NR Description: wall-associated kinase, putative
  misc_feature (1)..(255): Homolog of NCBI NO: 15408726 NR Description: P0443D08.8 [Oryza sativa (japonica
  misc_feature (1)..(235): Homolog of NCBI NO: 34911340 NR Description: P0034C09.1 [Oryza sativa (japonica
  misc_feature (1)..(245): Homolog of NCBI NO: 25402857 NR Description: protein F15H18.11 [imported] - Arabidopsis
  misc_feature (1)..(245): Homolog of NCBI NO: 15221764 NR Description: wall-associated kinase, putative; protein id:
  misc_feature (1)..(259): Homolog of NCBI NO: 15408730 NR Description: P0443D08.12 [Oryza sativa (japonica
  misc_feature (1)..(236): Homolog of NCBI NO: 30698255 NR Description: protein kinase family [Arabidopsis thaliana]
  misc_feature (1)..(236): Homolog of NCBI NO: 26450415 NR Description: unknown protein [Arabidopsis thaliana]
  misc_feature (1)..(236): Homolog of NCBI NO: 9758129 NR Description: contains similarity to protein
  misc_feature (1)..(316): Homolog of NCBI NO: 34902300 NR Description: Putative protein kinase [Oryza sativa (japonica
MNEIKLLSSVSHPNLVRLLGCCIEQGDPVLVYEYMPNGTLSEHLQRDRGSGLPWTLRLTVATQTAKAIAYLHSSMNPPIYHRDIKSTNILLDYDFNSKVADFGLSRLGMTESSHISTAPQGTPGYLDPQYHQCFHLSDKSDVYSFGVVLAEIITGLKVVDFTRPHTEINLAALAVDKIGSGCIDEIIDPILDLDLDAWTLSSIHTVAELAFRCLAFHSDMRPTMTEVADELEQIRLSGWIPSMSLDSPAGSLRSSDRGSERSVKQSSIGSRRVVIPQKQPDCLASVEEISDSSPISVQDPWLSAQSSPSTNTLLGNIPR

SEQ ID NO: 31026 - protein, 311 aa, Arabidopsis thaliana
  peptide (1)..(311): Ceres Seq. ID no. 12330999
  misc_feature (34)..(57): Homolog of NCBI NO: 7486495 NR Description: hypothetical protein F6E21.30 - Arabidopsis
  misc_feature (34)..(57): Homolog of NCBI NO: 30688910 NR Description: WAK-like kinase (WLK) [Arabidopsis thaliana]
  misc_feature (7)..(182): Homolog of NCBI NO: 22329045 NR Description: WAK-like kinase (WLK); protein id: At4g31100.1
  misc_feature (23)..(55): Homolog of NCBI NO: 15219447 NR Description: WAK-like kinase (WLK)
  misc_feature (36)..(55): Homolog of NCBI NO: 15222427 NR Description: WAK-like kinase (WLK); protein id: At1g69730.1
  misc_feature (3)..(250): Homolog of NCBI NO: 18411489 NR Description: Expressed protein
  misc_feature (170)..(263): Homolog of NCBI NO: 30698255 NR Description: protein kinase family [Arabidopsis thaliana]
  misc_feature (39)..(263): Homolog of NCBI NO: 26450415 NR Description: unknown protein [Arabidopsis thaliana]
  misc_feature (39)..(263): Homolog of NCBI NO: 9758129 NR Description: contains similarity to protein
  misc_feature (36)..(311): Homolog of NCBI NO: 34902300 NR Description: Putative protein kinase [Oryza sativa (japonica
MKIVMISHKMDLILVFIIVIGGSIFRRVSANFTEPCNGRCGGLTLPYPFGFSNGCSIRFDCSAAEKPMIGDFSVQNVTENSIFVGLSHNCTRKIEDMNPLFGENFAPTSENSFLMENCNRTTDGCSIKQKFLENVLKLKSCDATGNISCFSLDSNSSSKNSAKFFSMKTLRNSSCSLLFSSIAFESVGVNAGIALEFERVRLGWWLKGGCQSGTCAANTDCTDVETPHGYAGHRCSCLDGFHGDGYTNPCQRALPECRGSKLVWRHCRSNLITIVGGTVGGAFLLAGLALLFFCKRVYSFEKSFKRKASFV

SEQ ID NO: 31027 - protein, 307 aa, Arabidopsis thaliana
  peptide (1)..(307): Ceres Seq. ID no. 12331000
  misc_feature (30)..(53): Homolog of NCBI NO: 7486495 NR Description: hypothetical protein F6E21.30 - Arabidopsis
  misc_feature (30)..(53): Homolog of NCBI NO: 30688910 NR Description: WAK-like kinase (WLK) [Arabidopsis thaliana]
  misc_feature (3)..(178): Homolog of NCBI NO: 22329045 NR Description: WAK-like kinase (WLK); protein id: At4g31100.1
  misc_feature (19)..(51): Homolog of NCBI NO: 15219447 NR Description: WAK-like kinase (WLK)
  misc_feature (32)..(51): Homolog of NCBI NO: 15222427 NR Description: WAK-like kinase (WLK); protein id: At1g69730.1
  misc_feature (1)..(246): Homolog of NCBI NO: 18411489 NR Description: Expressed protein
  misc_feature (166)..(259): Homolog of NCBI NO: 30698255 NR Description: protein kinase family [Arabidopsis thaliana]
  misc_feature (35)..(259): Homolog of NCBI NO: 26450415 NR Description: unknown protein [Arabidopsis thaliana]
  misc_feature (35)..(259): Homolog of NCBI NO: 9758129 NR Description: contains similarity to protein
  misc_feature (32)..(307): Homolog of NCBI NO: 34902300 NR Description: Putative protein kinase [Oryza sativa (japonica
MISHKMDLILVFIIVIGGSIFRRVSANFTEPCNGRCGGLTLPYPFGFSNGCSIRFDCSAAEKPMIGDFSVQNVTENSIFVGLSHNCTRKIEDMNPLFGENFAPTSENSFLMENCNRTTDGCSIKQKFLENVLKLKSCDATGNISCFSLDSNSSSKNSAKFFSMKTLRNSSCSLLFSSIAFESVGVNAGIALEFERVRLGWWLKGGCQSGTCAANTDCTDVETPHGYAGHRCSCLDGFHGDGYTNPCQRALPECRGSKLVWRHCRSNLITIVGGTVGGAFLLAGLALLFFCKRVYSFEKSFKRKASFV

SEQ ID NO: 31028 - DNA, 977 bp, Arabidopsis thaliana
  misc_feature (1)..(977): Ceres Seq. ID no. 12322651
  misc_feature: MA Experiment ID: 108435 Result: Down-regulated in Transcription
  misc_feature: MA Experiment 108435 PARAMETER Experiment Name: At_stm_Mutants_cDNA_P Parameter: Plant Line Value: wt Landsburg vs stm
  misc_feature: MA Experiment 108435 PARAMETER Experiment Name: At_stm_Mutants_cDNA_P Parameter: Tissue Value: Shoot Apical Meristem Region
  misc_feature: MA Experiment ID: 108462 Result: Up-regulated in Transcription
  misc_feature: MA Experiment 108462 PARAMETER Experiment Name: At_Germinating_Seeds_cDNA_P Parameter: Age (day) Value: 2 vs. 0
  misc_feature: MA Experiment 108462 PARAMETER Experiment Name: At_Germinating_Seeds_cDNA_P Parameter: Tissue Value: Germinating Seeds
  misc_feature: MA Experiment ID: 108464 Result: Up-regulated in Transcription
  misc_feature: MA Experiment 108464 PARAMETER Experiment Name: At_Germinating_Seeds_cDNA_P Parameter: Age (day) Value: 4 vs. 0
  misc_feature: MA Experiment 108464 PARAMETER Experiment Name: At_Germinating_Seeds_cDNA_P Parameter: Tissue Value: Germinating Seeds
  misc_feature: MA Experiment ID: 108595 Result: Down-regulated in Transcription
  misc_feature: MA Experiment 108595 PARAMETER Experiment Name: At_Ler-pi_Ovule_cDNA_P Parameter: Plant Line Value: null
  misc_feature: MA Experiment ID: 20000070 Result: Down-regulated in Transcription
  misc_feature: MA Experiment 20000070 PARAMETER Experiment Name: At_100uM_ABA_Mutants_cDNA_P Parameter: Plant Line Value: CS24
  misc_feature: MA Experiment 20000070 PARAMETER Experiment Name: At_100uM_ABA_Mutants_cDNA_P Parameter: Timepoint (hr) Value: 6
  misc_feature: MA Experiment 20000070 PARAMETER Experiment Name: At_100uM_ABA_Mutants_cDNA_P Parameter: Tissue Value: Aerial
  misc_feature: MA Experiment 20000070 PARAMETER Experiment Name: At_100uM_ABA_Mutants_cDNA_P Parameter: Treatment Value: 100uM ABA vs. No Treatment
  misc_feature: MA Experiment ID: 20000185 Result: Down-regulated in Transcription
  misc_feature: MA Experiment 20000185 PARAMETER Experiment Name: At_Roots__P Parameter: Age (day) Value: 7 vs. 21
  misc_feature: MA Experiment 20000185 PARAMETER Experiment Name: At_Roots__P Parameter: Organism Value: A. thaliana
  misc_feature: MA Experiment 20000185 PARAMETER Experiment Name: At_Roots__P Parameter: Tissue Value: Roots vs. Whole Plant
  misc_feature: MA Experiment ID: 20000264 Result: Down-regulated in Transcription
  misc_feature: MA Experiment 20000264 PARAMETER Experiment Name: At_Open_Flower_P Parameter: Age (day) Value: 21
  misc_feature: MA Experiment 20000264 PARAMETER Experiment Name: At_Open_Flower_P Parameter: Plant Line Value: WS
  misc_feature: MA Experiment 20000264 PARAMETER Experiment Name: At_Open_Flower_P Parameter: Tissue Value: Open Flower vs. Whole Plant
  misc_feature: MA Experiment ID: 20000437 Result: Down-regulated in Transcription
  misc_feature: MA Experiment 20000437 PARAMETER Experiment Name: At_Drought_P Parameter: Age (day) Value: 8
  misc_feature: MA Experiment 20000437 PARAMETER Experiment Name: At_Drought_P Parameter: Organism Value: A. thaliana
  misc_feature: MA Experiment 20000437 PARAMETER Experiment Name: At_Drought_P Parameter: Plant Line Value: WS
  misc_feature: MA Experiment 20000437 PARAMETER Experiment Name: At_Drought_P Parameter: Timepoint (hr) Value: 24
  misc_feature: MA Experiment 20000437 PARAMETER Experiment Name: At_Drought_P Parameter: Tissue Value: Whole Plant
  misc_feature: MA Experiment 20000437 PARAMETER Experiment Name: At_Drought_P Parameter: Treatment Value: Drought vs. No Drought
  misc_feature: MA Experiment ID: 20000438 Result: Up-regulated in Transcription
  misc_feature: MA Experiment 20000438 PARAMETER Experiment Name: At_Shoots__P Parameter: Age (day) Value: 14
  misc_feature: MA Experiment 20000438 PARAMETER Experiment Name: At_Shoots__P Parameter: Tissue Value: Shoots vs. Whole Plant
  misc_feature: MA Experiment ID: 20000439 Result: Down-regulated in Transcription
  misc_feature: MA Experiment 20000439 PARAMETER Experiment Name: At_Roots__P Parameter: Age (day) Value: 14 vs. 21
  misc_feature: MA Experiment 20000439 PARAMETER Experiment Name: At_Roots__P Parameter: Organism Value: A. thaliana
  misc_feature: MA Experiment 20000439 PARAMETER Experiment Name: At_Roots__P Parameter: Tissue Value: Roots vs. Whole Plant
  misc_feature: MA Experiment ID: 20000794 Result: Down-regulated in Transcription
  misc_feature: MA Experiment 20000794 PARAMETER Experiment Name: At_Petals_P Parameter: Age (day) Value: 23-25 days
  misc_feature: MA Experiment 20000794 PARAMETER Experiment Name: At_Petals_P Parameter: Plant Line Value: WS
  misc_feature: MA Experiment 20000794 PARAMETER Experiment Name: At_Petals_P Parameter: Tissue Value: Petals vs. Whole plant
  misc_feature: MA Experiment ID: 20001757 Result: Up-regulated in Transcription
  misc_feature: MA Experiment 20001757 PARAMETER Experiment Name: At_50mM_NH4NO3_L-to-H_P Parameter: Timepoint (hr) Value: 6
  misc_feature: MA Experiment 20001757 PARAMETER Experiment Name: At_50mM_NH4NO3_L-to-H_P Parameter: Tissue Value: Leaf
  misc_feature: MA Experiment 20001757 PARAMETER Experiment Name: At_50mM_NH4NO3_L-to-H_P Parameter: Treatment Value: 50mM NH4NO3 vs 100mM Mannitol
  misc_feature: MA Experiment ID: 20001905 Result: Down-regulated in Transcription
  misc_feature: MA Experiment 20001905 PARAMETER Experiment Name: At_Drought_Reproduction_P Parameter: Age (day) Value: 40
  misc_feature: MA Experiment 20001905 PARAMETER Experiment Name: At_Drought_Reproduction_P Parameter: Organism Value: A. thaliana
  misc_feature: MA Experiment 20001905 PARAMETER Experiment Name: At_Drought_Reproduction_P Parameter: Plant Line Value: WS
  misc_feature: MA Experiment 20001905 PARAMETER Experiment Name: At_Drought_Reproduction_P Parameter: Timepoint (day) Value: 10
  misc_feature: MA Experiment 20001905 PARAMETER Experiment Name: At_Drought_Reproduction_P Parameter: Tissue Value: Rosettes
  misc_feature: MA Experiment 20001905 PARAMETER Experiment Name: At_Drought_Reproduction_P Parameter: Treatment Value: Drought vs. No Drought
aaaccaaataatctctcgtttctaaacaaactagtggtgagtgaatcttctctggtgagtaatggaagtgagtatgtctttgaatgcgttaactcggcttcctctgaagaacacaggaagattcgaagaggttggtttagcgagacactctctgtttagctcaagaacggcatgccgagagacggcggtacagcagcggcggatggtttttgtggtggaggctaagggaaagaaaggtatggcggcgcgtcagtatcaacgtacacctcctcctatgcctaagattgaagacgatggaaacccaagattcgttatcttcattcgtatggccaatgtgtatctttggtatcctctgagtataatagctggtggtactactgctaagatcatggttgctgcaaaagataacctcttggggaagtatatctacaaagacaccattgcaagaaacattgccgctgttatttacagagatgagaaagagattcaaaagacagcaattaagcagcatcgtgtcttgcgtacagccaccgagtttcgatatggctacaaacttgtagaaaacggaaacatgagagctgcacttagtacttcagatgttattgagctcccaacccaggaccagcttaaaacagtgttcgacaaagttaaagactactttggggatgcaaaagagtcattcggaaagctatcatcgctgaacccggggagtgacgaaaaaactgaagaaacctcggatgagaaagccaaggcctgaggctgaacaattgacacttggttggttgattttgatgtctcaaccgtctcggtatgggctgcagaggtcactggatatgacgagactaccgctattttgtgcacattttctctatacatctctcacagaaacagcttctgttaaatctcttgtaacatataacttattgtgtattgtagatttgttgaaagaaagagccattggttacaacttgcaattg

SEQ ID NO: 31029 - protein, 231 aa, Arabidopsis thaliana
  peptide (1)..(231): Ceres Seq. ID no. 12322652
  misc_feature (1)..(230): Homolog of NCBI NO: 30697554 NR Description: auxin-regulated protein [Arabidopsis thaliana]
  misc_feature (1)..(231): Homolog of NCBI NO: 30697556 NR Description: auxin-regulated protein [Arabidopsis thaliana]
  misc_feature (135)..(230): Homolog of NCBI NO: 11072026 NR Description: F12A21.16 [Arabidopsis thaliana]
  misc_feature (17)..(137): Homolog of NCBI NO: 11072026 NR Description: F12A21.16 [Arabidopsis thaliana]
MEVSMSLNALTRLPLKNTGRFEEVGLARHSLFSSRTACRETAVQQRRMVFVVEAKGKKGMAARQYQRTPPPMPKIEDDGNPRFVIFIRMANVYLWYPLSIIAGGTTAKIMVAAKDNLLGKYIYKDTIARNIAAVIYRDEKEIQKTAIKQHRVLRTATEFRYGYKLVENGNMRAALSTSDVIELPTQDQLKTVFDKVKDYFGDAKESFGKLSSLNPGSDEKTEETSDEKAKA

SEQ ID NO: 31030 - protein, 227 aa, Arabidopsis thaliana
  peptide (1)..(227): Ceres Seq. ID no. 12322653
  misc_feature (1)..(226): Homolog of NCBI NO: 30697554 NR Description: auxin-regulated protein [Arabidopsis thaliana]
  misc_feature (1)..(227): Homolog of NCBI NO: 30697556 NR Description: auxin-regulated protein [Arabidopsis thaliana]
  misc_feature (131)..(226): Homolog of NCBI NO: 11072026 NR Description: F12A21.16 [Arabidopsis thaliana]
  misc_feature (13)..(133): Homolog of NCBI NO: 11072026 NR Description: F12A21.16 [Arabidopsis thaliana]
MSLNALTRLPLKNTGRFEEVGLARHSLFSSRTACRETAVQQRRMVFVVEAKGKKGMAARQYQRTPPPMPKIEDDGNPRFVIFIRMANVYLWYPLSIIAGGTTAKIMVAAKDNLLGKYIYKDTIARNIAAVIYRDEKEIQKTAIKQHRVLRTATEFRYGYKLVENGNMRAALSTSDVIELPTQDQLKTVFDKVKDYFGDAKESFGKLSSLNPGSDEKTEETSDEKAKA

SEQ ID NO: 31031 - protein, 184 aa, Arabidopsis thaliana
  peptide (1)..(184): Ceres Seq. ID no. 12322654
  misc_feature (1)..(183): Homolog of NCBI NO: 30697554 NR Description: auxin-regulated protein [Arabidopsis thaliana]
  misc_feature (1)..(184): Homolog of NCBI NO: 30697556 NR Description: auxin-regulated protein [Arabidopsis thaliana]
  misc_feature (88)..(183): Homolog of NCBI NO: 11072026 NR Description: F12A21.16 [Arabidopsis thaliana]
  misc_feature (1)..(90): Homolog of NCBI NO: 11072026 NR Description: F12A21.16 [Arabidopsis thaliana]
MVFVVEAKGKKGMAARQYQRTPPPMPKIEDDGNPRFVIFIRMANVYLWYPLSIIAGGTTAKIMVAAKDNLLGKYIYKDTIARNIAAVIYRDEKEIQKTAIKQHRVLRTATEFRYGYKLVENGNMRAALSTSDVIELPTQDQLKTVFDKVKDYFGDAKESFGKLSSLNPGSDEKTEETSDEKAKA

SEQ ID NO: 31032 - DNA, 621 bp, Arabidopsis thaliana
  misc_feature (1)..(621): Ceres Seq. ID no. 12559532
  misc_feature: MA Experiment ID: 108434 Result: Up-regulated in Transcription
  misc_feature: MA Experiment 108434 PARAMETER Experiment Name: At_Root_Tips_cDNA_P Parameter: Tissue Value: Root Tips
  misc_feature: MA Experiment ID: 108462 Result: Down-regulated in Transcription
  misc_feature: MA Experiment 108462 PARAMETER Experiment Name: At_Germinating_Seeds_cDNA_P Parameter: Age (day) Value: 2 vs. 0
  misc_feature: MA Experiment 108462 PARAMETER Experiment Name: At_Germinating_Seeds_cDNA_P Parameter: Tissue Value: Germinating Seeds
  misc_feature: MA Experiment ID: 108463 Result: Down-regulated in Transcription
  misc_feature: MA Experiment 108463 PARAMETER Experiment Name: At_Germinating_Seeds_cDNA_P Parameter: Age (day) Value: 3 vs. 0
  misc_feature: MA Experiment 108463 PARAMETER Experiment Name: At_Germinating_Seeds_cDNA_P Parameter: Tissue Value: Germinating Seeds
  misc_feature: MA Experiment ID: 108464 Result: Down-regulated in Transcription
  misc_feature: MA Experiment 108464 PARAMETER Experiment Name: At_Germinating_Seeds_cDNA_P Parameter: Age (day) Value: 4 vs. 0
  misc_feature: MA Experiment 108464 PARAMETER Experiment Name: At_Germinating_Seeds_cDNA_P Parameter: Tissue Value: Germinating Seeds
  misc_feature: MA Experiment ID: 108573 Result: Down-regulated in Transcription
  misc_feature: MA Experiment 108573 PARAMETER Experiment Name: At_Drought_cDNA_P Parameter: Timepoint (hr) Value: 6
  misc_feature: MA Experiment 108573 PARAMETER Experiment Name: At_Drought_cDNA_P Parameter: Tissue Value: Aerial
  misc_feature: MA Experiment 108573 PARAMETER Experiment Name: At_Drought_cDNA_P Parameter: Treatment Value: Drought vs. No Drought
  misc_feature: MA Experiment ID: 20000184 Result: Up-regulated in Transcription
  misc_feature: MA Experiment 20000184 PARAMETER Experiment Name: At_Shoots__P Parameter: Age (day) Value: 7
  misc_feature: MA Experiment 20000184 PARAMETER Experiment Name: At_Shoots__P Parameter: Tissue Value: Shoots vs. Whole Plant
  misc_feature: MA Experiment ID: 20001451 Result: Up-regulated in Transcription
  misc_feature: MA Experiment 20001451 PARAMETER Experiment Name: At_Far-red-induction_P Parameter: Age (day) Value: 7
  misc_feature: MA Experiment 20001451 PARAMETER Experiment Name: At_Far-red-induction_P Parameter: Light Value: Far-red vs. White
  misc_feature: MA Experiment 20001451 PARAMETER Experiment Name: At_Far-red-induction_P Parameter: Organism Value: A. thaliana
  misc_feature: MA Experiment 20001451 PARAMETER Experiment Name: At_Far-red-induction_P Parameter: Plant Line Value: Columbia
  misc_feature: MA Experiment 20001451 PARAMETER Experiment Name: At_Far-red-induction_P Parameter: Timepoint (hr) Value: 24
  misc_feature: MA Experiment 20001451 PARAMETER Experiment Name: At_Far-red-induction_P Parameter: Tissue Value: Whole Plant
  misc_feature: MA Experiment ID: 20001560 Result: Up-regulated in Transcription
  misc_feature: MA Experiment 20001560 PARAMETER Experiment Name: At_Drought_Soil_Dry_P Parameter: Age (day) Value: 28
  misc_feature: MA Experiment 20001560 PARAMETER Experiment Name: At_Drought_Soil_Dry_P Parameter: Organism Value: A. thaliana
  misc_feature: MA Experiment 20001560 PARAMETER Experiment Name: At_Drought_Soil_Dry_P Parameter: Plant Line Value: WS
  misc_feature: MA Experiment 20001560 PARAMETER Experiment Name: At_Drought_Soil_Dry_P Parameter: Post Timepoint (hr) Value: None
  misc_feature: MA Experiment 20001560 PARAMETER Experiment Name: At_Drought_Soil_Dry_P Parameter: Post-Treatment Value: None
  misc_feature: MA Experiment 20001560 PARAMETER Experiment Name: At_Drought_Soil_Dry_P Parameter: Timepoint (day) Value: 14
  misc_feature: MA Experiment 20001560 PARAMETER Experiment Name: At_Drought_Soil_Dry_P Parameter: Treatment Value: Drought vs. No Drought
  misc_feature: MA Experiment ID: 20001757 Result: Up-regulated in Transcription
  misc_feature: MA Experiment 20001757 PARAMETER Experiment Name: At_50mM_NH4NO3_L-to-H_P Parameter: Timepoint (hr) Value: 6
  misc_feature: MA Experiment 20001757 PARAMETER Experiment Name: At_50mM_NH4NO3_L-to-H_P Parameter: Tissue Value: Leaf
  misc_feature: MA Experiment 20001757 PARAMETER Experiment Name: At_50mM_NH4NO3_L-to-H_P Parameter: Treatment Value: 50mM NH4NO3 vs 100mM Mannitol
accctaagcgtatataaatcatatagttttcattttttcgtacttcttctccatcgccgtctaaaaaccctaatctcactccgcctcctgcgagatccatcaacacttccgcaaaaatgaaggttgttgctgcgtttttgcttgccgtcttgagcgggaaagcttccccaaccactggcgatatcaaggatattcttggatcagttggtgctgagacagaggattctcagattgagcttttgttgaaggaagtgaaagggaaagacttggctgagctaattgctgctggaagggagaagttagcttcagtaccatcaggaggtggtggtggtgttgcggttgcttctgctacatctggaggtggaggaggtggtggtgctcctgctgctgagtccaagaaagaagagaagaaagaagagaaagaagaatccgatgatgacatgggtttcagtttgttcgagtaatgcggtatacttggcatttggttttgctgtaccctttcgaaatctttatgtcgttgtttagtttgttgtattcgactatcttcttagactttgctgaaattctcaagagatttttttactcaaacatcagtccacttgtgattggcatttatatttc

SEQ ID NO: 31033 - protein, 115 aa, Arabidopsis thaliana
  peptide (1)..(115): Ceres Seq. ID no. 12559533
  misc_feature (17)..(114): Pfam Name: 60s Acidic ribosomal protein Pfam Description: 60s Acidic ribosomal protein
  misc_feature (17)..(114): Pfam Name: 60s Acidic ribosomal protein Pfam Description: 60s Acidic ribosomal protein
  misc_feature (1)..(115): Homolog of NCBI NO: 3122752 NR Description: 60S ACIDIC RIBOSOMAL PROTEIN P2
  misc_feature (1)..(115): Homolog of NCBI NO: 899610 NR Description: acidic ribosomal protein P2
  misc_feature (1)..(115): Homolog of NCBI NO: 730583 NR Description: 60S acidic ribosomal protein P2
  misc_feature (1)..(115): Homolog of NCBI NO: 1173073 NR Description: 60S ACIDIC RIBOSOMAL PROTEIN P2A (P2)
  misc_feature (1)..(115): Homolog of NCBI NO: 34906408 NR Description: putative 60S acidic ribosomal protein P2A
  misc_feature (1)..(115): Homolog of NCBI NO: 3122752 NR Description: 60S ACIDIC RIBOSOMAL PROTEIN P2
  misc_feature (1)..(115): Homolog of NCBI NO: 730583 NR Description: 60S acidic ribosomal protein P2
  misc_feature (1)..(115): Homolog of NCBI NO: 34906408 NR Description: putative 60S acidic ribosomal protein P2A
  misc_feature (1)..(115): Homolog of NCBI NO: 15226231 NR Description: 60S acidic ribosomal protein P2
  misc_feature (1)..(115): Homolog of NCBI NO: 21593095 NR Description: 60S acidic ribosomal protein P2 [Arabidopsis
  misc_feature (1)..(115): Homolog of NCBI NO: 15226230 NR Description: 60S acidic ribosomal protein P2
  misc_feature (1)..(115): Homolog of NCBI NO: 15230454 NR Description: acidic ribosomal protein P2 -like; protein id:
  misc_feature (1)..(115): Homolog of NCBI NO: 24473796 NR Description: 60s acidic ribosomal protein [Prunus dulcis]
  misc_feature (1)..(115): Homolog of NCBI NO: 1173073 NR Description: 60S ACIDIC RIBOSOMAL PROTEIN P2A (P2)
  misc_feature (1)..(115): Homolog of NCBI NO: 899610 NR Description: acidic ribosomal protein P2
  misc_feature (1)..(115): Homolog of NCBI NO: 24473796 NR Description: 60s acidic ribosomal protein [Prunus dulcis]
  misc_feature (1)..(115): Homolog of NCBI NO: 15230454 NR Description: acidic ribosomal protein P2 -like; protein id:
  misc_feature (1)..(115): Homolog of NCBI NO: 15226230 NR Description: 60S acidic ribosomal protein P2
  misc_feature (1)..(115): Homolog of NCBI NO: 21593095 NR Description: 60S acidic ribosomal protein P2 [Arabidopsis
  misc_feature (1)..(115): Homolog of NCBI NO: 15226231 NR Description: 60S acidic ribosomal protein P2
MKVVAAFLLAVLSGKASPTTGDIKDILGSVGAETEDSQIELLLKEVKGKDLAELIAAGREKLASVPSGGGGGVAVASATSGGGGGGGAPAAESKKEEKKEEKEESDDDMGFSLFE

SEQ ID NO: 31034 - DNA, 1051 bp, Arabidopsis thaliana
  misc_feature (1)..(1051): Ceres Seq. ID no. 12579915
  misc_feature: MA Experiment ID: 108435 Result: Down-regulated in Transcription
  misc_feature: MA Experiment 108435 PARAMETER Experiment Name: At_stm_Mutants_cDNA_P Parameter: Plant Line Value: wt Landsburg vs stm
  misc_feature: MA Experiment 108435 PARAMETER Experiment Name: At_stm_Mutants_cDNA_P Parameter: Tissue Value: Shoot Apical Meristem Region
  misc_feature: MA Experiment ID: 108462 Result: Down-regulated in Transcription
  misc_feature: MA Experiment 108462 PARAMETER Experiment Name: At_Germinating_Seeds_cDNA_P Parameter: Age (day) Value: 2 vs. 0
  misc_feature: MA Experiment 108462 PARAMETER Experiment Name: At_Germinating_Seeds_cDNA_P Parameter: Tissue Value: Germinating Seeds
  misc_feature: MA Experiment ID: 108488 Result: Up-regulated in Transcription
  misc_feature: MA Experiment ID: 108573 Result: Down-regulated in Transcription
  misc_feature: MA Experiment 108573 PARAMETER Experiment Name: At_Drought_cDNA_P Parameter: Timepoint (hr) Value: 6
  misc_feature: MA Experiment 108573 PARAMETER Experiment Name: At_Drought_cDNA_P Parameter: Tissue Value: Aerial
  misc_feature: MA Experiment 108573 PARAMETER Experiment Name: At_Drought_cDNA_P Parameter: Treatment Value: Drought vs. No Drought
  misc_feature: MA Experiment ID: 108594 Result: Up-regulated in Transcription
  misc_feature: MA Experiment 108594 PARAMETER Experiment Name: At_Ler-rhl_Root_cDNA_P Parameter: Plant Line Value: null
  misc_feature: MA Experiment ID: 108595 Result: Down-regulated in Transcription
  misc_feature: MA Experiment 108595 PARAMETER Experiment Name: At_Ler-pi_Ovule_cDNA_P Parameter: Plant Line Value: null
  misc_feature: MA Experiment ID: 20000069 Result: Down-regulated in Transcription
  misc_feature: MA Experiment 20000069 PARAMETER Experiment Name: At_100uM_ABA_Mutants_cDNA_P Parameter: Plant Line Value: CS23
  misc_feature: MA Experiment 20000069 PARAMETER Experiment Name: At_100uM_ABA_Mutants_cDNA_P Parameter: Timepoint (hr) Value: 6
  misc_feature: MA Experiment 20000069 PARAMETER Experiment Name: At_100uM_ABA_Mutants_cDNA_P Parameter: Tissue Value: Aerial
  misc_feature: MA Experiment 20000069 PARAMETER Experiment Name: At_100uM_ABA_Mutants_cDNA_P Parameter: Treatment Value: 100uM ABA vs. No Treatment
  misc_feature: MA Experiment ID: 20000070 Result: Down-regulated in Transcription
  misc_feature: MA Experiment 20000070 PARAMETER Experiment Name: At_100uM_ABA_Mutants_cDNA_P Parameter: Plant Line Value: CS24
  misc_feature: MA Experiment 20000070 PARAMETER Experiment Name: At_100uM_ABA_Mutants_cDNA_P Parameter: Timepoint (hr) Value: 6
  misc_feature: MA Experiment 20000070 PARAMETER Experiment Name: At_100uM_ABA_Mutants_cDNA_P Parameter: Tissue Value: Aerial
  misc_feature: MA Experiment 20000070 PARAMETER Experiment Name: At_100uM_ABA_Mutants_cDNA_P Parameter: Treatment Value: 100uM ABA vs. No Treatment
  misc_feature: MA Experiment ID: 20000071 Result: Down-regulated in Transcription
  misc_feature: MA Experiment 20000071 PARAMETER Experiment Name: At_100uM_ABA_Mutants_cDNA_P Parameter: Plant Line Value: CS8104
  misc_feature: MA Experiment 20000071 PARAMETER Experiment Name: At_100uM_ABA_Mutants_cDNA_P Parameter: Timepoint (hr) Value: 6
  misc_feature: MA Experiment 20000071 PARAMETER Experiment Name: At_100uM_ABA_Mutants_cDNA_P Parameter: Tissue Value: Aerial
  misc_feature: MA Experiment 20000071 PARAMETER Experiment Name: At_100uM_ABA_Mutants_cDNA_P Parameter: Treatment Value: 100uM ABA vs. No Treatment
  misc_feature: MA Experiment ID: 20000072 Result: Down-regulated in Transcription
  misc_feature: MA Experiment 20000072 PARAMETER Experiment Name: At_100uM_ABA_Mutants_cDNA_P Parameter: Plant Line Value: CS8105
  misc_feature: MA Experiment 20000072 PARAMETER Experiment Name: At_100uM_ABA_Mutants_cDNA_P Parameter: Timepoint (hr) Value: 6
  misc_feature: MA Experiment 20000072 PARAMETER Experiment Name: At_100uM_ABA_Mutants_cDNA_P Parameter: Tissue Value: Aerial
  misc_feature: MA Experiment 20000072 PARAMETER Experiment Name: At_100uM_ABA_Mutants_cDNA_P Parameter: Treatment Value: 100uM ABA vs. No Treatment
  misc_feature: MA Experiment ID: 20000086 Result: Down-regulated in Transcription
  misc_feature: MA Experiment 20000086 PARAMETER Experiment Name: At_100uM_ABA_Mutants_cDNA_P Parameter: Plant Line Value: CS22
  misc_feature: MA Experiment 20000086 PARAMETER Experiment Name: At_100uM_ABA_Mutants_cDNA_P Parameter: Timepoint (hr) Value: 6
  misc_feature: MA Experiment 20000086 PARAMETER Experiment Name: At_100uM_ABA_Mutants_cDNA_P Parameter: Tissue Value: Aerial
  misc_feature: MA Experiment 20000086 PARAMETER Experiment Name: At_100uM_ABA_Mutants_cDNA_P Parameter: Treatment Value: 100uM ABA vs. No Treatment
  misc_feature: MA Experiment ID: 20000087 Result: Down-regulated in Transcription
  misc_feature: MA Experiment 20000087 PARAMETER Experiment Name: At_100uM_ABA_Mutants_cDNA_P Parameter: Plant Line Value: WS
  misc_feature: MA Experiment 20000087 PARAMETER Experiment Name: At_100uM_ABA_Mutants_cDNA_P Parameter: Timepoint (hr) Value: 6
  misc_feature: MA Experiment 20000087 PARAMETER Experiment Name: At_100uM_ABA_Mutants_cDNA_P Parameter: Tissue Value: Aerial
  misc_feature: MA Experiment 20000087 PARAMETER Experiment Name: At_100uM_ABA_Mutants_cDNA_P Parameter: Treatment Value: 100uM ABA vs. No Treatment
  misc_feature: MA Experiment ID: 20000088 Result: Down-regulated in Transcription
  misc_feature: MA Experiment 20000088 PARAMETER Experiment Name: At_100uM_ABA_Mutants_cDNA_P Parameter: Plant Line Value: Landsberg
  misc_feature: MA Experiment 20000088 PARAMETER Experiment Name: At_100uM_ABA_Mutants_cDNA_P Parameter: Timepoint (hr) Value: 6
  misc_feature: MA Experiment 20000088 PARAMETER Experiment Name: At_100uM_ABA_Mutants_cDNA_P Parameter: Tissue Value: Aerial
  misc_feature: MA Experiment 20000088 PARAMETER Experiment Name: At_100uM_ABA_Mutants_cDNA_P Parameter: Treatment Value: 100uM ABA vs. No Treatment
  misc_feature: MA Experiment ID: 20000089 Result: Down-regulated in Transcription
  misc_feature: MA Experiment ID: 20000090 Result: Down-regulated in Transcription
  misc_feature: MA Experiment ID: 20000117 Result: Down-regulated in Transcription
  misc_feature: MA Experiment 20000117 PARAMETER Experiment Name: At_100uM_ABA_Mutants_cDNA_P Parameter: Plant Line Value: Columbia
  misc_feature: MA Experiment 20000117 PARAMETER Experiment Name: At_100uM_ABA_Mutants_cDNA_P Parameter: Timepoint (hr) Value: 6
  misc_feature: MA Experiment 20000117 PARAMETER Experiment Name: At_100uM_ABA_Mutants_cDNA_P Parameter: Tissue Value: Aerial
  misc_feature: MA Experiment 20000117 PARAMETER Experiment Name: At_100uM_ABA_Mutants_cDNA_P Parameter: Treatment Value: 100uM ABA vs. No Treatment
  misc_feature: MA Experiment ID: 20000184 Result: Up-regulated in Transcription
  misc_feature: MA Experiment 20000184 PARAMETER Experiment Name: At_Shoots__P Parameter: Age (day) Value: 7
  misc_feature: MA Experiment 20000184 PARAMETER Experiment Name: At_Shoots__P Parameter: Tissue Value: Shoots vs. Whole Plant
  misc_feature: MA Experiment ID: 20000185 Result: Down-regulated in Transcription
  misc_feature: MA Experiment 20000185 PARAMETER Experiment Name: At_Roots__P Parameter: Age (day) Value: 7 vs. 21
  misc_feature: MA Experiment 20000185 PARAMETER Experiment Name: At_Roots__P Parameter: Organism Value: A. thaliana
  misc_feature: MA Experiment 20000185 PARAMETER Experiment Name: At_Roots__P Parameter: Tissue Value: Roots vs. Whole Plant
  misc_feature: MA Experiment ID: 20000224 Result: Down-regulated in Transcription
  misc_feature: MA Experiment ID: 20000234 Result: Down-regulated in Transcription
  misc_feature: MA Experiment 20000234 PARAMETER Experiment Name: At_Siliques_P Parameter: Age (day) Value: 21
  misc_feature: MA Experiment 20000234 PARAMETER Experiment Name: At_Siliques_P Parameter: Organism Value: A. thaliana
  misc_feature: MA Experiment 20000234 PARAMETER Experiment Name: At_Siliques_P Parameter: Plant Line Value: WS
  misc_feature: MA Experiment 20000234 PARAMETER Experiment Name: At_Siliques_P Parameter: Tissue Value: Less Than 5mm Siliques vs. Whole Plant
  misc_feature: MA Experiment ID: 20000264 Result: Down-regulated in Transcription
  misc_feature: MA Experiment 20000264 PARAMETER Experiment Name: At_Open_Flower_P Parameter: Age (day) Value: 21
  misc_feature: MA Experiment 20000264 PARAMETER Experiment Name: At_Open_Flower_P Parameter: Plant Line Value: WS
  misc_feature: MA Experiment 20000264 PARAMETER Experiment Name: At_Open_Flower_P Parameter: Tissue Value: Open Flower vs. Whole Plant
  misc_feature: MA Experiment ID: 20000286 Result: Down-regulated in Transcription
  misc_feature: MA Experiment 20000286 PARAMETER Experiment Name: At_Open_Flower_P Parameter: Age (day) Value: 21
  misc_feature: MA Experiment 20000286 PARAMETER Experiment Name: At_Open_Flower_P Parameter: Plant Line Value: WS
  misc_feature: MA Experiment 20000286 PARAMETER Experiment Name: At_Open_Flower_P Parameter: Tissue Value: Half Open vs. Whole Plant
  misc_feature: MA Experiment ID: 20000437 Result: Down-regulated in Transcription
  misc_feature: MA Experiment 20000437 PARAMETER Experiment Name: At_Drought_P Parameter: Age (day) Value: 8
  misc_feature: MA Experiment 20000437 PARAMETER Experiment Name: At_Drought_P Parameter: Organism Value: A. thaliana
  misc_feature: MA Experiment 20000437 PARAMETER Experiment Name: At_Drought_P Parameter: Plant Line Value: WS
  misc_feature: MA Experiment 20000437 PARAMETER Experiment Name: At_Drought_P Parameter: Timepoint (hr) Value: 24
  misc_feature: MA Experiment 20000437 PARAMETER Experiment Name: At_Drought_P Parameter: Tissue Value: Whole Plant
  misc_feature: MA Experiment 20000437 PARAMETER Experiment Name: At_Drought_P Parameter: Treatment Value: Drought vs. No Drought
  misc_feature: MA Experiment ID: 20000439 Result: Down-regulated in Transcription
  misc_feature: MA Experiment 20000439 PARAMETER Experiment Name: At_Roots__P Parameter: Age (day) Value: 14 vs. 21
  misc_feature: MA Experiment 20000439 PARAMETER Experiment Name: At_Roots__P Parameter: Organism Value: A. thaliana
  misc_feature: MA Experiment 20000439 PARAMETER Experiment Name: At_Roots__P Parameter: Tissue Value: Roots vs. Whole Plant
  misc_feature: MA Experiment ID: 20000527 Result: Up-regulated in Transcription
  misc_feature: MA Experiment 20000527 PARAMETER Experiment Name: At_10percent_PEG_P Parameter: Age (day) Value: 20
  misc_feature: MA Experiment 20000527 PARAMETER Experiment Name: At_10percent_PEG_P Parameter: Organism Value: A. thaliana
  misc_feature: MA Experiment 20000527 PARAMETER Experiment Name: At_10percent_PEG_P Parameter: Plant Line Value: WS
  misc_feature: MA Experiment 20000527 PARAMETER Experiment Name: At_10percent_PEG_P Parameter: Timepoint (day) Value: 20
  misc_feature: MA Experiment 20000527 PARAMETER Experiment Name: At_10percent_PEG_P Parameter: Tissue Value: Whole Plant
  misc_feature: MA Experiment 20000527 PARAMETER Experiment Name: At_10percent_PEG_P Parameter: Treatment Value: 10percent PEG vs. No Treatment
  misc_feature: MA Experiment ID: 20000794 Result: Down-regulated in Transcription
  misc_feature: MA Experiment 20000794 PARAMETER Experiment Name: At_Petals_P Parameter: Age (day) Value: 23-25 days
  misc_feature: MA Experiment 20000794 PARAMETER Experiment Name: At_Petals_P Parameter: Plant Line Value: WS
  misc_feature: MA Experiment 20000794 PARAMETER Experiment Name: At_Petals_P Parameter: Tissue Value: Petals vs. Whole plant
  misc_feature: MA Experiment ID: 20001450 Result: Up-regulated in Transcription
  misc_feature: MA Experiment 20001450 PARAMETER Experiment Name: At_Far-red-induction_P Parameter: Age (day) Value: 7
  misc_feature: MA Experiment 20001450 PARAMETER Experiment Name: At_Far-red-induction_P Parameter: Light Value: Far-red vs. White
  misc_feature: MA Experiment 20001450 PARAMETER Experiment Name: At_Far-red-induction_P Parameter: Organism Value: A. thaliana
  misc_feature: MA Experiment 20001450 PARAMETER Experiment Name: At_Far-red-induction_P Parameter: Plant Line Value: Columbia
  misc_feature: MA Experiment 20001450 PARAMETER Experiment Name: At_Far-red-induction_P Parameter: Timepoint (hr) Value: 8
  misc_feature: MA Experiment 20001450 PARAMETER Experiment Name: At_Far-red-induction_P Parameter: Tissue Value: Whole Plant
  misc_feature: MA Experiment ID: 20001451 Result: Up-regulated in Transcription
  misc_feature: MA Experiment 20001451 PARAMETER Experiment Name: At_Far-red-induction_P Parameter: Age (day) Value: 7
  misc_feature: MA Experiment 20001451 PARAMETER Experiment Name: At_Far-red-induction_P Parameter: Light Value: Far-red vs. White
  misc_feature: MA Experiment 20001451 PARAMETER Experiment Name: At_Far-red-induction_P Parameter: Organism Value: A. thaliana
  misc_feature: MA Experiment 20001451 PARAMETER Experiment Name: At_Far-red-induction_P Parameter: Plant Line Value: Columbia
  misc_feature: MA Experiment 20001451 PARAMETER Experiment Name: At_Far-red-induction_P Parameter: Timepoint (hr) Value: 24
  misc_feature: MA Experiment 20001451 PARAMETER Experiment Name: At_Far-red-induction_P Parameter: Tissue Value: Whole Plant
  misc_feature: MA Experiment ID: 20001905 Result: Down-regulated in Transcription
  misc_feature: MA Experiment 20001905 PARAMETER Experiment Name: At_Drought_Reproduction_P Parameter: Age (day) Value: 40
  misc_feature: MA Experiment 20001905 PARAMETER Experiment Name: At_Drought_Reproduction_P Parameter: Organism Value: A. thaliana
  misc_feature: MA Experiment 20001905 PARAMETER Experiment Name: At_Drought_Reproduction_P Parameter: Plant Line Value: WS
  misc_feature: MA Experiment 20001905 PARAMETER Experiment Name: At_Drought_Reproduction_P Parameter: Timepoint (day) Value: 10
  misc_feature: MA Experiment 20001905 PARAMETER Experiment Name: At_Drought_Reproduction_P Parameter: Tissue Value: Rosettes
  misc_feature: MA Experiment 20001905 PARAMETER Experiment Name: At_Drought_Reproduction_P Parameter: Treatment Value: Drought vs. No Drought
acatcctaatcgaaaatctcaaaaccctagaaaaaatggcaggaacctgagttgtggcggtgtacggcgaaggagccatgacggagacgaaacagaaatctcccttctccgtgaaagttggtctcgctcagatgcttcgtggcggtgtaatcatggatgtcgtcaacgcagagcaagctcgaatcgctgaagaagctggcgcatgcgccgtgatggctcttgaacgtgttcccgccgatattcgagctcaaggcggtgttgctcgaatgagcgatccagagatgatcaaagaaatcaaaaacgccgtgacgattccggtgatggcgaaagctagaattggtcatttcgttgaagcagatcctggaagcaatcggagttgattacgtcgacgagagtgaagttctcactctcgccgacgaagataatcacatcaacaaacataatttcaaaatcccttttgtttgtggatgtaggaatctcggtgaagctttaaggcggatccgtgaaggagccgccatgataagaaccaaaggtgaggctggaactggtaacgttgttgaagccgttaggcacgtgaggagtgtgaacggagctattcggttacttagaagcatggacgatgacgaggttttcacttacgcgaaaaagatcgctgcgccgtatgatttggttgtgcagactaaggagcttgggaggttaccggtggttcagttcgctgctggaggagtggcgacgccggcggatgcggcgttgatgatgcagttgggatgtgatggagtgtttgttgggtcgggtgttttcaagagtggagatccggtgaagagggctaaggctattgttcaggcggttacgaattatagagacgcggcggtgttggcggaggtgagctgtggtttaggtgaagccatggttggtcttaatttggatgataaggttgagaggttcgctagtcgttctgagtaaccaatcaaatttcagatgtttttatccataacgtttgtcactttaatatgtatccacaaaccaatattctcgatttattcaagatttt

SEQ ID NO: 31035 - protein, 148 aa, Arabidopsis thaliana
  peptide (1)..(148): Ceres Seq. ID no. 12579916
  misc_feature (1)..(68): Pfam Name: SOR/SNZ family Pfam Description: SOR/SNZ family
  misc_feature (1)..(146): Homolog of NCBI NO: 19115894 NR Description: putative stress-induced protein
  misc_feature (1)..(137): Homolog of NCBI NO: 22970419 NR Description: hypothetical protein [Chloroflexus aurantiacus]
  misc_feature (1)..(148): Homolog of NCBI NO: 37530308 NR Description: putative pyridoxine/pyridoxal 5-phosphate
  misc_feature (1)..(148): Homolog of NCBI NO: 13310484 NR Description: Sor-like protein [Ginkgo biloba]
  misc_feature (1)..(148): Homolog of NCBI NO: 34394152 NR Description: putative ethylene-inducible protein
  misc_feature (1)..(148): Homolog of NCBI NO: 10719739 NR Description: putative pyridoxine biosynthetic enzyme
  misc_feature (1)..(148): Homolog of NCBI NO: 21617922 NR Description: pyridoxine biosynthesis protein-like [Arabidopsis
  misc_feature (1)..(148): Homolog of NCBI NO: 2501578 NR Description: ETHYLENE-INDUCIBLE PROTEIN HEVER
  misc_feature (1)..(148): Homolog of NCBI NO: 15240972 NR Description: pyridoxine biosynthesis protein - like
  misc_feature (1)..(148): Homolog of NCBI NO: 15224470 NR Description: similar to SOR1 from the fungus Cercospora
MIRTKGEAGTGNVVEAVRHVRSVNGAIRLLRSMDDDEVFTYAKKIAAPYDLVVQTKELGRLPVVQFAAGGVATPADAALMMQLGCDGVFVGSGVFKSGDPVKRAKAIVQAVTNYRDAAVLAEVSCGLGEAMVGLNLDDKVERFASRSE

SEQ ID NO: 31036 - protein, 116 aa, Arabidopsis thaliana
  peptide (1)..(116): Ceres Seq. ID no. 12579917
  misc_feature (38)..(75): Pfam Name: Indole-3-glycerol phosphate synthase Pfam Description: Indole-3-glycerol phosphate synthase
  misc_feature (1)..(114): Homolog of NCBI NO: 19115894 NR Description: putative stress-induced protein
  misc_feature (1)..(105): Homolog of NCBI NO: 22970419 NR Description: hypothetical protein [Chloroflexus aurantiacus]
  misc_feature (1)..(116): Homolog of NCBI NO: 37530308 NR Description: putative pyridoxine/pyridoxal 5-phosphate
  misc_feature (1)..(116): Homolog of NCBI NO: 13310484 NR Description: Sor-like protein [Ginkgo biloba]
  misc_feature (1)..(116): Homolog of NCBI NO: 34394152 NR Description: putative ethylene-inducible protein
  misc_feature (1)..(116): Homolog of NCBI NO: 10719739 NR Description: putative pyridoxine biosynthetic enzyme
  misc_feature (1)..(116): Homolog of NCBI NO: 21617922 NR Description: pyridoxine biosynthesis protein-like [Arabidopsis
  misc_feature (1)..(116): Homolog of NCBI NO: 2501578 NR Description: ETHYLENE-INDUCIBLE PROTEIN HEVER
  misc_feature (1)..(116): Homolog of NCBI NO: 15240972 NR Description: pyridoxine biosynthesis protein - like
  misc_feature (1)..(116): Homolog of NCBI NO: 15224470 NR Description: similar to SOR1 from the fungus Cercospora
MDDDEVFTYAKKIAAPYDLVVQTKELGRLPVVQFAAGGVATPADAALMMQLGCDGVFVGSGVFKSGDPVKRAKAIVQAVTNYRDAAVLAEVSCGLGEAMVGLNLDDKVERFASRSE

SEQ ID NO: 31037 - protein, 100 aa, Arabidopsis thaliana
  peptide (1)..(100): Ceres Seq. ID no. 12579918
  misc_feature (9)..(93): Pfam Name: SOR/SNZ family Pfam Description: SOR/SNZ family
  misc_feature (7)..(93): Homolog of NCBI NO: 19115894 NR Description: putative stress-induced protein
  misc_feature (6)..(93): Homolog of NCBI NO: 22970419 NR Description: hypothetical protein [Chloroflexus aurantiacus]
  misc_feature (1)..(93): Homolog of NCBI NO: 37530308 NR Description: putative pyridoxine/pyridoxal 5-phosphate
  misc_feature (1)..(93): Homolog of NCBI NO: 13310484 NR Description: Sor-like protein [Ginkgo biloba]
  misc_feature (1)..(93): Homolog of NCBI NO: 34394152 NR Description: putative ethylene-inducible protein
  misc_feature (1)..(93): Homolog of NCBI NO: 10719739 NR Description: putative pyridoxine biosynthetic enzyme
  misc_feature (1)..(93): Homolog of NCBI NO: 21617922 NR Description: pyridoxine biosynthesis protein-like [Arabidopsis
  misc_feature (1)..(93): Homolog of NCBI NO: 2501578 NR Description: ETHYLENE-INDUCIBLE PROTEIN HEVER
  misc_feature (1)..(93): Homolog of NCBI NO: 15240972 NR Description: pyridoxine biosynthesis protein - like
  misc_feature (1)..(93): Homolog of NCBI NO: 15224470 NR Description: similar to SOR1 from the fungus Cercospora
MTETKQKSPFSVKVGLAQMLRGGVIMDVVNAEQARIAEEAGACAVMALERVPADIRAQGGVARMSDPEMIKEIKNAVTIPVMAKARIGHFVEADPGSNRS

SEQ ID NO: 31038 - DNA, 752 bp, Arabidopsis thaliana
  misc_feature (1)..(752): Ceres Seq. ID no. 13487050
  misc_feature: MA Experiment ID: 108434 Result: Up-regulated in Transcription
  misc_feature: MA Experiment 108434 PARAMETER Experiment Name: At_Root_Tips_cDNA_P Parameter: Tissue Value: Root Tips
  misc_feature: MA Experiment ID: 108461 Result: Up-regulated in Transcription
  misc_feature: MA Experiment 108461 PARAMETER Experiment Name: At_Germinating_Seeds_cDNA_P Parameter: Age (day) Value: 1 vs. 0
  misc_feature: MA Experiment 108461 PARAMETER Experiment Name: At_Germinating_Seeds_cDNA_P Parameter: Tissue Value: Germinating Seeds
  misc_feature: MA Experiment ID: 108462 Result: Up-regulated in Transcription
  misc_feature: MA Experiment 108462 PARAMETER Experiment Name: At_Germinating_Seeds_cDNA_P Parameter: Age (day) Value: 2 vs. 0
  misc_feature: MA Experiment 108462 PARAMETER Experiment Name: At_Germinating_Seeds_cDNA_P Parameter: Tissue Value: Germinating Seeds
  misc_feature: MA Experiment ID: 108561 Result: Down-regulated in Transcription
  misc_feature: MA Experiment 108561 PARAMETER Experiment Name: At_100uM_ABA_cDNA_P Parameter: Timepoint (hr) Value: 6
  misc_feature: MA Experiment 108561 PARAMETER Experiment Name: At_100uM_ABA_cDNA_P Parameter: Tissue Value: Aerial
  misc_feature: MA Experiment 108561 PARAMETER Experiment Name: At_100uM_ABA_cDNA_P Parameter: Treatment Value: 100uM ABA vs. No Treatment
  misc_feature: MA Experiment ID: 108573 Result: Down-regulated in Transcription
  misc_feature: MA Experiment 108573 PARAMETER Experiment Name: At_Drought_cDNA_P Parameter: Timepoint (hr) Value: 6
  misc_feature: MA Experiment 108573 PARAMETER Experiment Name: At_Drought_cDNA_P Parameter: Tissue Value: Aerial
  misc_feature: MA Experiment 108573 PARAMETER Experiment Name: At_Drought_cDNA_P Parameter: Treatment Value: Drought vs. No Drought
  misc_feature: MA Experiment ID: 108577 Result: Down-regulated in Transcription
  misc_feature: MA Experiment 108577 PARAMETER Experiment Name: At_42deg_Heat_cDNA_P Parameter: Temperature (deg C) Value: 42 vs. 22
  misc_feature: MA Experiment 108577 PARAMETER Experiment Name: At_42deg_Heat_cDNA_P Parameter: Timepoint (hr) Value: 6
  misc_feature: MA Experiment 108577 PARAMETER Experiment Name: At_42deg_Heat_cDNA_P Parameter: Tissue Value: Aerial
  misc_feature: MA Experiment ID: 108579 Result: Up-regulated in Transcription
  misc_feature: MA Experiment 108579 PARAMETER Experiment Name: At_4deg_Cold_cDNA_P Parameter: Temperature (deg C) Value: 4 vs. 22
  misc_feature: MA Experiment 108579 PARAMETER Experiment Name: At_4deg_Cold_cDNA_P Parameter: Timepoint (hr) Value: 6
  misc_feature: MA Experiment 108579 PARAMETER Experiment Name: At_4deg_Cold_cDNA_P Parameter: Tissue Value: Aerial
  misc_feature: MA Experiment ID: 108585 Result: Down-regulated in Transcription
  misc_feature: MA Experiment 108585 PARAMETER Experiment Name: At_5mM_NaNP_cDNA_P Parameter: Timepoint (hr) Value: 6
  misc_feature: MA Experiment 108585 PARAMETER Experiment Name: At_5mM_NaNP_cDNA_P Parameter: Tissue Value: Aerial
  misc_feature: MA Experiment 108585 PARAMETER Experiment Name: At_5mM_NaNP_cDNA_P Parameter: Treatment Value: null
  misc_feature: MA Experiment ID: 20000069 Result: Down-regulated in Transcription
  misc_feature: MA Experiment 20000069 PARAMETER Experiment Name: At_100uM_ABA_Mutants_cDNA_P Parameter: Plant Line Value: CS23
  misc_feature: MA Experiment 20000069 PARAMETER Experiment Name: At_100uM_ABA_Mutants_cDNA_P Parameter: Timepoint (hr) Value: 6
  misc_feature: MA Experiment 20000069 PARAMETER Experiment Name: At_100uM_ABA_Mutants_cDNA_P Parameter: Tissue Value: Aerial
  misc_feature: MA Experiment 20000069 PARAMETER Experiment Name: At_100uM_ABA_Mutants_cDNA_P Parameter: Treatment Value: 100uM ABA vs. No Treatment
  misc_feature: MA Experiment ID: 20000071 Result: Down-regulated in Transcription
  misc_feature: MA Experiment 20000071 PARAMETER Experiment Name: At_100uM_ABA_Mutants_cDNA_P Parameter: Plant Line Value: CS8104
  misc_feature: MA Experiment 20000071 PARAMETER Experiment Name: At_100uM_ABA_Mutants_cDNA_P Parameter: Timepoint (hr) Value: 6
  misc_feature: MA Experiment 20000071 PARAMETER Experiment Name: At_100uM_ABA_Mutants_cDNA_P Parameter: Tissue Value: Aerial
  misc_feature: MA Experiment 20000071 PARAMETER Experiment Name: At_100uM_ABA_Mutants_cDNA_P Parameter: Treatment Value: 100uM ABA vs. No Treatment
  misc_feature: MA Experiment ID: 20000093 Result: Down-regulated in Transcription
  misc_feature: MA Experiment 20000093 PARAMETER Experiment Name: At_42deg_Heat_cDNA_P Parameter: Temperature (deg C) Value: 42 vs. 22
  misc_feature: MA Experiment 20000093 PARAMETER Experiment Name: At_42deg_Heat_cDNA_P Parameter: Timepoint (hr) Value: 0.5
  misc_feature: MA Experiment 20000093 PARAMETER Experiment Name: At_42deg_Heat_cDNA_P Parameter: Tissue Value: Aerial
  misc_feature: MA Experiment ID: 20000111 Result: Down-regulated in Transcription
  misc_feature: MA Experiment 20000111 PARAMETER Experiment Name: At_42deg_Heat_cDNA_P Parameter: Temperature (deg C) Value: 42 vs. 22
  misc_feature: MA Experiment 20000111 PARAMETER Experiment Name: At_42deg_Heat_cDNA_P Parameter: Timepoint (hr) Value: 6
  misc_feature: MA Experiment 20000111 PARAMETER Experiment Name: At_42deg_Heat_cDNA_P Parameter: Tissue Value: Aerial
  misc_feature: MA Experiment ID: 20000112 Result: Down-regulated in Transcription
  misc_feature: MA Experiment 20000112 PARAMETER Experiment Name: At_42deg_Heat_cDNA_P Parameter: Temperature (deg C) Value: 42 vs. 22
  misc_feature: MA Experiment 20000112 PARAMETER Experiment Name: At_42deg_Heat_cDNA_P Parameter: Timepoint (hr) Value: 2
  misc_feature: MA Experiment 20000112 PARAMETER Experiment Name: At_42deg_Heat_cDNA_P Parameter: Tissue Value: Aerial
  misc_feature: MA Experiment ID: 20000113 Result: Down-regulated in Transcription
  misc_feature: MA Experiment 20000113 PARAMETER Experiment Name: At_42deg_Heat_cDNA_P Parameter: Temperature (deg C) Value: 42 vs. 22
  misc_feature: MA Experiment 20000113 PARAMETER Experiment Name: At_42deg_Heat_cDNA_P Parameter: Timepoint (hr) Value: 8
  misc_feature: MA Experiment 20000113 PARAMETER Experiment Name: At_42deg_Heat_cDNA_P Parameter: Tissue Value: Aerial
  misc_feature: MA Experiment ID: 20000117 Result: Down-regulated in Transcription
  misc_feature: MA Experiment 20000117 PARAMETER Experiment Name: At_100uM_ABA_Mutants_cDNA_P Parameter: Plant Line Value: Columbia
  misc_feature: MA Experiment 20000117 PARAMETER Experiment Name: At_100uM_ABA_Mutants_cDNA_P Parameter: Timepoint (hr) Value: 6
  misc_feature: MA Experiment 20000117 PARAMETER Experiment Name: At_100uM_ABA_Mutants_cDNA_P Parameter: Tissue Value: Aerial
  misc_feature: MA Experiment 20000117 PARAMETER Experiment Name: At_100uM_ABA_Mutants_cDNA_P Parameter: Treatment Value: 100uM ABA vs. No Treatment
  misc_feature: MA Experiment ID: 20000144 Result: Down-regulated in Transcription
  misc_feature: MA Experiment 20000144 PARAMETER Experiment Name: At_42deg_Heat_cDNA_P Parameter: Temperature (deg C) Value: 42 vs. 22
  misc_feature: MA Experiment 20000144 PARAMETER Experiment Name: At_42deg_Heat_cDNA_P Parameter: Timepoint (hr) Value: 1
  misc_feature: MA Experiment 20000144 PARAMETER Experiment Name: At_42deg_Heat_cDNA_P Parameter: Tissue Value: Aerial
  misc_feature: MA Experiment ID: 20000179 Result: Up-regulated in Transcription
  misc_feature: MA Experiment 20000179 PARAMETER Experiment Name: At_Germinating_Seeds_P Parameter: Age (hr) Value: 6 vs. 0
  misc_feature: MA Experiment 20000179 PARAMETER Experiment Name: At_Germinating_Seeds_P Parameter: Tissue Value: Germinating Seeds
  misc_feature: MA Experiment ID: 20000180 Result: Up-regulated in Transcription
  misc_feature: MA Experiment 20000180 PARAMETER Experiment Name: At_Germinating_Seeds_P Parameter: Age (hr) Value: 24 vs. 0
  misc_feature: MA Experiment 20000180 PARAMETER Experiment Name: At_Germinating_Seeds_P Parameter: Tissue Value: Germinating Seeds
  misc_feature: MA Experiment ID: 20000185 Result: Up-regulated in Transcription
  misc_feature: MA Experiment 20000185 PARAMETER Experiment Name: At_Roots__P Parameter: Age (day) Value: 7 vs. 21
  misc_feature: MA Experiment 20000185 PARAMETER Experiment Name: At_Roots__P Parameter: Organism Value: A. thaliana
  misc_feature: MA Experiment 20000185 PARAMETER Experiment Name: At_Roots__P Parameter: Tissue Value: Roots vs. Whole Plant
  misc_feature: MA Experiment ID: 20000234 Result: Up-regulated in Transcription
  misc_feature: MA Experiment 20000234 PARAMETER Experiment Name: At_Siliques_P Parameter: Age (day) Value: 21
  misc_feature: MA Experiment 20000234 PARAMETER Experiment Name: At_Siliques_P Parameter: Organism Value: A. thaliana
  misc_feature: MA Experiment 20000234 PARAMETER Experiment Name: At_Siliques_P Parameter: Plant Line Value: WS
  misc_feature: MA Experiment 20000234 PARAMETER Experiment Name: At_Siliques_P Parameter: Tissue Value: Less Than 5mm Siliques vs. Whole Plant
  misc_feature: MA Experiment ID: 20000264 Result: Up-regulated in Transcription
  misc_feature: MA Experiment 20000264 PARAMETER Experiment Name: At_Open_Flower_P Parameter: Age (day) Value: 21
  misc_feature: MA Experiment 20000264 PARAMETER Experiment Name: At_Open_Flower_P Parameter: Plant Line Value: WS
  misc_feature: MA Experiment 20000264 PARAMETER Experiment Name: At_Open_Flower_P Parameter: Tissue Value: Open Flower vs. Whole Plant
  misc_feature: MA Experiment ID: 20000265 Result: Up-regulated in Transcription
  misc_feature: MA Experiment 20000265 PARAMETER Experiment Name: At_Open_Flower_P Parameter: Age (day) Value: 21
  misc_feature: MA Experiment 20000265 PARAMETER Experiment Name: At_Open_Flower_P Parameter: Plant Line Value: WS
  misc_feature: MA Experiment 20000265 PARAMETER Experiment Name: At_Open_Flower_P Parameter: Tissue Value: Closed Flower vs. Whole Plant
  misc_feature: MA Experiment ID: 20000437 Result: Down-regulated in Transcription
  misc_feature: MA Experiment 20000437 PARAMETER Experiment Name: At_Drought_P Parameter: Age (day) Value: 8
  misc_feature: MA Experiment 20000437 PARAMETER Experiment Name: At_Drought_P Parameter: Organism Value: A. thaliana
  misc_feature: MA Experiment 20000437 PARAMETER Experiment Name: At_Drought_P Parameter: Plant Line Value: WS
  misc_feature: MA Experiment 20000437 PARAMETER Experiment Name: At_Drought_P Parameter: Timepoint (hr) Value: 24
  misc_feature: MA Experiment 20000437 PARAMETER Experiment Name: At_Drought_P Parameter: Tissue Value: Whole Plant
  misc_feature: MA Experiment 20000437 PARAMETER Experiment Name: At_Drought_P Parameter: Treatment Value: Drought vs. No Drought
  misc_feature: MA Experiment ID: 20001248 Result: Down-regulated in Transcription
  misc_feature: MA Experiment 20001248 PARAMETER Experiment Name: At_Far-red-induction_P Parameter: Age (day) Value: 7
  misc_feature: MA Experiment 20001248 PARAMETER Experiment Name: At_Far-red-induction_P Parameter: Light Value: Far-red vs. White
  misc_feature: MA Experiment 20001248 PARAMETER Experiment Name: At_Far-red-induction_P Parameter: Organism Value: A. thaliana
  misc_feature: MA Experiment 20001248 PARAMETER Experiment Name: At_Far-red-induction_P Parameter: Plant Line Value: Columbia
  misc_feature: MA Experiment 20001248 PARAMETER Experiment Name: At_Far-red-induction_P Parameter: Timepoint (hr) Value: 4
  misc_feature: MA Experiment 20001248 PARAMETER Experiment Name: At_Far-red-induction_P Parameter: Tissue Value: Whole Plant
  misc_feature: MA Experiment ID: 20001451 Result: Down-regulated in Transcription
  misc_feature: MA Experiment 20001451 PARAMETER Experiment Name: At_Far-red-induction_P Parameter: Age (day) Value: 7
  misc_feature: MA Experiment 20001451 PARAMETER Experiment Name: At_Far-red-induction_P Parameter: Light Value: Far-red vs. White
  misc_feature: MA Experiment 20001451 PARAMETER Experiment Name: At_Far-red-induction_P Parameter: Organism Value: A. thaliana
  misc_feature: MA Experiment 20001451 PARAMETER Experiment Name: At_Far-red-induction_P Parameter: Plant Line Value: Columbia
  misc_feature: MA Experiment 20001451 PARAMETER Experiment Name: At_Far-red-induction_P Parameter: Timepoint (hr) Value: 24
  misc_feature: MA Experiment 20001451 PARAMETER Experiment Name: At_Far-red-induction_P Parameter: Tissue Value: Whole Plant
  misc_feature: MA Experiment ID: 20001555 Result: Down-regulated in Transcription
  misc_feature: MA Experiment 20001555 PARAMETER Experiment Name: At_Drought_Soil_Dry_P Parameter: Age (day) Value: 24
  misc_feature: MA Experiment 20001555 PARAMETER Experiment Name: At_Drought_Soil_Dry_P Parameter: Organism Value: A. thaliana
  misc_feature: MA Experiment 20001555 PARAMETER Experiment Name: At_Drought_Soil_Dry_P Parameter: Plant Line Value: WS
  misc_feature: MA Experiment 20001555 PARAMETER Experiment Name: At_Drought_Soil_Dry_P Parameter: Post Timepoint (hr) Value: None
  misc_feature: MA Experiment 20001555 PARAMETER Experiment Name: At_Drought_Soil_Dry_P Parameter: Post-Treatment Value: None
  misc_feature: MA Experiment 20001555 PARAMETER Experiment Name: At_Drought_Soil_Dry_P Parameter: Timepoint (day) Value: 10
  misc_feature: MA Experiment 20001555 PARAMETER Experiment Name: At_Drought_Soil_Dry_P Parameter: Treatment Value: Drought vs. No Drought
  misc_feature: MA Experiment ID: 20001556 Result: Down-regulated in Transcription
  misc_feature: MA Experiment 20001556 PARAMETER Experiment Name: At_Drought_Soil_Dry_P Parameter: Age (day) Value: 26
  misc_feature: MA Experiment 20001556 PARAMETER Experiment Name: At_Drought_Soil_Dry_P Parameter: Organism Value: A. thaliana
  misc_feature: MA Experiment 20001556 PARAMETER Experiment Name: At_Drought_Soil_Dry_P Parameter: Plant Line Value: WS
  misc_feature: MA Experiment 20001556 PARAMETER Experiment Name: At_Drought_Soil_Dry_P Parameter: Post Timepoint (hr) Value: None
  misc_feature: MA Experiment 20001556 PARAMETER Experiment Name: At_Drought_Soil_Dry_P Parameter: Post-Treatment Value: None
  misc_feature: MA Experiment 20001556 PARAMETER Experiment Name: At_Drought_Soil_Dry_P Parameter: Timepoint (day) Value: 12
  misc_feature: MA Experiment 20001556 PARAMETER Experiment Name: At_Drought_Soil_Dry_P Parameter: Treatment Value: Drought vs. No Drought
  misc_feature: MA Experiment ID: 20001557 Result: Down-regulated in Transcription
  misc_feature: MA Experiment 20001557 PARAMETER Experiment Name: At_Drought_Soil_Dry_P Parameter: Age (day) Value: 27
  misc_feature: MA Experiment 20001557 PARAMETER Experiment Name: At_Drought_Soil_Dry_P Parameter: Organism Value: A. thaliana
  misc_feature: MA Experiment 20001557 PARAMETER Experiment Name: At_Drought_Soil_Dry_P Parameter: Plant Line Value: WS
  misc_feature: MA Experiment 20001557 PARAMETER Experiment Name: At_Drought_Soil_Dry_P Parameter: Post Timepoint (hr) Value: 3
  misc_feature: MA Experiment 20001557 PARAMETER Experiment Name: At_Drought_Soil_Dry_P Parameter: Post-Treatment Value: Re-Water vs. No Drought
  misc_feature: MA Experiment 20001557 PARAMETER Experiment Name: At_Drought_Soil_Dry_P Parameter: Timepoint (day) Value: 13
  misc_feature: MA Experiment 20001557 PARAMETER Experiment Name: At_Drought_Soil_Dry_P Parameter: Treatment Value: Drought vs. No Drought
  misc_feature: MA Experiment ID: 20001559 Result: Down-regulated in Transcription
  misc_feature: MA Experiment 20001559 PARAMETER Experiment Name: At_Drought_Soil_Dry_P Parameter: Age (day) Value: 28
  misc_feature: MA Experiment 20001559 PARAMETER Experiment Name: At_Drought_Soil_Dry_P Parameter: Organism Value: A. thaliana
  misc_feature: MA Experiment 20001559 PARAMETER Experiment Name: At_Drought_Soil_Dry_P Parameter: Plant Line Value: WS
  misc_feature: MA Experiment 20001559 PARAMETER Experiment Name: At_Drought_Soil_Dry_P Parameter: Post Timepoint (hr) Value: 29
  misc_feature: MA Experiment 20001559 PARAMETER Experiment Name: At_Drought_Soil_Dry_P Parameter: Post-Treatment Value: Re-Water vs. No Drought
  misc_feature: MA Experiment 20001559 PARAMETER Experiment Name: At_Drought_Soil_Dry_P Parameter: Timepoint (day) Value: 14
  misc_feature: MA Experiment 20001559 PARAMETER Experiment Name: At_Drought_Soil_Dry_P Parameter: Treatment Value: Drought vs. No Drought
  misc_feature: MA Experiment ID: 20001905 Result: Down-regulated in Transcription
  misc_feature: MA Experiment 20001905 PARAMETER Experiment Name: At_Drought_Reproduction_P Parameter: Age (day) Value: 40
  misc_feature: MA Experiment 20001905 PARAMETER Experiment Name: At_Drought_Reproduction_P Parameter: Organism Value: A. thaliana
  misc_feature: MA Experiment 20001905 PARAMETER Experiment Name: At_Drought_Reproduction_P Parameter: Plant Line Value: WS
  misc_feature: MA Experiment 20001905 PARAMETER Experiment Name: At_Drought_Reproduction_P Parameter: Timepoint (day) Value: 10
  misc_feature: MA Experiment 20001905 PARAMETER Experiment Name: At_Drought_Reproduction_P Parameter: Tissue Value: Rosettes
  misc_feature: MA Experiment 20001905 PARAMETER Experiment Name: At_Drought_Reproduction_P Parameter: Treatment Value: Drought vs. No Drought
aaaaatcacaaatcttcaacttccgatactttcaatctctctaaactctcaatttcagtaatcgataaccgtagcaatggaatccaccggaaaagtgaagaaagctttcggaggaagaaaaccacctggtgccccaaaaaccaaatcggtttcgaaatcgatgaaagccggtcttcaattcccagtgggaagaatcactcgtttcctgaagaaaggacgatacgctcagagacttggtggtggtgctccggtttacatggccgccgttcttgaatacctcgccgcagaagttctggagcttgctggtaacgctgcgagagataacaagaaatcaaggataattccgaggcatcttcttctcgcgataaggaacgatgaagaattggggaaacttctgagtggtgtcacaatcgctcacggtggtgttttgcctaacatcaactctgttctattgcctaagaagtctgccactaaaccagctgaagaaaaggctaccaaatcaccagtcaagtctccaaagaaagcttaatctgctagagttttcgttgctagtttgtgtttgagctctggtgaatgtagaaatttgaagcttttggatcttagtttctatgtatttggtgatttagaatgttgttcaaaatccttttcctaatcataagaatttatgatctatctattatacgcttcgtctaatcttttggtccactcgtcgtaatgtcattagtgaatatttaataaacaactttgtcatc

SEQ ID NO: 31039 - protein, 150 aa, Arabidopsis thaliana
  peptide (1)..(150): Ceres Seq. ID no. 13487051
  misc_feature (6)..(129): Pfam Name: Core histone H2A/H2B/H3/H4 Pfam Description: Core histone H2A/H2B/H3/H4
  misc_feature (1)..(150): Homolog of NCBI NO: 122006 NR Description: HISTONE H2A
  misc_feature (6)..(150): Homolog of NCBI NO: 121982 NR Description: HISTONE H2A.2.2
  misc_feature (1)..(150): Homolog of NCBI NO: 15241857 NR Description: histone H2A, putative [Arabidopsis thaliana]
  misc_feature (5)..(150): Homolog of NCBI NO: 729671 NR Description: Histone H2A
  misc_feature (1)..(150): Homolog of NCBI NO: 7649159 NR Description: histone H2A [Euphorbia esula]
  misc_feature (5)..(150): Homolog of NCBI NO: 34914498 NR Description: putative histone H2A [Oryza sativa (japonica
  misc_feature (1)..(150): Homolog of NCBI NO: 122003 NR Description: HISTONE H2A
  misc_feature (1)..(150): Homolog of NCBI NO: 27529852 NR Description: H2A histone [Nicotiana tabacum]
  misc_feature (1)..(150): Homolog of NCBI NO: 122007 NR Description: Histone H2A
  misc_feature (1)..(150): Homolog of NCBI NO: 15238549 NR Description: histone H2A, putative [Arabidopsis thaliana]
MESTGKVKKAFGGRKPPGAPKTKSVSKSMKAGLQFPVGRITRFLKKGRYAQRLGGGAPVYMAAVLEYLAAEVLELAGNAARDNKKSRIIPRHLLLAIRNDEELGKLLSGVTIAHGGVLPNINSVLLPKKSATKPAEEKATKSPVKSPKKA

SEQ ID NO: 31040 - protein, 122 aa, Arabidopsis thaliana
  peptide (1)..(122): Ceres Seq. ID no. 13487052
  misc_feature (1)..(101): Pfam Name: Core histone H2A/H2B/H3/H4 Pfam Description: Core histone H2A/H2B/H3/H4
  misc_feature (1)..(122): Homolog of NCBI NO: 122006 NR Description: HISTONE H2A
  misc_feature (1)..(122): Homolog of NCBI NO: 121982 NR Description: HISTONE H2A.2.2
  misc_feature (1)..(122): Homolog of NCBI NO: 15241857 NR Description: histone H2A, putative [Arabidopsis thaliana]
  misc_feature (1)..(122): Homolog of NCBI NO: 729671 NR Description: Histone H2A
  misc_feature (1)..(122): Homolog of NCBI NO: 7649159 NR Description: histone H2A [Euphorbia esula]
  misc_feature (1)..(122): Homolog of NCBI NO: 34914498 NR Description: putative histone H2A [Oryza sativa (japonica
  misc_feature (1)..(122): Homolog of NCBI NO: 122003 NR Description: HISTONE H2A
  misc_feature (1)..(122): Homolog of NCBI NO: 27529852 NR Description: H2A histone [Nicotiana tabacum]
  misc_feature (1)..(122): Homolog of NCBI NO: 122007 NR Description: Histone H2A
  misc_feature (1)..(122): Homolog of NCBI NO: 15238549 NR Description: histone H2A, putative [Arabidopsis thaliana]
MKAGLQFPVGRITRFLKKGRYAQRLGGGAPVYMAAVLEYLAAEVLELAGNAARDNKKSRIIPRHLLLAIRNDEELGKLLSGVTIAHGGVLPNINSVLLPKKSATKPAEEKATKSPVKSPKKA

SEQ ID NO: 31041 - protein, 90 aa, Arabidopsis thaliana
  peptide (1)..(90): Ceres Seq. ID no. 13487053
  misc_feature (1)..(69): Pfam Name: Core histone H2A/H2B/H3/H4 Pfam Description: Core histone H2A/H2B/H3/H4
  misc_feature (1)..(90): Homolog of NCBI NO: 122006 NR Description: HISTONE H2A
  misc_feature (1)..(90): Homolog of NCBI NO: 121982 NR Description: HISTONE H2A.2.2
  misc_feature (1)..(90): Homolog of NCBI NO: 15241857 NR Description: histone H2A, putative [Arabidopsis thaliana]
  misc_feature (1)..(90): Homolog of NCBI NO: 729671 NR Description: Histone H2A
  misc_feature (1)..(90): Homolog of NCBI NO: 7649159 NR Description: histone H2A [Euphorbia esula]
  misc_feature (1)..(90): Homolog of NCBI NO: 34914498 NR Description: putative histone H2A [Oryza sativa (japonica
  misc_feature (1)..(90): Homolog of NCBI NO: 122003 NR Description: HISTONE H2A
  misc_feature (1)..(90): Homolog of NCBI NO: 27529852 NR Description: H2A histone [Nicotiana tabacum]
  misc_feature (1)..(90): Homolog of NCBI NO: 122007 NR Description: Histone H2A
  misc_feature (1)..(90): Homolog of NCBI NO: 15238549 NR Description: histone H2A, putative [Arabidopsis thaliana]
MAAVLEYLAAEVLELAGNAARDNKKSRIIPRHLLLAIRNDEELGKLLSGVTIAHGGVLPNINSVLLPKKSATKPAEEKATKSPVKSPKKA

SEQ ID NO: 31042 - DNA, 1517 bp, Arabidopsis thaliana
  misc_feature (1)..(1517): Ceres Seq. ID no. 12322684
  misc_feature: MA Experiment ID: 108434 Result: Down-regulated in Transcription
  misc_feature: MA Experiment 108434 PARAMETER Experiment Name: At_Root_Tips_cDNA_P Parameter: Tissue Value: Root Tips
  misc_feature: MA Experiment ID: 108462 Result: Up-regulated in Transcription
  misc_feature: MA Experiment 108462 PARAMETER Experiment Name: At_Germinating_Seeds_cDNA_P Parameter: Age (day) Value: 2 vs. 0
  misc_feature: MA Experiment 108462 PARAMETER Experiment Name: At_Germinating_Seeds_cDNA_P Parameter: Tissue Value: Germinating Seeds
  misc_feature: MA Experiment ID: 108463 Result: Up-regulated in Transcription
  misc_feature: MA Experiment 108463 PARAMETER Experiment Name: At_Germinating_Seeds_cDNA_P Parameter: Age (day) Value: 3 vs. 0
  misc_feature: MA Experiment 108463 PARAMETER Experiment Name: At_Germinating_Seeds_cDNA_P Parameter: Tissue Value: Germinating Seeds
  misc_feature: MA Experiment ID: 108464 Result: Up-regulated in Transcription
  misc_feature: MA Experiment 108464 PARAMETER Experiment Name: At_Germinating_Seeds_cDNA_P Parameter: Age (day) Value: 4 vs. 0
  misc_feature: MA Experiment 108464 PARAMETER Experiment Name: At_Germinating_Seeds_cDNA_P Parameter: Tissue Value: Germinating Seeds
  misc_feature: MA Experiment ID: 108488 Result: Down-regulated in Transcription
  misc_feature: MA Experiment ID: 108561 Result: Up-regulated in Transcription
  misc_feature: MA Experiment 108561 PARAMETER Experiment Name: At_100uM_ABA_cDNA_P Parameter: Timepoint (hr) Value: 6
  misc_feature: MA Experiment 108561 PARAMETER Experiment Name: At_100uM_ABA_cDNA_P Parameter: Tissue Value: Aerial
  misc_feature: MA Experiment 108561 PARAMETER Experiment Name: At_100uM_ABA_cDNA_P Parameter: Treatment Value: 100uM ABA vs. No Treatment
  misc_feature: MA Experiment ID: 108572 Result: Up-regulated in Transcription
  misc_feature: MA Experiment 108572 PARAMETER Experiment Name: At_Drought_cDNA_P Parameter: Timepoint (hr) Value: 1
  misc_feature: MA Experiment 108572 PARAMETER Experiment Name: At_Drought_cDNA_P Parameter: Tissue Value: Aerial
  misc_feature: MA Experiment 108572 PARAMETER Experiment Name: At_Drought_cDNA_P Parameter: Treatment Value: Drought vs. No Drought
  misc_feature: MA Experiment ID: 108573 Result: Up-regulated in Transcription
  misc_feature: MA Experiment 108573 PARAMETER Experiment Name: At_Drought_cDNA_P Parameter: Timepoint (hr) Value: 6
  misc_feature: MA Experiment 108573 PARAMETER Experiment Name: At_Drought_cDNA_P Parameter: Tissue Value: Aerial
  misc_feature: MA Experiment 108573 PARAMETER Experiment Name: At_Drought_cDNA_P Parameter: Treatment Value: Drought vs. No Drought
  misc_feature: MA Experiment ID: 108574 Result: Up-regulated in Transcription
  misc_feature: MA Experiment 108574 PARAMETER Experiment Name: At_Wounding__cDNA_P Parameter: Timepoint (hr) Value: 1
  misc_feature: MA Experiment 108574 PARAMETER Experiment Name: At_Wounding__cDNA_P Parameter: Tissue Value: Aerial
  misc_feature: MA Experiment 108574 PARAMETER Experiment Name: At_Wounding__cDNA_P Parameter: Treatment Value: Wounding vs. No Wounding
  misc_feature: MA Experiment ID: 108576 Result: Up-regulated in Transcription
  misc_feature: MA Experiment 108576 PARAMETER Experiment Name: At_42deg_Heat_cDNA_P Parameter: Temperature (deg C) Value: 42 vs. 22
  misc_feature: MA Experiment 108576 PARAMETER Experiment Name: At_42deg_Heat_cDNA_P Parameter: Timepoint (hr) Value: 1
  misc_feature: MA Experiment 108576 PARAMETER Experiment Name: At_42deg_Heat_cDNA_P Parameter: Tissue Value: Aerial
  misc_feature: MA Experiment ID: 108577 Result: Up-regulated in Transcription
  misc_feature: MA Experiment 108577 PARAMETER Experiment Name: At_42deg_Heat_cDNA_P Parameter: Temperature (deg C) Value: 42 vs. 22
  misc_feature: MA Experiment 108577 PARAMETER Experiment Name: At_42deg_Heat_cDNA_P Parameter: Timepoint (hr) Value: 6
  misc_feature: MA Experiment 108577 PARAMETER Experiment Name: At_42deg_Heat_cDNA_P Parameter: Tissue Value: Aerial
  misc_feature: MA Experiment ID: 108585 Result: Up-regulated in Transcription
  misc_feature: MA Experiment 108585 PARAMETER Experiment Name: At_5mM_NaNP_cDNA_P Parameter: Timepoint (hr) Value: 6
  misc_feature: MA Experiment 108585 PARAMETER Experiment Name: At_5mM_NaNP_cDNA_P Parameter: Tissue Value: Aerial
  misc_feature: MA Experiment 108585 PARAMETER Experiment Name: At_5mM_NaNP_cDNA_P Parameter: Treatment Value: null
  misc_feature: MA Experiment ID: 108595 Result: Up-regulated in Transcription
  misc_feature: MA Experiment 108595 PARAMETER Experiment Name: At_Ler-pi_Ovule_cDNA_P Parameter: Plant Line Value: null
  misc_feature: MA Experiment ID: 108608 Result: Up-regulated in Transcription
  misc_feature: MA Experiment 108608 PARAMETER Experiment Name: At_100uM_ABA_cDNA_P Parameter: Timepoint (hr) Value: 1
  misc_feature: MA Experiment 108608 PARAMETER Experiment Name: At_100uM_ABA_cDNA_P Parameter: Tissue Value: Aerial
  misc_feature: MA Experiment 108608 PARAMETER Experiment Name: At_100uM_ABA_cDNA_P Parameter: Treatment Value: 100uM ABA vs. No Treatment
  misc_feature: MA Experiment ID: 108668 Result: Up-regulated in Transcription
  misc_feature: MA Experiment 108668 PARAMETER Experiment Name: At_2mM_SA_cDNA_P Parameter: Plant Line Value: WS
  misc_feature: MA Experiment 108668 PARAMETER Experiment Name: At_2mM_SA_cDNA_P Parameter: Timepoint (hr) Value: 6
  misc_feature: MA Experiment 108668 PARAMETER Experiment Name: At_2mM_SA_cDNA_P Parameter: Treatment Value: 2mM SA vs. No Treatment
  misc_feature: MA Experiment ID: 20000093 Result: Up-regulated in Transcription
  misc_feature: MA Experiment 20000093 PARAMETER Experiment Name: At_42deg_Heat_cDNA_P Parameter: Temperature (deg C) Value: 42 vs. 22
  misc_feature: MA Experiment 20000093 PARAMETER Experiment Name: At_42deg_Heat_cDNA_P Parameter: Timepoint (hr) Value: 0.5
  misc_feature: MA Experiment 20000093 PARAMETER Experiment Name: At_42deg_Heat_cDNA_P Parameter: Tissue Value: Aerial
  misc_feature: MA Experiment ID: 20000111 Result: Up-regulated in Transcription
  misc_feature: MA Experiment 20000111 PARAMETER Experiment Name: At_42deg_Heat_cDNA_P Parameter: Temperature (deg C) Value: 42 vs. 22
  misc_feature: MA Experiment 20000111 PARAMETER Experiment Name: At_42deg_Heat_cDNA_P Parameter: Timepoint (hr) Value: 6
  misc_feature: MA Experiment 20000111 PARAMETER Experiment Name: At_42deg_Heat_cDNA_P Parameter: Tissue Value: Aerial
  misc_feature: MA Experiment ID: 20000112 Result: Up-regulated in Transcription
  misc_feature: MA Experiment 20000112 PARAMETER Experiment Name: At_42deg_Heat_cDNA_P Parameter: Temperature (deg C) Value: 42 vs. 22
  misc_feature: MA Experiment 20000112 PARAMETER Experiment Name: At_42deg_Heat_cDNA_P Parameter: Timepoint (hr) Value: 2
  misc_feature: MA Experiment 20000112 PARAMETER Experiment Name: At_42deg_Heat_cDNA_P Parameter: Tissue Value: Aerial
  misc_feature: MA Experiment ID: 20000113 Result: Up-regulated in Transcription
  misc_feature: MA Experiment 20000113 PARAMETER Experiment Name: At_42deg_Heat_cDNA_P Parameter: Temperature (deg C) Value: 42 vs. 22
  misc_feature: MA Experiment 20000113 PARAMETER Experiment Name: At_42deg_Heat_cDNA_P Parameter: Timepoint (hr) Value: 8
  misc_feature: MA Experiment 20000113 PARAMETER Experiment Name: At_42deg_Heat_cDNA_P Parameter: Tissue Value: Aerial
  misc_feature: MA Experiment ID: 20000144 Result: Up-regulated in Transcription
  misc_feature: MA Experiment 20000144 PARAMETER Experiment Name: At_42deg_Heat_cDNA_P Parameter: Temperature (deg C) Value: 42 vs. 22
  misc_feature: MA Experiment 20000144 PARAMETER Experiment Name: At_42deg_Heat_cDNA_P Parameter: Timepoint (hr) Value: 1
  misc_feature: MA Experiment 20000144 PARAMETER Experiment Name: At_42deg_Heat_cDNA_P Parameter: Tissue Value: Aerial
  misc_feature: MA Experiment ID: 20000166 Result: Up-regulated in Transcription
  misc_feature: MA Experiment 20000166 PARAMETER Experiment Name: At_100uM_ABA_P Parameter: Age (day) Value: 14
  misc_feature: MA Experiment 20000166 PARAMETER Experiment Name: At_100uM_ABA_P Parameter: Organism Value: A. thaliana
  misc_feature: MA Experiment 20000166 PARAMETER Experiment Name: At_100uM_ABA_P Parameter: Plant Line Value: WS
  misc_feature: MA Experiment 20000166 PARAMETER Experiment Name: At_100uM_ABA_P Parameter: Timepoint (hr) Value: 1
  misc_feature: MA Experiment 20000166 PARAMETER Experiment Name: At_100uM_ABA_P Parameter: Tissue Value: Aerial
  misc_feature: MA Experiment 20000166 PARAMETER Experiment Name: At_100uM_ABA_P Parameter: Treatment Value: 100uM ABA vs. No Treatment
  misc_feature: MA Experiment ID: 20000171 Result: Up-regulated in Transcription
  misc_feature: MA Experiment 20000171 PARAMETER Experiment Name: At_42deg_Heat_P Parameter: Age (day) Value: 14
  misc_feature: MA Experiment 20000171 PARAMETER Experiment Name: At_42deg_Heat_P Parameter: Organism Value: A. thaliana
  misc_feature: MA Experiment 20000171 PARAMETER Experiment Name: At_42deg_Heat_P Parameter: Plant Line Value: WS
  misc_feature: MA Experiment 20000171 PARAMETER Experiment Name: At_42deg_Heat_P Parameter: Temperature (deg C) Value: 42 vs. 22
  misc_feature: MA Experiment 20000171 PARAMETER Experiment Name: At_42deg_Heat_P Parameter: Timepoint (hr) Value: 1
  misc_feature: MA Experiment 20000171 PARAMETER Experiment Name: At_42deg_Heat_P Parameter: Tissue Value: Aerial
  misc_feature: MA Experiment ID: 20000173 Result: Up-regulated in Transcription
  misc_feature: MA Experiment 20000173 PARAMETER Experiment Name: At_42deg_Heat_P Parameter: Age (day) Value: 14
  misc_feature: MA Experiment 20000173 PARAMETER Experiment Name: At_42deg_Heat_P Parameter: Organism Value: A. thaliana
  misc_feature: MA Experiment 20000173 PARAMETER Experiment Name: At_42deg_Heat_P Parameter: Plant Line Value: WS
  misc_feature: MA Experiment 20000173 PARAMETER Experiment Name: At_42deg_Heat_P Parameter: Temperature (deg C) Value: 42 vs. 22
  misc_feature: MA Experiment 20000173 PARAMETER Experiment Name: At_42deg_Heat_P Parameter: Timepoint (hr) Value: 6
  misc_feature: MA Experiment 20000173 PARAMETER Experiment Name: At_42deg_Heat_P Parameter: Tissue Value: Aerial
  misc_feature: MA Experiment ID: 20000182 Result: Up-regulated in Transcription
  misc_feature: MA Experiment 20000182 PARAMETER Experiment Name: At_2mM_SA_P Parameter: Age (day) Value: 14
  misc_feature: MA Experiment 20000182 PARAMETER Experiment Name: At_2mM_SA_P Parameter: Organism Value: A. thaliana
  misc_feature: MA Experiment 20000182 PARAMETER Experiment Name: At_2mM_SA_P Parameter: Plant Line Value: WS
  misc_feature: MA Experiment 20000182 PARAMETER Experiment Name: At_2mM_SA_P Parameter: Timepoint (hr) Value: 6
  misc_feature: MA Experiment 20000182 PARAMETER Experiment Name: At_2mM_SA_P Parameter: Tissue Value: Aerial
  misc_feature: MA Experiment 20000182 PARAMETER Experiment Name: At_2mM_SA_P Parameter: Treatment Value: 2mM SA vs. No Treatment
  misc_feature: MA Experiment ID: 20000184 Result: Down-regulated in Transcription
  misc_feature: MA Experiment 20000184 PARAMETER Experiment Name: At_Shoots__P Parameter: Age (day) Value: 7
  misc_feature: MA Experiment 20000184 PARAMETER Experiment Name: At_Shoots__P Parameter: Tissue Value: Shoots vs. Whole Plant
  misc_feature: MA Experiment ID: 20000234 Result: Down-regulated in Transcription
  misc_feature: MA Experiment 20000234 PARAMETER Experiment Name: At_Siliques_P Parameter: Age (day) Value: 21
  misc_feature: MA Experiment 20000234 PARAMETER Experiment Name: At_Siliques_P Parameter: Organism Value: A. thaliana
  misc_feature: MA Experiment 20000234 PARAMETER Experiment Name: At_Siliques_P Parameter: Plant Line Value: WS
  misc_feature: MA Experiment 20000234 PARAMETER Experiment Name: At_Siliques_P Parameter: Tissue Value: Less Than 5mm Siliques vs. Whole Plant
  misc_feature: MA Experiment ID: 20000265 Result: Down-regulated in Transcription
  misc_feature: MA Experiment 20000265 PARAMETER Experiment Name: At_Open_Flower_P Parameter: Age (day) Value: 21
  misc_feature: MA Experiment 20000265 PARAMETER Experiment Name: At_Open_Flower_P Parameter: Plant Line Value: WS
  misc_feature: MA Experiment 20000265 PARAMETER Experiment Name: At_Open_Flower_P Parameter: Tissue Value: Closed Flower vs. Whole Plant
  misc_feature: MA Experiment ID: 20000286 Result: Down-regulated in Transcription
  misc_feature: MA Experiment 20000286 PARAMETER Experiment Name: At_Open_Flower_P Parameter: Age (day) Value: 21
  misc_feature: MA Experiment 20000286 PARAMETER Experiment Name: At_Open_Flower_P Parameter: Plant Line Value: WS
  misc_feature: MA Experiment 20000286 PARAMETER Experiment Name: At_Open_Flower_P Parameter: Tissue Value: Half Open vs. Whole Plant
  misc_feature: MA Experiment ID: 20000436 Result: Up-regulated in Transcription
  misc_feature: MA Experiment 20000436 PARAMETER Experiment Name: At_Drought_P Parameter: Age (day) Value: 7
  misc_feature: MA Experiment 20000436 PARAMETER Experiment Name: At_Drought_P Parameter: Organism Value: A. thaliana
  misc_feature: MA Experiment 20000436 PARAMETER Experiment Name: At_Drought_P Parameter: Plant Line Value: WS
  misc_feature: MA Experiment 20000436 PARAMETER Experiment Name: At_Drought_P Parameter: Timepoint (hr) Value: 12
  misc_feature: MA Experiment 20000436 PARAMETER Experiment Name: At_Drought_P Parameter: Tissue Value: Whole Plant
  misc_feature: MA Experiment 20000436 PARAMETER Experiment Name: At_Drought_P Parameter: Treatment Value: Drought vs. No Drought
  misc_feature: MA Experiment ID: 20000437 Result: Up-regulated in Transcription
  misc_feature: MA Experiment 20000437 PARAMETER Experiment Name: At_Drought_P Parameter: Age (day) Value: 8
  misc_feature: MA Experiment 20000437 PARAMETER Experiment Name: At_Drought_P Parameter: Organism Value: A. thaliana
  misc_feature: MA Experiment 20000437 PARAMETER Experiment Name: At_Drought_P Parameter: Plant Line Value: WS
  misc_feature: MA Experiment 20000437 PARAMETER Experiment Name: At_Drought_P Parameter: Timepoint (hr) Value: 24
  misc_feature: MA Experiment 20000437 PARAMETER Experiment Name: At_Drought_P Parameter: Tissue Value: Whole Plant
  misc_feature: MA Experiment 20000437 PARAMETER Experiment Name: At_Drought_P Parameter: Treatment Value: Drought vs. No Drought
  misc_feature: MA Experiment ID: 20000438 Result: Down-regulated in Transcription
  misc_feature: MA Experiment 20000438 PARAMETER Experiment Name: At_Shoots__P Parameter: Age (day) Value: 14
  misc_feature: MA Experiment 20000438 PARAMETER Experiment Name: At_Shoots__P Parameter: Tissue Value: Shoots vs. Whole Plant
  misc_feature: MA Experiment ID: 20000495 Result: Down-regulated in Transcription
  misc_feature: MA Experiment 20000495 PARAMETER Experiment Name: At_Guard_Cells_P Parameter: Harvest Date Value: 8/2/2002
  misc_feature: MA Experiment 20000495 PARAMETER Experiment Name: At_Guard_Cells_P Parameter: Organism Value: A. thaliana
  misc_feature: MA Experiment 20000495 PARAMETER Experiment Name: At_Guard_Cells_P Parameter: Tissue Value: Guard Cells vs. Leaves
  misc_feature: MA Experiment ID: 20000794 Result: Up-regulated in Transcription
  misc_feature: MA Experiment 20000794 PARAMETER Experiment Name: At_Petals_P Parameter: Age (day) Value: 23-25 days
  misc_feature: MA Experiment 20000794 PARAMETER Experiment Name: At_Petals_P Parameter: Plant Line Value: WS
  misc_feature: MA Experiment 20000794 PARAMETER Experiment Name: At_Petals_P Parameter: Tissue Value: Petals vs. Whole plant
  misc_feature: MA Experiment ID: 20001554 Result: Up-regulated in Transcription
  misc_feature: MA Experiment 20001554 PARAMETER Experiment Name: At_Drought_Soil_Dry_P Parameter: Age (day) Value: 21
  misc_feature: MA Experiment 20001554 PARAMETER Experiment Name: At_Drought_Soil_Dry_P Parameter: Organism Value: A. thaliana
  misc_feature: MA Experiment 20001554 PARAMETER Experiment Name: At_Drought_Soil_Dry_P Parameter: Plant Line Value: WS
  misc_feature: MA Experiment 20001554 PARAMETER Experiment Name: At_Drought_Soil_Dry_P Parameter: Post Timepoint (hr) Value: None
  misc_feature: MA Experiment 20001554 PARAMETER Experiment Name: At_Drought_Soil_Dry_P Parameter: Post-Treatment Value: None
  misc_feature: MA Experiment 20001554 PARAMETER Experiment Name: At_Drought_Soil_Dry_P Parameter: Timepoint (day) Value: 7
  misc_feature: MA Experiment 20001554 PARAMETER Experiment Name: At_Drought_Soil_Dry_P Parameter: Treatment Value: Drought vs. No Drought
  misc_feature: MA Experiment ID: 20001555 Result: Up-regulated in Transcription
  misc_feature: MA Experiment 20001555 PARAMETER Experiment Name: At_Drought_Soil_Dry_P Parameter: Age (day) Value: 24
  misc_feature: MA Experiment 20001555 PARAMETER Experiment Name: At_Drought_Soil_Dry_P Parameter: Organism Value: A. thaliana
  misc_feature: MA Experiment 20001555 PARAMETER Experiment Name: At_Drought_Soil_Dry_P Parameter: Plant Line Value: WS
  misc_feature: MA Experiment 20001555 PARAMETER Experiment Name: At_Drought_Soil_Dry_P Parameter: Post Timepoint (hr) Value: None
  misc_feature: MA Experiment 20001555 PARAMETER Experiment Name: At_Drought_Soil_Dry_P Parameter: Post-Treatment Value: None
  misc_feature: MA Experiment 20001555 PARAMETER Experiment Name: At_Drought_Soil_Dry_P Parameter: Timepoint (day) Value: 10
  misc_feature: MA Experiment 20001555 PARAMETER Experiment Name: At_Drought_Soil_Dry_P Parameter: Treatment Value: Drought vs. No Drought
  misc_feature: MA Experiment ID: 20001904 Result: Up-regulated in Transcription
  misc_feature: MA Experiment 20001904 PARAMETER Experiment Name: At_Drought_Reproduction_P Parameter: Age (day) Value: 37
  misc_feature: MA Experiment 20001904 PARAMETER Experiment Name: At_Drought_Reproduction_P Parameter: Organism Value: A. thaliana
  misc_feature: MA Experiment 20001904 PARAMETER Experiment Name: At_Drought_Reproduction_P Parameter: Plant Line Value: WS
  misc_feature: MA Experiment 20001904 PARAMETER Experiment Name: At_Drought_Reproduction_P Parameter: Timepoint (day) Value: 7
  misc_feature: MA Experiment 20001904 PARAMETER Experiment Name: At_Drought_Reproduction_P Parameter: Tissue Value: Rosettes
  misc_feature: MA Experiment 20001904 PARAMETER Experiment Name: At_Drought_Reproduction_P Parameter: Treatment Value: Drought vs. No Drought
  misc_feature: MA Experiment ID: 20001905 Result: Up-regulated in Transcription
  misc_feature: MA Experiment 20001905 PARAMETER Experiment Name: At_Drought_Reproduction_P Parameter: Age (day) Value: 40
  misc_feature: MA Experiment 20001905 PARAMETER Experiment Name: At_Drought_Reproduction_P Parameter: Organism Value: A. thaliana
  misc_feature: MA Experiment 20001905 PARAMETER Experiment Name: At_Drought_Reproduction_P Parameter: Plant Line Value: WS
  misc_feature: MA Experiment 20001905 PARAMETER Experiment Name: At_Drought_Reproduction_P Parameter: Timepoint (day) Value: 10
  misc_feature: MA Experiment 20001905 PARAMETER Experiment Name: At_Drought_Reproduction_P Parameter: Tissue Value: Rosettes
  misc_feature: MA Experiment 20001905 PARAMETER Experiment Name: At_Drought_Reproduction_P Parameter: Treatment Value: Drought vs. No Drought
  misc_feature: MA Experiment ID: 20001906 Result: Up-regulated in Transcription
  misc_feature: MA Experiment 20001906 PARAMETER Experiment Name: At_Drought_Reproduction_P Parameter: Age (day) Value: 35
  misc_feature: MA Experiment 20001906 PARAMETER Experiment Name: At_Drought_Reproduction_P Parameter: Organism Value: A. thaliana
  misc_feature: MA Experiment 20001906 PARAMETER Experiment Name: At_Drought_Reproduction_P Parameter: Plant Line Value: WS
  misc_feature: MA Experiment 20001906 PARAMETER Experiment Name: At_Drought_Reproduction_P Parameter: Timepoint (day) Value: 5
  misc_feature: MA Experiment 20001906 PARAMETER Experiment Name: At_Drought_Reproduction_P Parameter: Tissue Value: Siliques
  misc_feature: MA Experiment 20001906 PARAMETER Experiment Name: At_Drought_Reproduction_P Parameter: Treatment Value: Drought vs. No Drought
  misc_feature: MA Experiment ID: 20001908 Result: Up-regulated in Transcription
  misc_feature: MA Experiment 20001908 PARAMETER Experiment Name: At_Drought_Reproduction_P Parameter: Age (day) Value: 40
  misc_feature: MA Experiment 20001908 PARAMETER Experiment Name: At_Drought_Reproduction_P Parameter: Organism Value: A. thaliana
  misc_feature: MA Experiment 20001908 PARAMETER Experiment Name: At_Drought_Reproduction_P Parameter: Plant Line Value: WS
  misc_feature: MA Experiment 20001908 PARAMETER Experiment Name: At_Drought_Reproduction_P Parameter: Timepoint (day) Value: 10
  misc_feature: MA Experiment 20001908 PARAMETER Experiment Name: At_Drought_Reproduction_P Parameter: Tissue Value: Siliques
  misc_feature: MA Experiment 20001908 PARAMETER Experiment Name: At_Drought_Reproduction_P Parameter: Treatment Value: Drought vs. No Drought
  misc_feature: MA Experiment ID: 20001911 Result: Up-regulated in Transcription
  misc_feature: MA Experiment 20001911 PARAMETER Experiment Name: At_Drought_Reproduction_P Parameter: Age (day) Value: 40
  misc_feature: MA Experiment 20001911 PARAMETER Experiment Name: At_Drought_Reproduction_P Parameter: Organism Value: A. thaliana
  misc_feature: MA Experiment 20001911 PARAMETER Experiment Name: At_Drought_Reproduction_P Parameter: Plant Line Value: WS
  misc_feature: MA Experiment 20001911 PARAMETER Experiment Name: At_Drought_Reproduction_P Parameter: Timepoint (day) Value: 10
  misc_feature: MA Experiment 20001911 PARAMETER Experiment Name: At_Drought_Reproduction_P Parameter: Tissue Value: Flowers
  misc_feature: MA Experiment 20001911 PARAMETER Experiment Name: At_Drought_Reproduction_P Parameter: Treatment Value: Drought vs. No Drought
aattttcgttgaacacaagtgacgaatttgagagagaaaaaaaaagaaaatcagagataaagaatttgagtttcttggaattaaaggatcgattttgttgaagtgaaattgaaattgattgtgaaagagaaagagactgatggtagcagaagcagaggttgtgtttcaacagagtttaccggcggttctggagattgagttgtttgacggagtttcctccgccgttaaatctcccgtttcttctccgaaattgggttttactcagtcaacggcgtcggtttccggaagtttaacgacttctcctgtggctgatatctttccagagggtgattgcgatcctagtgtcttggattatattccgaccatccggtctggaagctttgctgatattgggccaaagagaaacatggaagatgaacacattcgcatagacgatttatcttctcaagttggttccctttttgagttgccgaagcctagtgctttctatgcggtttttgacgggcatggaggaccagaagcagcagcatacgtacgggaaaatgccattaggtttttctttgaagatgagcagtttccacagacatcggaagtgagtagtgtttatgtggaagaagttgagacttcattgagaaatgcgtttcttcaagctgatctagctttggcagaggattgcagtatcagcgattcttgtggtaccaccgctctgactgctcttatttgtggaagactcttaatggttgcaaatgccggagactgcagagcggttctatgcaggaaaggcagagcgatagacatgtctgaagaccataaaccgattaatctacttgagagaagaagagtggaggaatccggcggtttcatcactaatgacggttacctaaatgaagtcctagctgtaacccgagctctgggcgactgggatttaaaactgccacacggctctcaatctccactgatctcggaaccagaaatcaagcagataactctaactgaagacgatgagtttcttgtgattgggtgcgatgggatttgggatgtcttgacgagccaagaagcggttagcattgttaggcgtggcttaaaccggcacaacgatccaacaagatgtgcgcgagagctagtgatggaggctctggggcggaactcatttgataatttaactgcggtggtggtatgtttcatgacaatggacagaggggacaagccggtggtgccattggagaagagaaggtgttttagtctttcgcctgaagctttctgtagcttgaggaatctgttggatggctgaaactagtgtgttttctggtgaaaaccgatgattatataattgatgatgacgaataatctctcccacggctgcttttgtatttagagattttacgcagctgagagaactcttttgagatatacttgtgtattaagtgtgtttgttgtgtgcacagtatgcgattacagttttgtgtacatacatactgttagttgtctatgaataacgaaaaagaaaagattaagtg

SEQ ID NO: 31043 - protein, 383 aa, Arabidopsis thaliana
  peptide (1)..(383): Ceres Seq. ID no. 12322685
  misc_feature (76)..(341): Pfam Name: Protein phosphatase 2C Pfam Description: Protein phosphatase 2C
  misc_feature (50)..(383): Homolog of NCBI NO: 15224766 NR Description: protein phosphatase 2C (PP2C)
  misc_feature (71)..(383): Homolog of NCBI NO: 15226152 NR Description: protein phosphatase 2C (PP2C)
  misc_feature (72)..(382): Homolog of NCBI NO: 10140768 NR Description: putative protein phosphatase-2C [Oryza sativa]
  misc_feature (14)..(382): Homolog of NCBI NO: 37536524 NR Description: putative protein phosphatase-2C
  misc_feature (69)..(383): Homolog of NCBI NO: 30684431 NR Description: protein phosphatase 2C (PP2C) -related
  misc_feature (68)..(383): Homolog of NCBI NO: 15221047 NR Description: protein phosphatase-2C, putative; protein id:
  misc_feature (1)..(382): Homolog of NCBI NO: 34894410 NR Description: putative protein phosphatase
  misc_feature (24)..(383): Homolog of NCBI NO: 25352221 NR Description: phosphoprotein phosphatase (EC 3.1.3.16) 2C
  misc_feature (1)..(383): Homolog of NCBI NO: 30695577 NR Description: protein phosphatase 2C (PP2C), putative
  misc_feature (1)..(383): Homolog of NCBI NO: 15228717 NR Description: protein phosphatase 2C (PP2C)
MVAEAEVVFQQSLPAVLEIELFDGVSSAVKSPVSSPKLGFTQSTASVSGSLTTSPVADIFPEGDCDPSVLDYIPTIRSGSFADIGPKRNMEDEHIRIDDLSSQVGSLFELPKPSAFYAVFDGHGGPEAAAYVRENAIRFFFEDEQFPQTSEVSSVYVEEVETSLRNAFLQADLALAEDCSISDSCGTTALTALICGRLLMVANAGDCRAVLCRKGRAIDMSEDHKPINLLERRRVEESGGFITNDGYLNEVLAVTRALGDWDLKLPHGSQSPLISEPEIKQITLTEDDEFLVIGCDGIWDVLTSQEAVSIVRRGLNRHNDPTRCARELVMEALGRNSFDNLTAVVVCFMTMDRGDKPVVPLEKRRCFSLSPEAFCSLRNLLDG

SEQ ID NO: 31044 - protein, 294 aa, Arabidopsis thaliana
  peptide (1)..(294): Ceres Seq. ID no. 12322686
  misc_feature (1)..(252): Pfam Name: Protein phosphatase 2C Pfam Description: Protein phosphatase 2C
  misc_feature (1)..(294): Homolog of NCBI NO: 15224766 NR Description: protein phosphatase 2C (PP2C)
  misc_feature (1)..(294): Homolog of NCBI NO: 15226152 NR Description: protein phosphatase 2C (PP2C)
  misc_feature (1)..(293): Homolog of NCBI NO: 10140768 NR Description: putative protein phosphatase-2C [Oryza sativa]
  misc_feature (1)..(293): Homolog of NCBI NO: 37536524 NR Description: putative protein phosphatase-2C
  misc_feature (1)..(294): Homolog of NCBI NO: 30684431 NR Description: protein phosphatase 2C (PP2C) -related
  misc_feature (1)..(294): Homolog of NCBI NO: 15221047 NR Description: protein phosphatase-2C, putative; protein id:
  misc_feature (1)..(293): Homolog of NCBI NO: 34894410 NR Description: putative protein phosphatase
  misc_feature (1)..(294): Homolog of NCBI NO: 25352221 NR Description: phosphoprotein phosphatase (EC 3.1.3.16) 2C
  misc_feature (1)..(294): Homolog of NCBI NO: 30695577 NR Description: protein phosphatase 2C (PP2C), putative
  misc_feature (1)..(294): Homolog of NCBI NO: 15228717 NR Description: protein phosphatase 2C (PP2C)
MEDEHIRIDDLSSQVGSLFELPKPSAFYAVFDGHGGPEAAAYVRENAIRFFFEDEQFPQTSEVSSVYVEEVETSLRNAFLQADLALAEDCSISDSCGTTALTALICGRLLMVANAGDCRAVLCRKGRAIDMSEDHKPINLLERRRVEESGGFITNDGYLNEVLAVTRALGDWDLKLPHGSQSPLISEPEIKQITLTEDDEFLVIGCDGIWDVLTSQEAVSIVRRGLNRHNDPTRCARELVMEALGRNSFDNLTAVVVCFMTMDRGDKPVVPLEKRRCFSLSPEAFCSLRNLLDG

SEQ ID NO: 31045 - DNA, 860 bp, Arabidopsis thaliana
  misc_feature (1)..(860): Ceres Seq. ID no. 13591956
  misc_feature: MA Experiment ID: 108561 Result: Down-regulated in Transcription
  misc_feature: MA Experiment 108561 PARAMETER Experiment Name: At_100uM_ABA_cDNA_P Parameter: Timepoint (hr) Value: 6
  misc_feature: MA Experiment 108561 PARAMETER Experiment Name: At_100uM_ABA_cDNA_P Parameter: Tissue Value: Aerial
  misc_feature: MA Experiment 108561 PARAMETER Experiment Name: At_100uM_ABA_cDNA_P Parameter: Treatment Value: 100uM ABA vs. No Treatment
  misc_feature: MA Experiment ID: 108572 Result: Down-regulated in Transcription
  misc_feature: MA Experiment 108572 PARAMETER Experiment Name: At_Drought_cDNA_P Parameter: Timepoint (hr) Value: 1
  misc_feature: MA Experiment 108572 PARAMETER Experiment Name: At_Drought_cDNA_P Parameter: Tissue Value: Aerial
  misc_feature: MA Experiment 108572 PARAMETER Experiment Name: At_Drought_cDNA_P Parameter: Treatment Value: Drought vs. No Drought
  misc_feature: MA Experiment ID: 108573 Result: Down-regulated in Transcription
  misc_feature: MA Experiment 108573 PARAMETER Experiment Name: At_Drought_cDNA_P Parameter: Timepoint (hr) Value: 6
  misc_feature: MA Experiment 108573 PARAMETER Experiment Name: At_Drought_cDNA_P Parameter: Tissue Value: Aerial
  misc_feature: MA Experiment 108573 PARAMETER Experiment Name: At_Drought_cDNA_P Parameter: Treatment Value: Drought vs. No Drought
  misc_feature: MA Experiment ID: 108577 Result: Down-regulated in Transcription
  misc_feature: MA Experiment 108577 PARAMETER Experiment Name: At_42deg_Heat_cDNA_P Parameter: Temperature (deg C) Value: 42 vs. 22
  misc_feature: MA Experiment 108577 PARAMETER Experiment Name: At_42deg_Heat_cDNA_P Parameter: Timepoint (hr) Value: 6
  misc_feature: MA Experiment 108577 PARAMETER Experiment Name: At_42deg_Heat_cDNA_P Parameter: Tissue Value: Aerial
  misc_feature: MA Experiment ID: 108595 Result: Down-regulated in Transcription
  misc_feature: MA Experiment 108595 PARAMETER Experiment Name: At_Ler-pi_Ovule_cDNA_P Parameter: Plant Line Value: null
  misc_feature: MA Experiment ID: 20000173 Result: Down-regulated in Transcription
  misc_feature: MA Experiment 20000173 PARAMETER Experiment Name: At_42deg_Heat_P Parameter: Age (day) Value: 14
  misc_feature: MA Experiment 20000173 PARAMETER Experiment Name: At_42deg_Heat_P Parameter: Organism Value: A. thaliana
  misc_feature: MA Experiment 20000173 PARAMETER Experiment Name: At_42deg_Heat_P Parameter: Plant Line Value: WS
  misc_feature: MA Experiment 20000173 PARAMETER Experiment Name: At_42deg_Heat_P Parameter: Temperature (deg C) Value: 42 vs. 22
  misc_feature: MA Experiment 20000173 PARAMETER Experiment Name: At_42deg_Heat_P Parameter: Timepoint (hr) Value: 6
  misc_feature: MA Experiment 20000173 PARAMETER Experiment Name: At_42deg_Heat_P Parameter: Tissue Value: Aerial
  misc_feature: MA Experiment ID: 20000179 Result: Down-regulated in Transcription
  misc_feature: MA Experiment 20000179 PARAMETER Experiment Name: At_Germinating_Seeds_P Parameter: Age (hr) Value: 6 vs. 0
  misc_feature: MA Experiment 20000179 PARAMETER Experiment Name: At_Germinating_Seeds_P Parameter: Tissue Value: Germinating Seeds
  misc_feature: MA Experiment ID: 20000185 Result: Down-regulated in Transcription
  misc_feature: MA Experiment 20000185 PARAMETER Experiment Name: At_Roots__P Parameter: Age (day) Value: 7 vs. 21
  misc_feature: MA Experiment 20000185 PARAMETER Experiment Name: At_Roots__P Parameter: Organism Value: A. thaliana
  misc_feature: MA Experiment 20000185 PARAMETER Experiment Name: At_Roots__P Parameter: Tissue Value: Roots vs. Whole Plant
  misc_feature: MA Experiment ID: 20000264 Result: Down-regulated in Transcription
  misc_feature: MA Experiment 20000264 PARAMETER Experiment Name: At_Open_Flower_P Parameter: Age (day) Value: 21
  misc_feature: MA Experiment 20000264 PARAMETER Experiment Name: At_Open_Flower_P Parameter: Plant Line Value: WS
  misc_feature: MA Experiment 20000264 PARAMETER Experiment Name: At_Open_Flower_P Parameter: Tissue Value: Open Flower vs. Whole Plant
  misc_feature: MA Experiment ID: 20000268 Result: Down-regulated in Transcription
  misc_feature: MA Experiment 20000268 PARAMETER Experiment Name: At_100mM_NaCl__P Parameter: Age (day) Value: 14
  misc_feature: MA Experiment 20000268 PARAMETER Experiment Name: At_100mM_NaCl__P Parameter: Organism Value: A. thaliana
  misc_feature: MA Experiment 20000268 PARAMETER Experiment Name: At_100mM_NaCl__P Parameter: Plant Line Value: WS
  misc_feature: MA Experiment 20000268 PARAMETER Experiment Name: At_100mM_NaCl__P Parameter: Timepoint (hr) Value: 6
  misc_feature: MA Experiment 20000268 PARAMETER Experiment Name: At_100mM_NaCl__P Parameter: Tissue Value: Whole Plant
  misc_feature: MA Experiment 20000268 PARAMETER Experiment Name: At_100mM_NaCl__P Parameter: Treatment Value: 100mM NaCl vs. No Treatment
  misc_feature: MA Experiment ID: 20000286 Result: Down-regulated in Transcription
  misc_feature: MA Experiment 20000286 PARAMETER Experiment Name: At_Open_Flower_P Parameter: Age (day) Value: 21
  misc_feature: MA Experiment 20000286 PARAMETER Experiment Name: At_Open_Flower_P Parameter: Plant Line Value: WS
  misc_feature: MA Experiment 20000286 PARAMETER Experiment Name: At_Open_Flower_P Parameter: Tissue Value: Half Open vs. Whole Plant
  misc_feature: MA Experiment ID: 20000436 Result: Down-regulated in Transcription
  misc_feature: MA Experiment 20000436 PARAMETER Experiment Name: At_Drought_P Parameter: Age (day) Value: 7
  misc_feature: MA Experiment 20000436 PARAMETER Experiment Name: At_Drought_P Parameter: Organism Value: A. thaliana
  misc_feature: MA Experiment 20000436 PARAMETER Experiment Name: At_Drought_P Parameter: Plant Line Value: WS
  misc_feature: MA Experiment 20000436 PARAMETER Experiment Name: At_Drought_P Parameter: Timepoint (hr) Value: 12
  misc_feature: MA Experiment 20000436 PARAMETER Experiment Name: At_Drought_P Parameter: Tissue Value: Whole Plant
  misc_feature: MA Experiment 20000436 PARAMETER Experiment Name: At_Drought_P Parameter: Treatment Value: Drought vs. No Drought
  misc_feature: MA Experiment ID: 20000437 Result: Down-regulated in Transcription
  misc_feature: MA Experiment 20000437 PARAMETER Experiment Name: At_Drought_P Parameter: Age (day) Value: 8
  misc_feature: MA Experiment 20000437 PARAMETER Experiment Name: At_Drought_P Parameter: Organism Value: A. thaliana
  misc_feature: MA Experiment 20000437 PARAMETER Experiment Name: At_Drought_P Parameter: Plant Line Value: WS
  misc_feature: MA Experiment 20000437 PARAMETER Experiment Name: At_Drought_P Parameter: Timepoint (hr) Value: 24
  misc_feature: MA Experiment 20000437 PARAMETER Experiment Name: At_Drought_P Parameter: Tissue Value: Whole Plant
  misc_feature: MA Experiment 20000437 PARAMETER Experiment Name: At_Drought_P Parameter: Treatment Value: Drought vs. No Drought
  misc_feature: MA Experiment ID: 20000439 Result: Down-regulated in Transcription
  misc_feature: MA Experiment 20000439 PARAMETER Experiment Name: At_Roots__P Parameter: Age (day) Value: 14 vs. 21
  misc_feature: MA Experiment 20000439 PARAMETER Experiment Name: At_Roots__P Parameter: Organism Value: A. thaliana
  misc_feature: MA Experiment 20000439 PARAMETER Experiment Name: At_Roots__P Parameter: Tissue Value: Roots vs. Whole Plant
  misc_feature: MA Experiment ID: 20000794 Result: Down-regulated in Transcription
  misc_feature: MA Experiment 20000794 PARAMETER Experiment Name: At_Petals_P Parameter: Age (day) Value: 23-25 days
  misc_feature: MA Experiment 20000794 PARAMETER Experiment Name: At_Petals_P Parameter: Plant Line Value: WS
  misc_feature: MA Experiment 20000794 PARAMETER Experiment Name: At_Petals_P Parameter: Tissue Value: Petals vs. Whole plant
  misc_feature: MA Experiment ID: 20001554 Result: Down-regulated in Transcription
  misc_feature: MA Experiment 20001554 PARAMETER Experiment Name: At_Drought_Soil_Dry_P Parameter: Age (day) Value: 21
  misc_feature: MA Experiment 20001554 PARAMETER Experiment Name: At_Drought_Soil_Dry_P Parameter: Organism Value: A. thaliana
  misc_feature: MA Experiment 20001554 PARAMETER Experiment Name: At_Drought_Soil_Dry_P Parameter: Plant Line Value: WS
  misc_feature: MA Experiment 20001554 PARAMETER Experiment Name: At_Drought_Soil_Dry_P Parameter: Post Timepoint (hr) Value: None
  misc_feature: MA Experiment 20001554 PARAMETER Experiment Name: At_Drought_Soil_Dry_P Parameter: Post-Treatment Value: None
  misc_feature: MA Experiment 20001554 PARAMETER Experiment Name: At_Drought_Soil_Dry_P Parameter: Timepoint (day) Value: 7
  misc_feature: MA Experiment 20001554 PARAMETER Experiment Name: At_Drought_Soil_Dry_P Parameter: Treatment Value: Drought vs. No Drought
  misc_feature: MA Experiment ID: 20001555 Result: Down-regulated in Transcription
  misc_feature: MA Experiment 20001555 PARAMETER Experiment Name: At_Drought_Soil_Dry_P Parameter: Age (day) Value: 24
  misc_feature: MA Experiment 20001555 PARAMETER Experiment Name: At_Drought_Soil_Dry_P Parameter: Organism Value: A. thaliana
  misc_feature: MA Experiment 20001555 PARAMETER Experiment Name: At_Drought_Soil_Dry_P Parameter: Plant Line Value: WS
  misc_feature: MA Experiment 20001555 PARAMETER Experiment Name: At_Drought_Soil_Dry_P Parameter: Post Timepoint (hr) Value: None
  misc_feature: MA Experiment 20001555 PARAMETER Experiment Name: At_Drought_Soil_Dry_P Parameter: Post-Treatment Value: None
  misc_feature: MA Experiment 20001555 PARAMETER Experiment Name: At_Drought_Soil_Dry_P Parameter: Timepoint (day) Value: 10
  misc_feature: MA Experiment 20001555 PARAMETER Experiment Name: At_Drought_Soil_Dry_P Parameter: Treatment Value: Drought vs. No Drought
  misc_feature: MA Experiment ID: 20001556 Result: Down-regulated in Transcription
  misc_feature: MA Experiment 20001556 PARAMETER Experiment Name: At_Drought_Soil_Dry_P Parameter: Age (day) Value: 26
  misc_feature: MA Experiment 20001556 PARAMETER Experiment Name: At_Drought_Soil_Dry_P Parameter: Organism Value: A. thaliana
  misc_feature: MA Experiment 20001556 PARAMETER Experiment Name: At_Drought_Soil_Dry_P Parameter: Plant Line Value: WS
  misc_feature: MA Experiment 20001556 PARAMETER Experiment Name: At_Drought_Soil_Dry_P Parameter: Post Timepoint (hr) Value: None
  misc_feature: MA Experiment 20001556 PARAMETER Experiment Name: At_Drought_Soil_Dry_P Parameter: Post-Treatment Value: None
  misc_feature: MA Experiment 20001556 PARAMETER Experiment Name: At_Drought_Soil_Dry_P Parameter: Timepoint (day) Value: 12
  misc_feature: MA Experiment 20001556 PARAMETER Experiment Name: At_Drought_Soil_Dry_P Parameter: Treatment Value: Drought vs. No Drought
  misc_feature: MA Experiment ID: 20001557 Result: Up-regulated in Transcription
  misc_feature: MA Experiment 20001557 PARAMETER Experiment Name: At_Drought_Soil_Dry_P Parameter: Age (day) Value: 27
  misc_feature: MA Experiment 20001557 PARAMETER Experiment Name: At_Drought_Soil_Dry_P Parameter: Organism Value: A. thaliana
  misc_feature: MA Experiment 20001557 PARAMETER Experiment Name: At_Drought_Soil_Dry_P Parameter: Plant Line Value: WS
  misc_feature: MA Experiment 20001557 PARAMETER Experiment Name: At_Drought_Soil_Dry_P Parameter: Post Timepoint (hr) Value: 3
  misc_feature: MA Experiment 20001557 PARAMETER Experiment Name: At_Drought_Soil_Dry_P Parameter: Post-Treatment Value: Re-Water vs. No Drought
  misc_feature: MA Experiment 20001557 PARAMETER Experiment Name: At_Drought_Soil_Dry_P Parameter: Timepoint (day) Value: 13
  misc_feature: MA Experiment 20001557 PARAMETER Experiment Name: At_Drought_Soil_Dry_P Parameter: Treatment Value: Drought vs. No Drought
  misc_feature: MA Experiment ID: 20001756 Result: Up-regulated in Transcription
  misc_feature: MA Experiment 20001756 PARAMETER Experiment Name: At_50mM_NH4NO3_L-to-H_P Parameter: Timepoint (hr) Value: 4
  misc_feature: MA Experiment 20001756 PARAMETER Experiment Name: At_50mM_NH4NO3_L-to-H_P Parameter: Tissue Value: Leaf
  misc_feature: MA Experiment 20001756 PARAMETER Experiment Name: At_50mM_NH4NO3_L-to-H_P Parameter: Treatment Value: 50mM NH4NO3 vs 100mM Mannitol
  misc_feature: MA Experiment ID: 20001757 Result: Up-regulated in Transcription
  misc_feature: MA Experiment 20001757 PARAMETER Experiment Name: At_50mM_NH4NO3_L-to-H_P Parameter: Timepoint (hr) Value: 6
  misc_feature: MA Experiment 20001757 PARAMETER Experiment Name: At_50mM_NH4NO3_L-to-H_P Parameter: Tissue Value: Leaf
  misc_feature: MA Experiment 20001757 PARAMETER Experiment Name: At_50mM_NH4NO3_L-to-H_P Parameter: Treatment Value: 50mM NH4NO3 vs 100mM Mannitol
  misc_feature: MA Experiment ID: 20001904 Result: Down-regulated in Transcription
  misc_feature: MA Experiment 20001904 PARAMETER Experiment Name: At_Drought_Reproduction_P Parameter: Age (day) Value: 37
  misc_feature: MA Experiment 20001904 PARAMETER Experiment Name: At_Drought_Reproduction_P Parameter: Organism Value: A. thaliana
  misc_feature: MA Experiment 20001904 PARAMETER Experiment Name: At_Drought_Reproduction_P Parameter: Plant Line Value: WS
  misc_feature: MA Experiment 20001904 PARAMETER Experiment Name: At_Drought_Reproduction_P Parameter: Timepoint (day) Value: 7
  misc_feature: MA Experiment 20001904 PARAMETER Experiment Name: At_Drought_Reproduction_P Parameter: Tissue Value: Rosettes
  misc_feature: MA Experiment 20001904 PARAMETER Experiment Name: At_Drought_Reproduction_P Parameter: Treatment Value: Drought vs. No Drought
  misc_feature: MA Experiment ID: 20001906 Result: Down-regulated in Transcription
  misc_feature: MA Experiment 20001906 PARAMETER Experiment Name: At_Drought_Reproduction_P Parameter: Age (day) Value: 35
  misc_feature: MA Experiment 20001906 PARAMETER Experiment Name: At_Drought_Reproduction_P Parameter: Organism Value: A. thaliana
  misc_feature: MA Experiment 20001906 PARAMETER Experiment Name: At_Drought_Reproduction_P Parameter: Plant Line Value: WS
  misc_feature: MA Experiment 20001906 PARAMETER Experiment Name: At_Drought_Reproduction_P Parameter: Timepoint (day) Value: 5
  misc_feature: MA Experiment 20001906 PARAMETER Experiment Name: At_Drought_Reproduction_P Parameter: Tissue Value: Siliques
  misc_feature: MA Experiment 20001906 PARAMETER Experiment Name: At_Drought_Reproduction_P Parameter: Treatment Value: Drought vs. No Drought
aagagtagggaaaaagaaaagaaaagtagagtactatcttcctcttaaaccaaccattcaaaatgttgcgtactatcttcctcttatctcttctctttgctctatccaatgcctctgttcaagatttctgtgtcgcaaacctgaaacgcgctgaaacccctgcgggttacccttgcattcgtcccattcatgtcaaagctacagactttgtcttctctggcttaggcactcctggaaacactacaaacatcatcaacgccgctgtcacacccgctttcgcagctcagttcccgggtctgaacggtctaggcctctctacagctagacttgacttagctcctaaaggtgtgatcccaatgcacactcaccctggtgcctctgaggttctctttgtccttactggctccattaccgctgggtttgtctcctcggcaaacgctgtctacgtgcagacactcaaaccaggacaggtcatggttttcccacagggcttgcttcatttccagatcaacgcgggaaaatcctctgcttcagccgttgtcactttcaacagcgctaatccgggtctgcagattctcgacttcgcactctttgctaacagtcttcccactgaactcgtcgtgggtactactttccttgacgccactacagtcaagaagctaaagggtgttcttggaggaactggctaaaaaaagacttaggactactccttgactaaaacaccaaaacctgtttcttcatctttttttctctttaattgattcttgtcttctctgttttgtgtgccttgtaattcttcaaaacctgtcaaaattgttacattgtatgtgagttttttcaattaagatcctgagttggtc

SEQ ID NO: 31046 - protein, 208 aa, Arabidopsis thaliana; identical to SEQ ID NO: 23207
  peptide (1)..(208): Ceres Seq. ID no. 13591957
  misc_feature (52)..(198): Pfam Name: Cupin Pfam Description: Cupin
  misc_feature (52)..(198): Pfam Name: Cupin Pfam Description: Cupin
  misc_feature (52)..(198): Pfam Name: Cupin Pfam Description: Cupin
  misc_feature (52)..(198): Pfam Name: Cupin Pfam Description: Cupin
  misc_feature (6)..(207): Homolog of NCBI NO: 18201941 NR Description: Auxin-binding protein ABP19b precursor
  misc_feature (1)..(207): Homolog of NCBI NO: 15242028 NR Description: germin-like protein (AtGER3) [Arabidopsis
  misc_feature (6)..(207): Homolog of NCBI NO: 18203684 NR Description: Auxin-binding protein ABP19a precursor
  misc_feature (5)..(207): Homolog of NCBI NO: 18201940 NR Description: Auxin-binding protein ABP20 precursor
  misc_feature (1)..(208): Homolog of NCBI NO: 13277342 NR Description: Germin-like protein [Pisum sativum]
  misc_feature (6)..(207): Homolog of NCBI NO: 18201941 NR Description: Auxin-binding protein ABP19b precursor
  misc_feature (6)..(207): Homolog of NCBI NO: 18203684 NR Description: Auxin-binding protein ABP19a precursor
  misc_feature (1)..(208): Homolog of NCBI NO: 13277342 NR Description: Germin-like protein [Pisum sativum]
  misc_feature (5)..(207): Homolog of NCBI NO: 18201940 NR Description: Auxin-binding protein ABP20 precursor
  misc_feature (6)..(207): Homolog of NCBI NO: 18203684 NR Description: Auxin-binding protein ABP19a precursor
  misc_feature (1)..(207): Homolog of NCBI NO: 15242028 NR Description: germin-like protein (AtGER3) [Arabidopsis
  misc_feature (6)..(207): Homolog of NCBI NO: 18201941 NR Description: Auxin-binding protein ABP19b precursor
  misc_feature (1)..(208): Homolog of NCBI NO: 15218535 NR Description: germin-like protein (AtGER1) [Arabidopsis
  misc_feature (1)..(208): Homolog of NCBI NO: 17473703 NR Description: germin-like protein [Arabidopsis thaliana]
  misc_feature (1)..(208): Homolog of NCBI NO: 1592672 NR Description: germin1 [Arabidopsis thaliana]
  misc_feature (5)..(208): Homolog of NCBI NO: 1934726 NR Description: germin-like protein [Arabidopsis thaliana]
  misc_feature (1)..(208): Homolog of NCBI NO: 1169941 NR Description: Germin-like protein 1 precursor
  misc_feature (1)..(208): Homolog of NCBI NO: 15218535 NR Description: germin-like protein (AtGER1) [Arabidopsis
  misc_feature (1)..(208): Homolog of NCBI NO: 17473703 NR Description: germin-like protein [Arabidopsis thaliana]
  misc_feature (1)..(208): Homolog of NCBI NO: 1592672 NR Description: germin1 [Arabidopsis thaliana]
  misc_feature (5)..(208): Homolog of NCBI NO: 1934726 NR Description: germin-like protein [Arabidopsis thaliana]
  misc_feature (1)..(208): Homolog of NCBI NO: 1169941 NR Description: Germin-like protein 1 precursor
  misc_feature (1)..(208): Homolog of NCBI NO: 13277342 NR Description: Germin-like protein [Pisum sativum]
  misc_feature (5)..(207): Homolog of NCBI NO: 18201940 NR Description: Auxin-binding protein ABP20 precursor
  misc_feature (6)..(207): Homolog of NCBI NO: 18203684 NR Description: Auxin-binding protein ABP19a precursor
  misc_feature (1)..(207): Homolog of NCBI NO: 15242028 NR Description: germin-like protein (AtGER3) [Arabidopsis
  misc_feature (6)..(207): Homolog of NCBI NO: 18201941 NR Description: Auxin-binding protein ABP19b precursor
  misc_feature (1)..(208): Homolog of NCBI NO: 15218535 NR Description: germin-like protein (AtGER1) [Arabidopsis
  misc_feature (1)..(208): Homolog of NCBI NO: 17473703 NR Description: germin-like protein [Arabidopsis thaliana]
  misc_feature (1)..(208): Homolog of NCBI NO: 1592672 NR Description: germin1 [Arabidopsis thaliana]
  misc_feature (5)..(208): Homolog of NCBI NO: 1934726 NR Description: germin-like protein [Arabidopsis thaliana]
  misc_feature (1)..(208): Homolog of NCBI NO: 1169941 NR Description: Germin-like protein 1 precursor
  misc_feature (1)..(208): Homolog of NCBI NO: 13277342 NR Description: Germin-like protein [Pisum sativum]
  misc_feature (5)..(207): Homolog of NCBI NO: 18201940 NR Description: Auxin-binding protein ABP20 precursor
  misc_feature (1)..(207): Homolog of NCBI NO: 15242028 NR Description: germin-like protein (AtGER3) [Arabidopsis
  misc_feature (1)..(208): Homolog of NCBI NO: 1169941 NR Description: Germin-like protein 1 precursor
  misc_feature (5)..(208): Homolog of NCBI NO: 1934726 NR Description: germin-like protein [Arabidopsis thaliana]
  misc_feature (1)..(208): Homolog of NCBI NO: 1592672 NR Description: germin1 [Arabidopsis thaliana]
  misc_feature (1)..(208): Homolog of NCBI NO: 17473703 NR Description: germin-like protein [Arabidopsis thaliana]
  misc_feature (1)..(208): Homolog of NCBI NO: 15218535 NR Description: germin-like protein (AtGER1) [Arabidopsis

SEQ ID NO: 31047 - protein, 110 aa, Arabidopsis thaliana
  peptide (1)..(110): Ceres Seq. ID no. 13591958
  misc_feature (1)..(100): Pfam Name: Cupin Pfam Description: Cupin
  misc_feature (1)..(100): Pfam Name: Cupin Pfam Description: Cupin
  misc_feature (1)..(100): Pfam Name: Cupin Pfam Description: Cupin
  misc_feature (1)..(100): Pfam Name: Cupin Pfam Description: Cupin
  misc_feature (1)..(109): Homolog of NCBI NO: 18201941 NR Description: Auxin-binding protein ABP19b precursor
  misc_feature (1)..(109): Homolog of NCBI NO: 15242028 NR Description: germin-like protein (AtGER3) [Arabidopsis
  misc_feature (1)..(109): Homolog of NCBI NO: 18203684 NR Description: Auxin-binding protein ABP19a precursor
  misc_feature (1)..(109): Homolog of NCBI NO: 18201940 NR Description: Auxin-binding protein ABP20 precursor
  misc_feature (1)..(110): Homolog of NCBI NO: 13277342 NR Description: Germin-like protein [Pisum sativum]
  misc_feature (1)..(109): Homolog of NCBI NO: 18201941 NR Description: Auxin-binding protein ABP19b precursor
  misc_feature (1)..(109): Homolog of NCBI NO: 18203684 NR Description: Auxin-binding protein ABP19a precursor
  misc_feature (1)..(110): Homolog of NCBI NO: 13277342 NR Description: Germin-like protein [Pisum sativum]
  misc_feature (1)..(109): Homolog of NCBI NO: 18201940 NR Description: Auxin-binding protein ABP20 precursor
  misc_feature (1)..(109): Homolog of NCBI NO: 18203684 NR Description: Auxin-binding protein ABP19a precursor
  misc_feature (1)..(109): Homolog of NCBI NO: 15242028 NR Description: germin-like protein (AtGER3) [Arabidopsis
  misc_feature (1)..(109): Homolog of NCBI NO: 18201941 NR Description: Auxin-binding protein ABP19b precursor
  misc_feature (1)..(110): Homolog of NCBI NO: 15218535 NR Description: germin-like protein (AtGER1) [Arabidopsis
  misc_feature (1)..(110): Homolog of NCBI NO: 17473703 NR Description: germin-like protein [Arabidopsis thaliana]
  misc_feature (1)..(110): Homolog of NCBI NO: 1592672 NR Description: germin1 [Arabidopsis thaliana]
  misc_feature (1)..(110): Homolog of NCBI NO: 1934726 NR Description: germin-like protein [Arabidopsis thaliana]
  misc_feature (1)..(110): Homolog of NCBI NO: 1169941 NR Description: Germin-like protein 1 precursor
  misc_feature (1)..(110): Homolog of NCBI NO: 15218535 NR Description: germin-like protein (AtGER1) [Arabidopsis
  misc_feature (1)..(110): Homolog of NCBI NO: 17473703 NR Description: germin-like protein [Arabidopsis thaliana]
  misc_feature (1)..(110): Homolog of NCBI NO: 1592672 NR Description: germin1 [Arabidopsis thaliana]
  misc_feature (1)..(110): Homolog of NCBI NO: 1934726 NR Description: germin-like protein [Arabidopsis thaliana]
  misc_feature (1)..(110): Homolog of NCBI NO: 1169941 NR Description: Germin-like protein 1 precursor
  misc_feature (1)..(110): Homolog of NCBI NO: 13277342 NR Description: Germin-like protein [Pisum sativum]
  misc_feature (1)..(109): Homolog of NCBI NO: 18201940 NR Description: Auxin-binding protein ABP20 precursor
  misc_feature (1)..(109): Homolog of NCBI NO: 18203684 NR Description: Auxin-binding protein ABP19a precursor
  misc_feature (1)..(109): Homolog of NCBI NO: 15242028 NR Description: germin-like protein (AtGER3) [Arabidopsis
  misc_feature (1)..(109): Homolog of NCBI NO: 18201941 NR Description: Auxin-binding protein ABP19b precursor
  misc_feature (1)..(110): Homolog of NCBI NO: 15218535 NR Description: germin-like protein (AtGER1) [Arabidopsis
  misc_feature (1)..(110): Homolog of NCBI NO: 17473703 NR Description: germin-like protein [Arabidopsis thaliana]
  misc_feature (1)..(110): Homolog of NCBI NO: 1592672 NR Description: germin1 [Arabidopsis thaliana]
  misc_feature (1)..(110): Homolog of NCBI NO: 1934726 NR Description: germin-like protein [Arabidopsis thaliana]
  misc_feature (1)..(110): Homolog of NCBI NO: 1169941 NR Description: Germin-like protein 1 precursor
  misc_feature (1)..(110): Homolog of NCBI NO: 13277342 NR Description: Germin-like protein [Pisum sativum]
  misc_feature (1)..(109): Homolog of NCBI NO: 18201940 NR Description: Auxin-binding protein ABP20 precursor
  misc_feature (1)..(109): Homolog of NCBI NO: 15242028 NR Description: germin-like protein (AtGER3) [Arabidopsis
  misc_feature (1)..(110): Homolog of NCBI NO: 1169941 NR Description: Germin-like protein 1 precursor
  misc_feature (1)..(110): Homolog of NCBI NO: 1934726 NR Description: germin-like protein [Arabidopsis thaliana]
  misc_feature (1)..(110): Homolog of NCBI NO: 1592672 NR Description: germin1 [Arabidopsis thaliana]
  misc_feature (1)..(110): Homolog of NCBI NO: 17473703 NR Description: germin-like protein [Arabidopsis thaliana]
  misc_feature (1)..(110): Homolog of NCBI NO: 15218535 NR Description: germin-like protein (AtGER1) [Arabidopsis
MHTHPGASEVLFVLTGSITAGFVSSANAVYVQTLKPGQVMVFPQGLLHFQINAGKSSASAVVTFNSANPGLQILDFALFANSLPTELVVGTTFLDATTVKKLKGVLGGTG

SEQ ID NO: 31048 - DNA, 1720 bp, Arabidopsis thaliana
  misc_feature (1)..(1720): Ceres Seq. ID no. 12579466
  misc_feature: MA Experiment ID: 108434 Result: Down-regulated in Transcription
  misc_feature: MA Experiment 108434 PARAMETER Experiment Name: At_Root_Tips_cDNA_P Parameter: Tissue Value: Root Tips
  misc_feature: MA Experiment ID: 108435 Result: Down-regulated in Transcription
  misc_feature: MA Experiment 108435 PARAMETER Experiment Name: At_stm_Mutants_cDNA_P Parameter: Plant Line Value: wt Landsburg vs stm
  misc_feature: MA Experiment 108435 PARAMETER Experiment Name: At_stm_Mutants_cDNA_P Parameter: Tissue Value: Shoot Apical Meristem Region
  misc_feature: MA Experiment ID: 108461 Result: Up-regulated in Transcription
  misc_feature: MA Experiment 108461 PARAMETER Experiment Name: At_Germinating_Seeds_cDNA_P Parameter: Age (day) Value: 1 vs. 0
  misc_feature: MA Experiment 108461 PARAMETER Experiment Name: At_Germinating_Seeds_cDNA_P Parameter: Tissue Value: Germinating Seeds
  misc_feature: MA Experiment ID: 108462 Result: Up-regulated in Transcription
  misc_feature: MA Experiment 108462 PARAMETER Experiment Name: At_Germinating_Seeds_cDNA_P Parameter: Age (day) Value: 2 vs. 0
  misc_feature: MA Experiment 108462 PARAMETER Experiment Name: At_Germinating_Seeds_cDNA_P Parameter: Tissue Value: Germinating Seeds
  misc_feature: MA Experiment ID: 108464 Result: Up-regulated in Transcription
  misc_feature: MA Experiment 108464 PARAMETER Experiment Name: At_Germinating_Seeds_cDNA_P Parameter: Age (day) Value: 4 vs. 0
  misc_feature: MA Experiment 108464 PARAMETER Experiment Name: At_Germinating_Seeds_cDNA_P Parameter: Tissue Value: Germinating Seeds
  misc_feature: MA Experiment ID: 108488 Result: Up-regulated in Transcription
  misc_feature: MA Experiment ID: 108595 Result: Down-regulated in Transcription
  misc_feature: MA Experiment 108595 PARAMETER Experiment Name: At_Ler-pi_Ovule_cDNA_P Parameter: Plant Line Value: null
  misc_feature: MA Experiment ID: 20000087 Result: Down-regulated in Transcription
  misc_feature: MA Experiment 20000087 PARAMETER Experiment Name: At_100uM_ABA_Mutants_cDNA_P Parameter: Plant Line Value: WS
  misc_feature: MA Experiment 20000087 PARAMETER Experiment Name: At_100uM_ABA_Mutants_cDNA_P Parameter: Timepoint (hr) Value: 6
  misc_feature: MA Experiment 20000087 PARAMETER Experiment Name: At_100uM_ABA_Mutants_cDNA_P Parameter: Tissue Value: Aerial
  misc_feature: MA Experiment 20000087 PARAMETER Experiment Name: At_100uM_ABA_Mutants_cDNA_P Parameter: Treatment Value: 100uM ABA vs. No Treatment
  misc_feature: MA Experiment ID: 20000184 Result: Up-regulated in Transcription
  misc_feature: MA Experiment 20000184 PARAMETER Experiment Name: At_Shoots__P Parameter: Age (day) Value: 7
  misc_feature: MA Experiment 20000184 PARAMETER Experiment Name: At_Shoots__P Parameter: Tissue Value: Shoots vs. Whole Plant
  misc_feature: MA Experiment ID: 20000185 Result: Down-regulated in Transcription
  misc_feature: MA Experiment 20000185 PARAMETER Experiment Name: At_Roots__P Parameter: Age (day) Value: 7 vs. 21
  misc_feature: MA Experiment 20000185 PARAMETER Experiment Name: At_Roots__P Parameter: Organism Value: A. thaliana
  misc_feature: MA Experiment 20000185 PARAMETER Experiment Name: At_Roots__P Parameter: Tissue Value: Roots vs. Whole Plant
  misc_feature: MA Experiment ID: 20000286 Result: Down-regulated in Transcription
  misc_feature: MA Experiment 20000286 PARAMETER Experiment Name: At_Open_Flower_P Parameter: Age (day) Value: 21
  misc_feature: MA Experiment 20000286 PARAMETER Experiment Name: At_Open_Flower_P Parameter: Plant Line Value: WS
  misc_feature: MA Experiment 20000286 PARAMETER Experiment Name: At_Open_Flower_P Parameter: Tissue Value: Half Open vs. Whole Plant
  misc_feature: MA Experiment ID: 20000437 Result: Down-regulated in Transcription
  misc_feature: MA Experiment 20000437 PARAMETER Experiment Name: At_Drought_P Parameter: Age (day) Value: 8
  misc_feature: MA Experiment 20000437 PARAMETER Experiment Name: At_Drought_P Parameter: Organism Value: A. thaliana
  misc_feature: MA Experiment 20000437 PARAMETER Experiment Name: At_Drought_P Parameter: Plant Line Value: WS
  misc_feature: MA Experiment 20000437 PARAMETER Experiment Name: At_Drought_P Parameter: Timepoint (hr) Value: 24
  misc_feature: MA Experiment 20000437 PARAMETER Experiment Name: At_Drought_P Parameter: Tissue Value: Whole Plant
  misc_feature: MA Experiment 20000437 PARAMETER Experiment Name: At_Drought_P Parameter: Treatment Value: Drought vs. No Drought
  misc_feature: MA Experiment ID: 20000439 Result: Down-regulated in Transcription
  misc_feature: MA Experiment 20000439 PARAMETER Experiment Name: At_Roots__P Parameter: Age (day) Value: 14 vs. 21
  misc_feature: MA Experiment 20000439 PARAMETER Experiment Name: At_Roots__P Parameter: Organism Value: A. thaliana
  misc_feature: MA Experiment 20000439 PARAMETER Experiment Name: At_Roots__P Parameter: Tissue Value: Roots vs. Whole Plant
  misc_feature: MA Experiment ID: 20000794 Result: Down-regulated in Transcription
  misc_feature: MA Experiment 20000794 PARAMETER Experiment Name: At_Petals_P Parameter: Age (day) Value: 23-25 days
  misc_feature: MA Experiment 20000794 PARAMETER Experiment Name: At_Petals_P Parameter: Plant Line Value: WS
  misc_feature: MA Experiment 20000794 PARAMETER Experiment Name: At_Petals_P Parameter: Tissue Value: Petals vs. Whole plant
  misc_feature: MA Experiment ID: 20001560 Result: Up-regulated in Transcription
  misc_feature: MA Experiment 20001560 PARAMETER Experiment Name: At_Drought_Soil_Dry_P Parameter: Age (day) Value: 28
  misc_feature: MA Experiment 20001560 PARAMETER Experiment Name: At_Drought_Soil_Dry_P Parameter: Organism Value: A. thaliana
  misc_feature: MA Experiment 20001560 PARAMETER Experiment Name: At_Drought_Soil_Dry_P Parameter: Plant Line Value: WS
  misc_feature: MA Experiment 20001560 PARAMETER Experiment Name: At_Drought_Soil_Dry_P Parameter: Post Timepoint (hr) Value: None
  misc_feature: MA Experiment 20001560 PARAMETER Experiment Name: At_Drought_Soil_Dry_P Parameter: Post-Treatment Value: None
  misc_feature: MA Experiment 20001560 PARAMETER Experiment Name: At_Drought_Soil_Dry_P Parameter: Timepoint (day) Value: 14
  misc_feature: MA Experiment 20001560 PARAMETER Experiment Name: At_Drought_Soil_Dry_P Parameter: Treatment Value: Drought vs. No Drought
  misc_feature: MA Experiment ID: 20001757 Result: Up-regulated in Transcription
  misc_feature: MA Experiment 20001757 PARAMETER Experiment Name: At_50mM_NH4NO3_L-to-H_P Parameter: Timepoint (hr) Value: 6
  misc_feature: MA Experiment 20001757 PARAMETER Experiment Name: At_50mM_NH4NO3_L-to-H_P Parameter: Tissue Value: Leaf
  misc_feature: MA Experiment 20001757 PARAMETER Experiment Name: At_50mM_NH4NO3_L-to-H_P Parameter: Treatment Value: 50mM NH4NO3 vs 100mM Mannitol
  misc_feature: MA Experiment ID: 20001905 Result: Down-regulated in Transcription
  misc_feature: MA Experiment 20001905 PARAMETER Experiment Name: At_Drought_Reproduction_P Parameter: Age (day) Value: 40
  misc_feature: MA Experiment 20001905 PARAMETER Experiment Name: At_Drought_Reproduction_P Parameter: Organism Value: A. thaliana
  misc_feature: MA Experiment 20001905 PARAMETER Experiment Name: At_Drought_Reproduction_P Parameter: Plant Line Value: WS
  misc_feature: MA Experiment 20001905 PARAMETER Experiment Name: At_Drought_Reproduction_P Parameter: Timepoint (day) Value: 10
  misc_feature: MA Experiment 20001905 PARAMETER Experiment Name: At_Drought_Reproduction_P Parameter: Tissue Value: Rosettes
  misc_feature: MA Experiment 20001905 PARAMETER Experiment Name: At_Drought_Reproduction_P Parameter: Treatment Value: Drought vs. No Drought
ttatcctctctctctcgtcttcttcgtctgctcttcttttttatctctcgaaattcctctctctttctctctgcatcaaaacagcaactttacttctgcgtttttgtttatctctctgtattatccgattaatttaaaggagttctttgaaggcagctgcttctatgccatattgccgagaaaatgggcgagtctaaggggtgcgggaatgttggacgaatgatttcgaagaactcctataacttaatcacacacaagagagaagagagaaagagagaaagagagacagagataatggcgtacagtgcgtgtttcctacaccagagcgcattggcttcatcagccgcacgatcatcatcttcctcctcatcccagcgtcacgtgtcgctctccaaacctgttcagatcatctgtaaagctcaacagtctcatgaagacgataactccgccgtctcccgccgtcttgctctcactctcctcgtcggcgccgctgctgttggttccaaagtatctcctgctgatgccgcctacggtgaagctgcaaacgtgtttgggaagccaaagacgaacacagacttcttgccatacaatggagatgggttcaaagtgcaggttccagcaaaatggaacccaagcaaagagattgagtatccaggacaagtccttaggttcgaagacaacttcgatgctactagcaatctcaatgtcatggtcactcctaccgacaagaagtccatcactgattacggttctcccgaagagttcctctctcaggttaattacctcctagggaaacaagcttacttcggtgagactgcctctgagggaggctttgacaacaatgcagtggcaacagcaaacattctggagtcatcatctcaggaagttggtgggaaaccctactattacttgtctgtgttgacaagaacggctgatggagacgaaggtgggaagcatcagctgatcacagcaaccgtgaatggagggaagctttacatctgcaaagcacaagctggagacaagaggtggttcaagggagccaggagtatgtcttctctcaaatcagctcttccctccaccgcatcactccgattaccttcctcgtcttctcgccgtccggttactcttcgtctcccaatctcttctccttcactcccatctttctccggtctctctccggtcaatcctctcctctcaatcggacttccagattggcaaagctttgagaaaggattcaaaattgttgacggtggtggtcgtatctacgcgatgagacacggacgacgtgttccgaagctgaacagaccaccggaccagcgcaaagctcttctgcgaggactcacgactcagcttcttaagcatgggagaatcaagacgactcgagctagagctagtgcgatgaggaagttcgttgacaagatgattacattggctaaagacggttcgttgcacaagcgaagacaagccttgggatatatctacgagaaacagattgttcacgctctgtttgctgaggttcctgatagatacggtgagagaaacggtggatacacgaggatcatcagaactcttccaaggagaggtgataatgctccaatggcttacattgagcttgtctaaggtcaatatctcttttattttgctcaattgtttcacttttgctctgtaatattgaaaaacagttgttgatgcagatatgagatcattttgttttgtgagc

SEQ ID NO: 31049 - protein, 478 aa, Arabidopsis thaliana
  peptide (1)..(478): Ceres Seq. ID no. 12579467
  misc_feature (98)..(298): Pfam Name: PsbP Pfam Description: PsbP
  misc_feature (39)..(287): Homolog of NCBI NO: 266856 NR Description: Oxygen-evolving enhancer protein 2, chloroplast (OEE2) (23 kDa subunit of oxygen evolving system of photosystem
  misc_feature (38)..(287): Homolog of NCBI NO: 417604 NR Description: 23 kDa polypeptide of water-oxidizing complex of
  misc_feature (45)..(287): Homolog of NCBI NO: 19898 NR Description: photosystem II 23 kDa polypeptide [Nicotiana
  misc_feature (43)..(287): Homolog of NCBI NO: 1345550 NR Description: 23-kDa ploypeptide of photosystem II
  misc_feature (38)..(287): Homolog of NCBI NO: 7443216 NR Description: photosystem II oxygen-evolving complex protein 2
  misc_feature (38)..(287): Homolog of NCBI NO: 15224572 NR Description: photosystem II oxygen-evolving complex 23 (OEC23)
  misc_feature (50)..(286): Homolog of NCBI NO: 81723 NR Description: photosystem II oxygen-evolving complex protein 2
  misc_feature (38)..(287): Homolog of NCBI NO: 11133887 NR Description: OXYGEN-EVOLVING ENHANCER PROTEIN 2-2, CHLOROPLAST (OEE2) (23 KDA SUBUNIT OF OXYGEN EVOLVING SYSTEM OF PHOTOSYSTEM
  misc_feature (38)..(286): Homolog of NCBI NO: 131391 NR Description: Oxygen-evolving enhancer protein 2, chloroplast (OEE2) (23 kDa subunit of oxygen evolving system of photosystem
  misc_feature (38)..(298): Homolog of NCBI NO: 15222166 NR Description: photosystem II oxygen-evolving complex 23 (OEC23)
MGESKGCGNVGRMISKNSYNLITHKREERKRERETEIMAYSACFLHQSALASSAARSSSSSSSQRHVSLSKPVQIICKAQQSHEDDNSAVSRRLALTLLVGAAAVGSKVSPADAAYGEAANVFGKPKTNTDFLPYNGDGFKVQVPAKWNPSKEIEYPGQVLRFEDNFDATSNLNVMVTPTDKKSITDYGSPEEFLSQVNYLLGKQAYFGETASEGGFDNNAVATANILESSSQEVGGKPYYYLSVLTRTADGDEGGKHQLITATVNGGKLYICKAQAGDKRWFKGARSMSSLKSALPSTASLRLPSSSSRRPVTLRLPISSPSLPSFSGLSPVNPLLSIGLPDWQSFEKGFKIVDGGGRIYAMRHGRRVPKLNRPPDQRKALLRGLTTQLLKHGRIKTTRARASAMRKFVDKMITLAKDGSLHKRRQALGYIYEKQIVHALFAEVPDRYGERNGGYTRIIRTLPRRGDNAPMAYIELV

SEQ ID NO: 31050 - protein, 466 aa, Arabidopsis thaliana
  peptide (1)..(466): Ceres Seq. ID no. 12579468
  misc_feature (86)..(286): Pfam Name: PsbP Pfam Description: PsbP
  misc_feature (27)..(275): Homolog of NCBI NO: 266856 NR Description: Oxygen-evolving enhancer protein 2, chloroplast (OEE2) (23 kDa subunit of oxygen evolving system of photosystem
  misc_feature (26)..(275): Homolog of NCBI NO: 417604 NR Description: 23 kDa polypeptide of water-oxidizing complex of
  misc_feature (33)..(275): Homolog of NCBI NO: 19898 NR Description: photosystem II 23 kDa polypeptide [Nicotiana
  misc_feature (31)..(275): Homolog of NCBI NO: 1345550 NR Description: 23-kDa ploypeptide of photosystem II
  misc_feature (26)..(275): Homolog of NCBI NO: 7443216 NR Description: photosystem II oxygen-evolving complex protein 2
  misc_feature (26)..(275): Homolog of NCBI NO: 15224572 NR Description: photosystem II oxygen-evolving complex 23 (OEC23)
  misc_feature (38)..(274): Homolog of NCBI NO: 81723 NR Description: photosystem II oxygen-evolving complex protein 2
  misc_feature (26)..(275): Homolog of NCBI NO: 11133887 NR Description: OXYGEN-EVOLVING ENHANCER PROTEIN 2-2, CHLOROPLAST (OEE2) (23 KDA SUBUNIT OF OXYGEN EVOLVING SYSTEM OF PHOTOSYSTEM
  misc_feature (26)..(274): Homolog of NCBI NO: 131391 NR Description: Oxygen-evolving enhancer protein 2, chloroplast (OEE2) (23 kDa subunit of oxygen evolving system of photosystem
  misc_feature (26)..(286): Homolog of NCBI NO: 15222166 NR Description: photosystem II oxygen-evolving complex 23 (OEC23)
MISKNSYNLITHKREERKRERETEIMAYSACFLHQSALASSAARSSSSSSSQRHVSLSKPVQIICKAQQSHEDDNSAVSRRLALTLLVGAAAVGSKVSPADAAYGEAANVFGKPKTNTDFLPYNGDGFKVQVPAKWNPSKEIEYPGQVLRFEDNFDATSNLNVMVTPTDKKSITDYGSPEEFLSQVNYLLGKQAYFGETASEGGFDNNAVATANILESSSQEVGGKPYYYLSVLTRTADGDEGGKHQLITATVNGGKLYICKAQAGDKRWFKGARSMSSLKSALPSTASLRLPSSSSRRPVTLRLPISSPSLPSFSGLSPVNPLLSIGLPDWQSFEKGFKIVDGGGRIYAMRHGRRVPKLNRPPDQRKALLRGLTTQLLKHGRIKTTRARASAMRKFVDKMITLAKDGSLHKRRQALGYIYEKQIVHALFAEVPDRYGERNGGYTRIIRTLPRRGDNAPMAYIELV

SEQ ID NO: 31051 - protein, 441 aa, Arabidopsis thaliana
  peptide (1)..(441): Ceres Seq. ID no. 12579469
  misc_feature (61)..(261): Pfam Name: PsbP Pfam Description: PsbP
  misc_feature (2)..(250): Homolog of NCBI NO: 266856 NR Description: Oxygen-evolving enhancer protein 2, chloroplast (OEE2) (23 kDa subunit of oxygen evolving system of photosystem
  misc_feature (1)..(250): Homolog of NCBI NO: 417604 NR Description: 23 kDa polypeptide of water-oxidizing complex of
  misc_feature (8)..(250): Homolog of NCBI NO: 19898 NR Description: photosystem II 23 kDa polypeptide [Nicotiana
  misc_feature (6)..(250): Homolog of NCBI NO: 1345550 NR Description: 23-kDa ploypeptide of photosystem II
  misc_feature (1)..(250): Homolog of NCBI NO: 7443216 NR Description: photosystem II oxygen-evolving complex protein 2
  misc_feature (1)..(250): Homolog of NCBI NO: 15224572 NR Description: photosystem II oxygen-evolving complex 23 (OEC23)
  misc_feature (13)..(249): Homolog of NCBI NO: 81723 NR Description: photosystem II oxygen-evolving complex protein 2
  misc_feature (1)..(250): Homolog of NCBI NO: 11133887 NR Description: OXYGEN-EVOLVING ENHANCER PROTEIN 2-2, CHLOROPLAST (OEE2) (23 KDA SUBUNIT OF OXYGEN EVOLVING SYSTEM OF PHOTOSYSTEM
  misc_feature (1)..(249): Homolog of NCBI NO: 131391 NR Description: Oxygen-evolving enhancer protein 2, chloroplast (OEE2) (23 kDa subunit of oxygen evolving system of photosystem
  misc_feature (1)..(261): Homolog of NCBI NO: 15222166 NR Description: photosystem II oxygen-evolving complex 23 (OEC23)
MAYSACFLHQSALASSAARSSSSSSSQRHVSLSKPVQIICKAQQSHEDDNSAVSRRLALTLLVGAAAVGSKVSPADAAYGEAANVFGKPKTNTDFLPYNGDGFKVQVPAKWNPSKEIEYPGQVLRFEDNFDATSNLNVMVTPTDKKSITDYGSPEEFLSQVNYLLGKQAYFGETASEGGFDNNAVATANILESSSQEVGGKPYYYLSVLTRTADGDEGGKHQLITATVNGGKLYICKAQAGDKRWFKGARSMSSLKSALPSTASLRLPSSSSRRPVTLRLPISSPSLPSFSGLSPVNPLLSIGLPDWQSFEKGFKIVDGGGRIYAMRHGRRVPKLNRPPDQRKALLRGLTTQLLKHGRIKTTRARASAMRKFVDKMITLAKDGSLHKRRQALGYIYEKQIVHALFAEVPDRYGERNGGYTRIIRTLPRRGDNAPMAYIELV

SEQ ID NO: 31052 - DNA, 689 bp, Arabidopsis thaliana
  misc_feature (1)..(689): Ceres Seq. ID no. 12322670
  misc_feature: MA Experiment ID: 108461 Result: Up-regulated in Transcription
  misc_feature: MA Experiment 108461 PARAMETER Experiment Name: At_Germinating_Seeds_cDNA_P Parameter: Age (day) Value: 1 vs. 0
  misc_feature: MA Experiment 108461 PARAMETER Experiment Name: At_Germinating_Seeds_cDNA_P Parameter: Tissue Value: Germinating Seeds
  misc_feature: MA Experiment ID: 108561 Result: Down-regulated in Transcription
  misc_feature: MA Experiment 108561 PARAMETER Experiment Name: At_100uM_ABA_cDNA_P Parameter: Timepoint (hr) Value: 6
  misc_feature: MA Experiment 108561 PARAMETER Experiment Name: At_100uM_ABA_cDNA_P Parameter: Tissue Value: Aerial
  misc_feature: MA Experiment 108561 PARAMETER Experiment Name: At_100uM_ABA_cDNA_P Parameter: Treatment Value: 100uM ABA vs. No Treatment
  misc_feature: MA Experiment ID: 108573 Result: Down-regulated in Transcription
  misc_feature: MA Experiment 108573 PARAMETER Experiment Name: At_Drought_cDNA_P Parameter: Timepoint (hr) Value: 6
  misc_feature: MA Experiment 108573 PARAMETER Experiment Name: At_Drought_cDNA_P Parameter: Tissue Value: Aerial
  misc_feature: MA Experiment 108573 PARAMETER Experiment Name: At_Drought_cDNA_P Parameter: Treatment Value: Drought vs. No Drought
  misc_feature: MA Experiment ID: 108577 Result: Down-regulated in Transcription
  misc_feature: MA Experiment 108577 PARAMETER Experiment Name: At_42deg_Heat_cDNA_P Parameter: Temperature (deg C) Value: 42 vs. 22
  misc_feature: MA Experiment 108577 PARAMETER Experiment Name: At_42deg_Heat_cDNA_P Parameter: Timepoint (hr) Value: 6
  misc_feature: MA Experiment 108577 PARAMETER Experiment Name: At_42deg_Heat_cDNA_P Parameter: Tissue Value: Aerial
  misc_feature: MA Experiment ID: 108579 Result: Up-regulated in Transcription
  misc_feature: MA Experiment 108579 PARAMETER Experiment Name: At_4deg_Cold_cDNA_P Parameter: Temperature (deg C) Value: 4 vs. 22
  misc_feature: MA Experiment 108579 PARAMETER Experiment Name: At_4deg_Cold_cDNA_P Parameter: Timepoint (hr) Value: 6
  misc_feature: MA Experiment 108579 PARAMETER Experiment Name: At_4deg_Cold_cDNA_P Parameter: Tissue Value: Aerial
  misc_feature: MA Experiment ID: 108595 Result: Down-regulated in Transcription
  misc_feature: MA Experiment 108595 PARAMETER Experiment Name: At_Ler-pi_Ovule_cDNA_P Parameter: Plant Line Value: null
  misc_feature: MA Experiment ID: 20000072 Result: Down-regulated in Transcription
  misc_feature: MA Experiment 20000072 PARAMETER Experiment Name: At_100uM_ABA_Mutants_cDNA_P Parameter: Plant Line Value: CS8105
  misc_feature: MA Experiment 20000072 PARAMETER Experiment Name: At_100uM_ABA_Mutants_cDNA_P Parameter: Timepoint (hr) Value: 6
  misc_feature: MA Experiment 20000072 PARAMETER Experiment Name: At_100uM_ABA_Mutants_cDNA_P Parameter: Tissue Value: Aerial
  misc_feature: MA Experiment 20000072 PARAMETER Experiment Name: At_100uM_ABA_Mutants_cDNA_P Parameter: Treatment Value: 100uM ABA vs. No Treatment
  misc_feature: MA Experiment ID: 20000117 Result: Down-regulated in Transcription
  misc_feature: MA Experiment 20000117 PARAMETER Experiment Name: At_100uM_ABA_Mutants_cDNA_P Parameter: Plant Line Value: Columbia
  misc_feature: MA Experiment 20000117 PARAMETER Experiment Name: At_100uM_ABA_Mutants_cDNA_P Parameter: Timepoint (hr) Value: 6
  misc_feature: MA Experiment 20000117 PARAMETER Experiment Name: At_100uM_ABA_Mutants_cDNA_P Parameter: Tissue Value: Aerial
  misc_feature: MA Experiment 20000117 PARAMETER Experiment Name: At_100uM_ABA_Mutants_cDNA_P Parameter: Treatment Value: 100uM ABA vs. No Treatment
  misc_feature: MA Experiment ID: 20000184 Result: Up-regulated in Transcription
  misc_feature: MA Experiment 20000184 PARAMETER Experiment Name: At_Shoots__P Parameter: Age (day) Value: 7
  misc_feature: MA Experiment 20000184 PARAMETER Experiment Name: At_Shoots__P Parameter: Tissue Value: Shoots vs. Whole Plant
  misc_feature: MA Experiment ID: 20000185 Result: Down-regulated in Transcription
  misc_feature: MA Experiment 20000185 PARAMETER Experiment Name: At_Roots__P Parameter: Age (day) Value: 7 vs. 21
  misc_feature: MA Experiment 20000185 PARAMETER Experiment Name: At_Roots__P Parameter: Organism Value: A. thaliana
  misc_feature: MA Experiment 20000185 PARAMETER Experiment Name: At_Roots__P Parameter: Tissue Value: Roots vs. Whole Plant
  misc_feature: MA Experiment ID: 20000234 Result: Up-regulated in Transcription
  misc_feature: MA Experiment 20000234 PARAMETER Experiment Name: At_Siliques_P Parameter: Age (day) Value: 21
  misc_feature: MA Experiment 20000234 PARAMETER Experiment Name: At_Siliques_P Parameter: Organism Value: A. thaliana
  misc_feature: MA Experiment 20000234 PARAMETER Experiment Name: At_Siliques_P Parameter: Plant Line Value: WS
  misc_feature: MA Experiment 20000234 PARAMETER Experiment Name: At_Siliques_P Parameter: Tissue Value: Less Than 5mm Siliques vs. Whole Plant
  misc_feature: MA Experiment ID: 20000436 Result: Down-regulated in Transcription
  misc_feature: MA Experiment 20000436 PARAMETER Experiment Name: At_Drought_P Parameter: Age (day) Value: 7
  misc_feature: MA Experiment 20000436 PARAMETER Experiment Name: At_Drought_P Parameter: Organism Value: A. thaliana
  misc_feature: MA Experiment 20000436 PARAMETER Experiment Name: At_Drought_P Parameter: Plant Line Value: WS
  misc_feature: MA Experiment 20000436 PARAMETER Experiment Name: At_Drought_P Parameter: Timepoint (hr) Value: 12
  misc_feature: MA Experiment 20000436 PARAMETER Experiment Name: At_Drought_P Parameter: Tissue Value: Whole Plant
  misc_feature: MA Experiment 20000436 PARAMETER Experiment Name: At_Drought_P Parameter: Treatment Value: Drought vs. No Drought
  misc_feature: MA Experiment ID: 20000437 Result: Down-regulated in Transcription
  misc_feature: MA Experiment 20000437 PARAMETER Experiment Name: At_Drought_P Parameter: Age (day) Value: 8
  misc_feature: MA Experiment 20000437 PARAMETER Experiment Name: At_Drought_P Parameter: Organism Value: A. thaliana
  misc_feature: MA Experiment 20000437 PARAMETER Experiment Name: At_Drought_P Parameter: Plant Line Value: WS
  misc_feature: MA Experiment 20000437 PARAMETER Experiment Name: At_Drought_P Parameter: Timepoint (hr) Value: 24
  misc_feature: MA Experiment 20000437 PARAMETER Experiment Name: At_Drought_P Parameter: Tissue Value: Whole Plant
  misc_feature: MA Experiment 20000437 PARAMETER Experiment Name: At_Drought_P Parameter: Treatment Value: Drought vs. No Drought
  misc_feature: MA Experiment ID: 20000438 Result: Up-regulated in Transcription
  misc_feature: MA Experiment 20000438 PARAMETER Experiment Name: At_Shoots__P Parameter: Age (day) Value: 14
  misc_feature: MA Experiment 20000438 PARAMETER Experiment Name: At_Shoots__P Parameter: Tissue Value: Shoots vs. Whole Plant
  misc_feature: MA Experiment ID: 20000439 Result: Down-regulated in Transcription
  misc_feature: MA Experiment 20000439 PARAMETER Experiment Name: At_Roots__P Parameter: Age (day) Value: 14 vs. 21
  misc_feature: MA Experiment 20000439 PARAMETER Experiment Name: At_Roots__P Parameter: Organism Value: A. thaliana
  misc_feature: MA Experiment 20000439 PARAMETER Experiment Name: At_Roots__P Parameter: Tissue Value: Roots vs. Whole Plant
  misc_feature: MA Experiment ID: 20000453 Result: Down-regulated in Transcription
  misc_feature: MA Experiment 20000453 PARAMETER Experiment Name: At_100uM_ABA_P Parameter: Age (day) Value: 15
  misc_feature: MA Experiment 20000453 PARAMETER Experiment Name: At_100uM_ABA_P Parameter: Organism Value: A. thaliana
  misc_feature: MA Experiment 20000453 PARAMETER Experiment Name: At_100uM_ABA_P Parameter: Plant Line Value: WS
  misc_feature: MA Experiment 20000453 PARAMETER Experiment Name: At_100uM_ABA_P Parameter: Timepoint (hr) Value: 24
  misc_feature: MA Experiment 20000453 PARAMETER Experiment Name: At_100uM_ABA_P Parameter: Tissue Value: Aerial
  misc_feature: MA Experiment 20000453 PARAMETER Experiment Name: At_100uM_ABA_P Parameter: Treatment Value: 100uM ABA vs. No Treatment
  misc_feature: MA Experiment ID: 20001248 Result: Down-regulated in Transcription
  misc_feature: MA Experiment 20001248 PARAMETER Experiment Name: At_Far-red-induction_P Parameter: Age (day) Value: 7
  misc_feature: MA Experiment 20001248 PARAMETER Experiment Name: At_Far-red-induction_P Parameter: Light Value: Far-red vs. White
  misc_feature: MA Experiment 20001248 PARAMETER Experiment Name: At_Far-red-induction_P Parameter: Organism Value: A. thaliana
  misc_feature: MA Experiment 20001248 PARAMETER Experiment Name: At_Far-red-induction_P Parameter: Plant Line Value: Columbia
  misc_feature: MA Experiment 20001248 PARAMETER Experiment Name: At_Far-red-induction_P Parameter: Timepoint (hr) Value: 4
  misc_feature: MA Experiment 20001248 PARAMETER Experiment Name: At_Far-red-induction_P Parameter: Tissue Value: Whole Plant
  misc_feature: MA Experiment ID: 20001450 Result: Down-regulated in Transcription
  misc_feature: MA Experiment 20001450 PARAMETER Experiment Name: At_Far-red-induction_P Parameter: Age (day) Value: 7
  misc_feature: MA Experiment 20001450 PARAMETER Experiment Name: At_Far-red-induction_P Parameter: Light Value: Far-red vs. White
  misc_feature: MA Experiment 20001450 PARAMETER Experiment Name: At_Far-red-induction_P Parameter: Organism Value: A. thaliana
  misc_feature: MA Experiment 20001450 PARAMETER Experiment Name: At_Far-red-induction_P Parameter: Plant Line Value: Columbia
  misc_feature: MA Experiment 20001450 PARAMETER Experiment Name: At_Far-red-induction_P Parameter: Timepoint (hr) Value: 8
  misc_feature: MA Experiment 20001450 PARAMETER Experiment Name: At_Far-red-induction_P Parameter: Tissue Value: Whole Plant
  misc_feature: MA Experiment ID: 20001757 Result: Up-regulated in Transcription
  misc_feature: MA Experiment 20001757 PARAMETER Experiment Name: At_50mM_NH4NO3_L-to-H_P Parameter: Timepoint (hr) Value: 6
  misc_feature: MA Experiment 20001757 PARAMETER Experiment Name: At_50mM_NH4NO3_L-to-H_P Parameter: Tissue Value: Leaf
  misc_feature: MA Experiment 20001757 PARAMETER Experiment Name: At_50mM_NH4NO3_L-to-H_P Parameter: Treatment Value: 50mM NH4NO3 vs 100mM Mannitol
  misc_feature: MA Experiment ID: 20001905 Result: Down-regulated in Transcription
  misc_feature: MA Experiment 20001905 PARAMETER Experiment Name: At_Drought_Reproduction_P Parameter: Age (day) Value: 40
  misc_feature: MA Experiment 20001905 PARAMETER Experiment Name: At_Drought_Reproduction_P Parameter: Organism Value: A. thaliana
  misc_feature: MA Experiment 20001905 PARAMETER Experiment Name: At_Drought_Reproduction_P Parameter: Plant Line Value: WS
  misc_feature: MA Experiment 20001905 PARAMETER Experiment Name: At_Drought_Reproduction_P Parameter: Timepoint (day) Value: 10
  misc_feature: MA Experiment 20001905 PARAMETER Experiment Name: At_Drought_Reproduction_P Parameter: Tissue Value: Rosettes
  misc_feature: MA Experiment 20001905 PARAMETER Experiment Name: At_Drought_Reproduction_P Parameter: Treatment Value: Drought vs. No Drought
atttctatttcacatctgagagcttttttcgtttcttgtgagatcatctaaaaaatggcttcgactgtttcgctttctttactcagcggcggcagtggagctcttcaggcgcgttgcgcaagaaccgcgcatgttagcccacgagcggcgcattctaacaaacccgcgctttcttcgttctcgctgaccggcgcctctcgcaggaatctgttattttcgttgacggcagcgacggtagtgacgggacttcagcctgcatcaatggcggagaatattccgttatttggtataagaaagaaactgaagaaagcagaagaagaagcggtggagatcgtgaaagaaggctttgagacggcggagaaaggcgttgatgcggcggagaaaggattagaagcggcggagagaggtgtagagacggcagagaaggaaatcgtgacggcggttagctttaatggattgacacaagctggagccgtcgtggcggctgagttcgtcggagttcttgtcgctacgtcagtagtgaatgggattttaggaccagaagcccagaaatcttaggaataacctaatgctatatgtacttttgtgttggagttaaaaaaatatttgtctaaatttttgctgttaattatgttttgtaatatcataaaccatacccagagatgaagaagatcagaattatgtggtct

SEQ ID NO: 31053 - protein, 167 aa, Arabidopsis thaliana
  peptide (1)..(167): Ceres Seq. ID no. 12322671
  misc_feature (1)..(167): Homolog of NCBI NO: 21554083 NR Description: unknown [Arabidopsis thaliana]
  misc_feature (1)..(167): Homolog of NCBI NO: 18400342 NR Description: expressed protein
MASTVSLSLLSGGSGALQARCARTAHVSPRAAHSNKPALSSFSLTGASRRNLLFSLTAATVVTGLQPASMAENIPLFGIRKKLKKAEEEAVEIVKEGFETAEKGVDAAEKGLEAAERGVETAEKEIVTAVSFNGLTQAGAVVAAEFVGVLVATSVVNGILGPEAQKS

SEQ ID NO: 31054 - protein, 98 aa, Arabidopsis thaliana
  peptide (1)..(98): Ceres Seq. ID no. 12322672
  misc_feature (1)..(98): Homolog of NCBI NO: 21554083 NR Description: unknown [Arabidopsis thaliana]
  misc_feature (1)..(98): Homolog of NCBI NO: 18400342 NR Description: expressed protein
MAENIPLFGIRKKLKKAEEEAVEIVKEGFETAEKGVDAAEKGLEAAERGVETAEKEIVTAVSFNGLTQAGAVVAAEFVGVLVATSVVNGILGPEAQKS

SEQ ID NO: 31055 - DNA, 701 bp, Arabidopsis thaliana
  misc_feature (1)..(701): Ceres Seq. ID no. 13592829
  misc_feature: MA Experiment ID: 20000180 Result: Up-regulated in Transcription
  misc_feature: MA Experiment 20000180 PARAMETER Experiment Name: At_Germinating_Seeds_P Parameter: Age (hr) Value: 24 vs. 0
  misc_feature: MA Experiment 20000180 PARAMETER Experiment Name: At_Germinating_Seeds_P Parameter: Tissue Value: Germinating Seeds
  misc_feature: MA Experiment ID: 20000184 Result: Up-regulated in Transcription
  misc_feature: MA Experiment 20000184 PARAMETER Experiment Name: At_Shoots__P Parameter: Age (day) Value: 7
  misc_feature: MA Experiment 20000184 PARAMETER Experiment Name: At_Shoots__P Parameter: Tissue Value: Shoots vs. Whole Plant
  misc_feature: MA Experiment ID: 20000185 Result: Down-regulated in Transcription
  misc_feature: MA Experiment 20000185 PARAMETER Experiment Name: At_Roots__P Parameter: Age (day) Value: 7 vs. 21
  misc_feature: MA Experiment 20000185 PARAMETER Experiment Name: At_Roots__P Parameter: Organism Value: A. thaliana
  misc_feature: MA Experiment 20000185 PARAMETER Experiment Name: At_Roots__P Parameter: Tissue Value: Roots vs. Whole Plant
  misc_feature: MA Experiment ID: 20000437 Result: Down-regulated in Transcription
  misc_feature: MA Experiment 20000437 PARAMETER Experiment Name: At_Drought_P Parameter: Age (day) Value: 8
  misc_feature: MA Experiment 20000437 PARAMETER Experiment Name: At_Drought_P Parameter: Organism Value: A. thaliana
  misc_feature: MA Experiment 20000437 PARAMETER Experiment Name: At_Drought_P Parameter: Plant Line Value: WS
  misc_feature: MA Experiment 20000437 PARAMETER Experiment Name: At_Drought_P Parameter: Timepoint (hr) Value: 24
  misc_feature: MA Experiment 20000437 PARAMETER Experiment Name: At_Drought_P Parameter: Tissue Value: Whole Plant
  misc_feature: MA Experiment 20000437 PARAMETER Experiment Name: At_Drought_P Parameter: Treatment Value: Drought vs. No Drought
  misc_feature: MA Experiment ID: 20000438 Result: Up-regulated in Transcription
  misc_feature: MA Experiment 20000438 PARAMETER Experiment Name: At_Shoots__P Parameter: Age (day) Value: 14
  misc_feature: MA Experiment 20000438 PARAMETER Experiment Name: At_Shoots__P Parameter: Tissue Value: Shoots vs. Whole Plant
  misc_feature: MA Experiment ID: 20000439 Result: Down-regulated in Transcription
  misc_feature: MA Experiment 20000439 PARAMETER Experiment Name: At_Roots__P Parameter: Age (day) Value: 14 vs. 21
  misc_feature: MA Experiment 20000439 PARAMETER Experiment Name: At_Roots__P Parameter: Organism Value: A. thaliana
  misc_feature: MA Experiment 20000439 PARAMETER Experiment Name: At_Roots__P Parameter: Tissue Value: Roots vs. Whole Plant
  misc_feature: MA Experiment ID: 20000453 Result: Down-regulated in Transcription
  misc_feature: MA Experiment 20000453 PARAMETER Experiment Name: At_100uM_ABA_P Parameter: Age (day) Value: 15
  misc_feature: MA Experiment 20000453 PARAMETER Experiment Name: At_100uM_ABA_P Parameter: Organism Value: A. thaliana
  misc_feature: MA Experiment 20000453 PARAMETER Experiment Name: At_100uM_ABA_P Parameter: Plant Line Value: WS
  misc_feature: MA Experiment 20000453 PARAMETER Experiment Name: At_100uM_ABA_P Parameter: Timepoint (hr) Value: 24
  misc_feature: MA Experiment 20000453 PARAMETER Experiment Name: At_100uM_ABA_P Parameter: Tissue Value: Aerial
  misc_feature: MA Experiment 20000453 PARAMETER Experiment Name: At_100uM_ABA_P Parameter: Treatment Value: 100uM ABA vs. No Treatment
  misc_feature: MA Experiment ID: 20000495 Result: Down-regulated in Transcription
  misc_feature: MA Experiment 20000495 PARAMETER Experiment Name: At_Guard_Cells_P Parameter: Harvest Date Value: 8/2/2002
  misc_feature: MA Experiment 20000495 PARAMETER Experiment Name: At_Guard_Cells_P Parameter: Organism Value: A. thaliana
  misc_feature: MA Experiment 20000495 PARAMETER Experiment Name: At_Guard_Cells_P Parameter: Tissue Value: Guard Cells vs. Leaves
  misc_feature: MA Experiment ID: 20001248 Result: Down-regulated in Transcription
  misc_feature: MA Experiment 20001248 PARAMETER Experiment Name: At_Far-red-induction_P Parameter: Age (day) Value: 7
  misc_feature: MA Experiment 20001248 PARAMETER Experiment Name: At_Far-red-induction_P Parameter: Light Value: Far-red vs. White
  misc_feature: MA Experiment 20001248 PARAMETER Experiment Name: At_Far-red-induction_P Parameter: Organism Value: A. thaliana
  misc_feature: MA Experiment 20001248 PARAMETER Experiment Name: At_Far-red-induction_P Parameter: Plant Line Value: Columbia
  misc_feature: MA Experiment 20001248 PARAMETER Experiment Name: At_Far-red-induction_P Parameter: Timepoint (hr) Value: 4
  misc_feature: MA Experiment 20001248 PARAMETER Experiment Name: At_Far-red-induction_P Parameter: Tissue Value: Whole Plant
  misc_feature: MA Experiment ID: 20001450 Result: Down-regulated in Transcription
  misc_feature: MA Experiment 20001450 PARAMETER Experiment Name: At_Far-red-induction_P Parameter: Age (day) Value: 7
  misc_feature: MA Experiment 20001450 PARAMETER Experiment Name: At_Far-red-induction_P Parameter: Light Value: Far-red vs. White
  misc_feature: MA Experiment 20001450 PARAMETER Experiment Name: At_Far-red-induction_P Parameter: Organism Value: A. thaliana
  misc_feature: MA Experiment 20001450 PARAMETER Experiment Name: At_Far-red-induction_P Parameter: Plant Line Value: Columbia
  misc_feature: MA Experiment 20001450 PARAMETER Experiment Name: At_Far-red-induction_P Parameter: Timepoint (hr) Value: 8
  misc_feature: MA Experiment 20001450 PARAMETER Experiment Name: At_Far-red-induction_P Parameter: Tissue Value: Whole Plant
  misc_feature: MA Experiment ID: 20001757 Result: Up-regulated in Transcription
  misc_feature: MA Experiment 20001757 PARAMETER Experiment Name: At_50mM_NH4NO3_L-to-H_P Parameter: Timepoint (hr) Value: 6
  misc_feature: MA Experiment 20001757 PARAMETER Experiment Name: At_50mM_NH4NO3_L-to-H_P Parameter: Tissue Value: Leaf
  misc_feature: MA Experiment 20001757 PARAMETER Experiment Name: At_50mM_NH4NO3_L-to-H_P Parameter: Treatment Value: 50mM NH4NO3 vs 100mM Mannitol
  misc_feature: MA Experiment ID: 20001905 Result: Down-regulated in Transcription
  misc_feature: MA Experiment 20001905 PARAMETER Experiment Name: At_Drought_Reproduction_P Parameter: Age (day) Value: 40
  misc_feature: MA Experiment 20001905 PARAMETER Experiment Name: At_Drought_Reproduction_P Parameter: Organism Value: A. thaliana
  misc_feature: MA Experiment 20001905 PARAMETER Experiment Name: At_Drought_Reproduction_P Parameter: Plant Line Value: WS
  misc_feature: MA Experiment 20001905 PARAMETER Experiment Name: At_Drought_Reproduction_P Parameter: Timepoint (day) Value: 10
  misc_feature: MA Experiment 20001905 PARAMETER Experiment Name: At_Drought_Reproduction_P Parameter: Tissue Value: Rosettes
  misc_feature: MA Experiment 20001905 PARAMETER Experiment Name: At_Drought_Reproduction_P Parameter: Treatment Value: Drought vs. No Drought
  misc_feature: Pfam Name: DUF1118 Pfam Description: Protein of unknown function (DUF1118)
attgaagaaaaagctttgacaaaaccagggaaagagacagagagagataatggcggctaaactaatctgttcgtctttaacagtgcattcaatggcaaataagaagccatcaccttctgctgcaacaagaacaataacctcaaagaagagcacagcgactccacaggtgaaactgctgacaagagtcgagcagctcaagcttctgaccaaagccgagaaagcaggacttttgtctttagcagagaaatcaggtttctctctatcgaccatcgagcgtcttggattgctgaccaaagcagaggagttcggcgttttgtctgccgccacaaacccggaaacgcctggaacgttattcactttgagcctcggtttactccttcttggaccggtttttgcatatgtggttcctgaagattacacttgggaagtagtgattcaggttcttgtggctctactctctgttcttggtggctctgctgcttttgctgcttctggttttgtctccaatttgcagaaatctgattagcccgatcgttttttttttgtatcaaatatatttacccggtgtagcaagagacttttctgcatttaagatgaaaactttataatgtatttgatctacattgtatcaaccagtcattttcactattttctatctatgtaaatggtttcatatacagaatccaagagaaacgttttgc

SEQ ID NO: 31056 - protein, 158 aa, Arabidopsis thaliana
  peptide (1)..(158): Ceres Seq. ID no. 15221171
  misc_feature: Pfam Name: DUF1118 Pfam Description: Protein of unknown function (DUF1118)
  misc_feature (40)..(158): Homolog of NCBI NO: 25406370 NR Description: hypothetical protein F25A4.30 [imported] -
  misc_feature (40)..(158): Homolog of NCBI NO: 18410681 NR Description: expressed protein [Arabidopsis thaliana]
  misc_feature (39)..(158): Homolog of NCBI NO: 34912136 NR Description: OSJNBb0024F06.20 [Oryza sativa (japonica
  misc_feature (1)..(158): Homolog of NCBI NO: 17978981 NR Description: AT5g08050/F13G24_250 [Arabidopsis thaliana]
  misc_feature (1)..(158): Homolog of NCBI NO: 15241507 NR Description: expressed protein [Arabidopsis thaliana]
MAAKLICSSLTVHSMANKKPSPSAATRTITSKKSTATPQVKLLTRVEQLKLLTKAEKAGLLSLAEKSGFSLSTIERLGLLTKAEEFGVLSAATNPETPGTLFTLSLGLLLLGPVFAYVVPEDYTWEVVIQVLVALLSVLGGSAAFAASGFVSNLQKSD

SEQ ID NO: 31057 - protein, 144 aa, Arabidopsis thaliana
  peptide (1)..(144): Ceres Seq. ID no. 15221172
  misc_feature: Pfam Name: DUF1118 Pfam Description: Protein of unknown function (DUF1118)
  misc_feature (26)..(144): Homolog of NCBI NO: 25406370 NR Description: hypothetical protein F25A4.30 [imported] -
  misc_feature (26)..(144): Homolog of NCBI NO: 18410681 NR Description: expressed protein [Arabidopsis thaliana]
  misc_feature (25)..(144): Homolog of NCBI NO: 34912136 NR Description: OSJNBb0024F06.20 [Oryza sativa (japonica
  misc_feature (1)..(144): Homolog of NCBI NO: 17978981 NR Description: AT5g08050/F13G24_250 [Arabidopsis thaliana]
  misc_feature (1)..(144): Homolog of NCBI NO: 15241507 NR Description: expressed protein [Arabidopsis thaliana]
MANKKPSPSAATRTITSKKSTATPQVKLLTRVEQLKLLTKAEKAGLLSLAEKSGFSLSTIERLGLLTKAEEFGVLSAATNPETPGTLFTLSLGLLLLGPVFAYVVPEDYTWEVVIQVLVALLSVLGGSAAFAASGFVSNLQKSD

SEQ ID NO: 31058 - DNA, 960 bp, Arabidopsis thaliana
  misc_feature (1)..(960): Ceres Seq. ID no. 12339034
  misc_feature: MA Experiment ID: 108461 Result: Up-regulated in Transcription
  misc_feature: MA Experiment 108461 PARAMETER Experiment Name: At_Germinating_Seeds_cDNA_P Parameter: Age (day) Value: 1 vs. 0
  misc_feature: MA Experiment 108461 PARAMETER Experiment Name: At_Germinating_Seeds_cDNA_P Parameter: Tissue Value: Germinating Seeds
  misc_feature: MA Experiment ID: 108462 Result: Up-regulated in Transcription
  misc_feature: MA Experiment 108462 PARAMETER Experiment Name: At_Germinating_Seeds_cDNA_P Parameter: Age (day) Value: 2 vs. 0
  misc_feature: MA Experiment 108462 PARAMETER Experiment Name: At_Germinating_Seeds_cDNA_P Parameter: Tissue Value: Germinating Seeds
  misc_feature: MA Experiment ID: 108463 Result: Up-regulated in Transcription
  misc_feature: MA Experiment 108463 PARAMETER Experiment Name: At_Germinating_Seeds_cDNA_P Parameter: Age (day) Value: 3 vs. 0
  misc_feature: MA Experiment 108463 PARAMETER Experiment Name: At_Germinating_Seeds_cDNA_P Parameter: Tissue Value: Germinating Seeds
  misc_feature: MA Experiment ID: 108464 Result: Up-regulated in Transcription
  misc_feature: MA Experiment 108464 PARAMETER Experiment Name: At_Germinating_Seeds_cDNA_P Parameter: Age (day) Value: 4 vs. 0
  misc_feature: MA Experiment 108464 PARAMETER Experiment Name: At_Germinating_Seeds_cDNA_P Parameter: Tissue Value: Germinating Seeds
  misc_feature: MA Experiment ID: 108585 Result: Down-regulated in Transcription
  misc_feature: MA Experiment 108585 PARAMETER Experiment Name: At_5mM_NaNP_cDNA_P Parameter: Timepoint (hr) Value: 6
  misc_feature: MA Experiment 108585 PARAMETER Experiment Name: At_5mM_NaNP_cDNA_P Parameter: Tissue Value: Aerial
  misc_feature: MA Experiment 108585 PARAMETER Experiment Name: At_5mM_NaNP_cDNA_P Parameter: Treatment Value: null
  misc_feature: MA Experiment ID: 108595 Result: Down-regulated in Transcription
  misc_feature: MA Experiment 108595 PARAMETER Experiment Name: At_Ler-pi_Ovule_cDNA_P Parameter: Plant Line Value: null
  misc_feature: MA Experiment ID: 20000112 Result: Down-regulated in Transcription
  misc_feature: MA Experiment 20000112 PARAMETER Experiment Name: At_42deg_Heat_cDNA_P Parameter: Temperature (deg C) Value: 42 vs. 22
  misc_feature: MA Experiment 20000112 PARAMETER Experiment Name: At_42deg_Heat_cDNA_P Parameter: Timepoint (hr) Value: 2
  misc_feature: MA Experiment 20000112 PARAMETER Experiment Name: At_42deg_Heat_cDNA_P Parameter: Tissue Value: Aerial
  misc_feature: MA Experiment ID: 20000113 Result: Down-regulated in Transcription
  misc_feature: MA Experiment 20000113 PARAMETER Experiment Name: At_42deg_Heat_cDNA_P Parameter: Temperature (deg C) Value: 42 vs. 22
  misc_feature: MA Experiment 20000113 PARAMETER Experiment Name: At_42deg_Heat_cDNA_P Parameter: Timepoint (hr) Value: 8
  misc_feature: MA Experiment 20000113 PARAMETER Experiment Name: At_42deg_Heat_cDNA_P Parameter: Tissue Value: Aerial
  misc_feature: MA Experiment ID: 20000173 Result: Down-regulated in Transcription
  misc_feature: MA Experiment 20000173 PARAMETER Experiment Name: At_42deg_Heat_P Parameter: Age (day) Value: 14
  misc_feature: MA Experiment 20000173 PARAMETER Experiment Name: At_42deg_Heat_P Parameter: Organism Value: A. thaliana
  misc_feature: MA Experiment 20000173 PARAMETER Experiment Name: At_42deg_Heat_P Parameter: Plant Line Value: WS
  misc_feature: MA Experiment 20000173 PARAMETER Experiment Name: At_42deg_Heat_P Parameter: Temperature (deg C) Value: 42 vs. 22
  misc_feature: MA Experiment 20000173 PARAMETER Experiment Name: At_42deg_Heat_P Parameter: Timepoint (hr) Value: 6
  misc_feature: MA Experiment 20000173 PARAMETER Experiment Name: At_42deg_Heat_P Parameter: Tissue Value: Aerial
  misc_feature: MA Experiment ID: 20000180 Result: Up-regulated in Transcription
  misc_feature: MA Experiment 20000180 PARAMETER Experiment Name: At_Germinating_Seeds_P Parameter: Age (hr) Value: 24 vs. 0
  misc_feature: MA Experiment 20000180 PARAMETER Experiment Name: At_Germinating_Seeds_P Parameter: Tissue Value: Germinating Seeds
  misc_feature: MA Experiment ID: 20000224 Result: Up-regulated in Transcription
  misc_feature: MA Experiment ID: 20000264 Result: Up-regulated in Transcription
  misc_feature: MA Experiment 20000264 PARAMETER Experiment Name: At_Open_Flower_P Parameter: Age (day) Value: 21
  misc_feature: MA Experiment 20000264 PARAMETER Experiment Name: At_Open_Flower_P Parameter: Plant Line Value: WS
  misc_feature: MA Experiment 20000264 PARAMETER Experiment Name: At_Open_Flower_P Parameter: Tissue Value: Open Flower vs. Whole Plant
  misc_feature: MA Experiment ID: 20000286 Result: Up-regulated in Transcription
  misc_feature: MA Experiment 20000286 PARAMETER Experiment Name: At_Open_Flower_P Parameter: Age (day) Value: 21
  misc_feature: MA Experiment 20000286 PARAMETER Experiment Name: At_Open_Flower_P Parameter: Plant Line Value: WS
  misc_feature: MA Experiment 20000286 PARAMETER Experiment Name: At_Open_Flower_P Parameter: Tissue Value: Half Open vs. Whole Plant
  misc_feature: MA Experiment ID: 20000307 Result: Up-regulated in Transcription
  misc_feature: MA Experiment 20000307 PARAMETER Experiment Name: At_Germinating_Seeds_Sub_P Parameter: Age (hr) Value: 24 vs. 0
  misc_feature: MA Experiment 20000307 PARAMETER Experiment Name: At_Germinating_Seeds_Sub_P Parameter: Organism Value: A. thaliana
  misc_feature: MA Experiment 20000307 PARAMETER Experiment Name: At_Germinating_Seeds_Sub_P Parameter: Plant Line Value: WS
  misc_feature: MA Experiment 20000307 PARAMETER Experiment Name: At_Germinating_Seeds_Sub_P Parameter: Tissue Value: Germinating Seeds
  misc_feature: MA Experiment ID: 20000327 Result: Down-regulated in Transcription
  misc_feature: MA Experiment 20000327 PARAMETER Experiment Name: At_42deg_Heat_Sub_P Parameter: Age (day) Value: 14
  misc_feature: MA Experiment 20000327 PARAMETER Experiment Name: At_42deg_Heat_Sub_P Parameter: Organism Value: A. thaliana
  misc_feature: MA Experiment 20000327 PARAMETER Experiment Name: At_42deg_Heat_Sub_P Parameter: Plant Line Value: WS
  misc_feature: MA Experiment 20000327 PARAMETER Experiment Name: At_42deg_Heat_Sub_P Parameter: Temperature (deg C) Value: 42 vs. 22
  misc_feature: MA Experiment 20000327 PARAMETER Experiment Name: At_42deg_Heat_Sub_P Parameter: Timepoint (hr) Value: 1
  misc_feature: MA Experiment 20000327 PARAMETER Experiment Name: At_42deg_Heat_Sub_P Parameter: Tissue Value: Aerial
  misc_feature: MA Experiment ID: 20000328 Result: Down-regulated in Transcription
  misc_feature: MA Experiment 20000328 PARAMETER Experiment Name: At_42deg_Heat_Sub_P Parameter: Age (day) Value: 14
  misc_feature: MA Experiment 20000328 PARAMETER Experiment Name: At_42deg_Heat_Sub_P Parameter: Organism Value: A. thaliana
  misc_feature: MA Experiment 20000328 PARAMETER Experiment Name: At_42deg_Heat_Sub_P Parameter: Plant Line Value: WS
  misc_feature: MA Experiment 20000328 PARAMETER Experiment Name: At_42deg_Heat_Sub_P Parameter: Temperature (deg C) Value: 42 vs. 22
  misc_feature: MA Experiment 20000328 PARAMETER Experiment Name: At_42deg_Heat_Sub_P Parameter: Timepoint (hr) Value: 6
  misc_feature: MA Experiment 20000328 PARAMETER Experiment Name: At_42deg_Heat_Sub_P Parameter: Tissue Value: Aerial
  misc_feature: MA Experiment ID: 20000437 Result: Down-regulated in Transcription
  misc_feature: MA Experiment 20000437 PARAMETER Experiment Name: At_Drought_P Parameter: Age (day) Value: 8
  misc_feature: MA Experiment 20000437 PARAMETER Experiment Name: At_Drought_P Parameter: Organism Value: A. thaliana
  misc_feature: MA Experiment 20000437 PARAMETER Experiment Name: At_Drought_P Parameter: Plant Line Value: WS
  misc_feature: MA Experiment 20000437 PARAMETER Experiment Name: At_Drought_P Parameter: Timepoint (hr) Value: 24
  misc_feature: MA Experiment 20000437 PARAMETER Experiment Name: At_Drought_P Parameter: Tissue Value: Whole Plant
  misc_feature: MA Experiment 20000437 PARAMETER Experiment Name: At_Drought_P Parameter: Treatment Value: Drought vs. No Drought
  misc_feature: MA Experiment ID: 20000794 Result: Up-regulated in Transcription
  misc_feature: MA Experiment 20000794 PARAMETER Experiment Name: At_Petals_P Parameter: Age (day) Value: 23-25 days
  misc_feature: MA Experiment 20000794 PARAMETER Experiment Name: At_Petals_P Parameter: Plant Line Value: WS
  misc_feature: MA Experiment 20000794 PARAMETER Experiment Name: At_Petals_P Parameter: Tissue Value: Petals vs. Whole plant
  misc_feature: MA Experiment ID: 20001555 Result: Down-regulated in Transcription
  misc_feature: MA Experiment 20001555 PARAMETER Experiment Name: At_Drought_Soil_Dry_P Parameter: Age (day) Value: 24
  misc_feature: MA Experiment 20001555 PARAMETER Experiment Name: At_Drought_Soil_Dry_P Parameter: Organism Value: A. thaliana
  misc_feature: MA Experiment 20001555 PARAMETER Experiment Name: At_Drought_Soil_Dry_P Parameter: Plant Line Value: WS
  misc_feature: MA Experiment 20001555 PARAMETER Experiment Name: At_Drought_Soil_Dry_P Parameter: Post Timepoint (hr) Value: None
  misc_feature: MA Experiment 20001555 PARAMETER Experiment Name: At_Drought_Soil_Dry_P Parameter: Post-Treatment Value: None
  misc_feature: MA Experiment 20001555 PARAMETER Experiment Name: At_Drought_Soil_Dry_P Parameter: Timepoint (day) Value: 10
  misc_feature: MA Experiment 20001555 PARAMETER Experiment Name: At_Drought_Soil_Dry_P Parameter: Treatment Value: Drought vs. No Drought
  misc_feature: MA Experiment ID: 20001911 Result: Down-regulated in Transcription
  misc_feature: MA Experiment 20001911 PARAMETER Experiment Name: At_Drought_Reproduction_P Parameter: Age (day) Value: 40
  misc_feature: MA Experiment 20001911 PARAMETER Experiment Name: At_Drought_Reproduction_P Parameter: Organism Value: A. thaliana
  misc_feature: MA Experiment 20001911 PARAMETER Experiment Name: At_Drought_Reproduction_P Parameter: Plant Line Value: WS
  misc_feature: MA Experiment 20001911 PARAMETER Experiment Name: At_Drought_Reproduction_P Parameter: Timepoint (day) Value: 10
  misc_feature: MA Experiment 20001911 PARAMETER Experiment Name: At_Drought_Reproduction_P Parameter: Tissue Value: Flowers
  misc_feature: MA Experiment 20001911 PARAMETER Experiment Name: At_Drought_Reproduction_P Parameter: Treatment Value: Drought vs. No Drought
ctaccaatttcaagatctggtcgtcgctcacaggagaaacgtaatggaaaacaaagagaccaagcaagaaccagcagcagcagctgagcaaaagaccgttccgttgatcgaagatgagatcgagaggagcaaagtcgggatcatgagagctctctgcgaccgacaagatcctgaaactaaggaggtggatgatctgatgataaggaggtttctgagagcgcgtgacctggacattgaaaaggcttcaacgatgtttctaaattacctgacttggaagagaagcatgctcccaaaggggcacataccagaagcagagattgcaaatgatctatcgcataacaagatgtgtatgcaaggtcatgacaagatgggtcgacctatcgctgttgccattgggaacagacataacccttccaaaggcaaccctgacgagttcaagcgttttgttgtctacacgctcgagaagatttgtgctagaatgccgagaggtcaagagaaattcgtagcaattggagatctgcaaggctggggatattctaattgtgacatccgtggctaccttgctgctctttccactttgcaggattgttacccagagagattagggaaactctatatagttcatgccccctacattttcatgaccgcatggaaggtcatttatccttttatcgacgccaacaccaagaaaaagattgttttcgtggagaacaagaaactcactccaacgctgcttgaagacatagacgaaagccaacttcccgacatctacggaggcaaattgccacttgttcctattcaggagacctgattataggtcttactacggcccacctctatttccaaattattacttactagtattattttttatttgaataaaatgaaaaacatattgagtgtcgccaaatgccaacaattatatatttactgtcaaagaagctaaaagatataatattg

SEQ ID NO: 31059 - protein, 269 aa, Arabidopsis thaliana
  peptide (1)..(269): Ceres Seq. ID no. 12339035
  misc_feature (114)..(262): Pfam Name: CRAL/TRIO domain Pfam Description: CRAL/TRIO domain
  misc_feature (38)..(269): Homolog of NCBI NO: 17226662 NR Description: polyphosphoinositide binding protein [Gossypium
  misc_feature (78)..(269): Homolog of NCBI NO: 19347976 NR Description: putative polyphosphoinositide binding protein
  misc_feature (15)..(269): Homolog of NCBI NO: 15223439 NR Description: SEC14 cytosolic factor, putative
YQFQDLVVAHRRNVMENKETKQEPAAAAEQKTVPLIEDEIERSKVGIMRALCDRQDPETKEVDDLMIRRFLRARDLDIEKASTMFLNYLTWKRSMLPKGHIPEAEIANDLSHNKMCMQGHDKMGRPIAVAIGNRHNPSKGNPDEFKRFVVYTLEKICARMPRGQEKFVAIGDLQGWGYSNCDIRGYLAALSTLQDCYPERLGKLYIVHAPYIFMTAWKVIYPFIDANTKKKIVFVENKKLTPTLLEDIDESQLPDIYGGKLPLVPIQET

SEQ ID NO: 31060 - protein, 255 aa, Arabidopsis thaliana
  peptide (1)..(255): Ceres Seq. ID no. 12339037
  misc_feature (100)..(248): Pfam Name: CRAL/TRIO domain Pfam Description: CRAL/TRIO domain
  misc_feature (24)..(255): Homolog of NCBI NO: 17226662 NR Description: polyphosphoinositide binding protein [Gossypium
  misc_feature (64)..(255): Homolog of NCBI NO: 19347976 NR Description: putative polyphosphoinositide binding protein
  misc_feature (1)..(255): Homolog of NCBI NO: 15223439 NR Description: SEC14 cytosolic factor, putative
MENKETKQEPAAAAEQKTVPLIEDEIERSKVGIMRALCDRQDPETKEVDDLMIRRFLRARDLDIEKASTMFLNYLTWKRSMLPKGHIPEAEIANDLSHNKMCMQGHDKMGRPIAVAIGNRHNPSKGNPDEFKRFVVYTLEKICARMPRGQEKFVAIGDLQGWGYSNCDIRGYLAALSTLQDCYPERLGKLYIVHAPYIFMTAWKVIYPFIDANTKKKIVFVENKKLTPTLLEDIDESQLPDIYGGKLPLVPIQET

SEQ ID NO: 31061 - protein, 222 aa, Arabidopsis thaliana
  peptide (1)..(222): Ceres Seq. ID no. 12339038
  misc_feature (67)..(215): Pfam Name: CRAL/TRIO domain Pfam Description: CRAL/TRIO domain
  misc_feature (1)..(222): Homolog of NCBI NO: 17226662 NR Description: polyphosphoinositide binding protein [Gossypium
  misc_feature (31)..(222): Homolog of NCBI NO: 19347976 NR Description: putative polyphosphoinositide binding protein
  misc_feature (1)..(222): Homolog of NCBI NO: 15223439 NR Description: SEC14 cytosolic factor, putative
MRALCDRQDPETKEVDDLMIRRFLRARDLDIEKASTMFLNYLTWKRSMLPKGHIPEAEIANDLSHNKMCMQGHDKMGRPIAVAIGNRHNPSKGNPDEFKRFVVYTLEKICARMPRGQEKFVAIGDLQGWGYSNCDIRGYLAALSTLQDCYPERLGKLYIVHAPYIFMTAWKVIYPFIDANTKKKIVFVENKKLTPTLLEDIDESQLPDIYGGKLPLVPIQET

SEQ ID NO: 31062 - DNA, 800 bp, Arabidopsis thaliana
  misc_feature (1)..(800): Ceres Seq. ID no. 12321377
  misc_feature: MA Experiment ID: 108461 Result: Up-regulated in Transcription
  misc_feature: MA Experiment 108461 PARAMETER Experiment Name: At_Germinating_Seeds_cDNA_P Parameter: Age (day) Value: 1 vs. 0
  misc_feature: MA Experiment 108461 PARAMETER Experiment Name: At_Germinating_Seeds_cDNA_P Parameter: Tissue Value: Germinating Seeds
  misc_feature: MA Experiment ID: 108462 Result: Up-regulated in Transcription
  misc_feature: MA Experiment 108462 PARAMETER Experiment Name: At_Germinating_Seeds_cDNA_P Parameter: Age (day) Value: 2 vs. 0
  misc_feature: MA Experiment 108462 PARAMETER Experiment Name: At_Germinating_Seeds_cDNA_P Parameter: Tissue Value: Germinating Seeds
  misc_feature: MA Experiment ID: 108463 Result: Up-regulated in Transcription
  misc_feature: MA Experiment 108463 PARAMETER Experiment Name: At_Germinating_Seeds_cDNA_P Parameter: Age (day) Value: 3 vs. 0
  misc_feature: MA Experiment 108463 PARAMETER Experiment Name: At_Germinating_Seeds_cDNA_P Parameter: Tissue Value: Germinating Seeds
  misc_feature: MA Experiment ID: 108464 Result: Up-regulated in Transcription
  misc_feature: MA Experiment 108464 PARAMETER Experiment Name: At_Germinating_Seeds_cDNA_P Parameter: Age (day) Value: 4 vs. 0
  misc_feature: MA Experiment 108464 PARAMETER Experiment Name: At_Germinating_Seeds_cDNA_P Parameter: Tissue Value: Germinating Seeds
  misc_feature: MA Experiment ID: 20000111 Result: Down-regulated in Transcription
  misc_feature: MA Experiment 20000111 PARAMETER Experiment Name: At_42deg_Heat_cDNA_P Parameter: Temperature (deg C) Value: 42 vs. 22
  misc_feature: MA Experiment 20000111 PARAMETER Experiment Name: At_42deg_Heat_cDNA_P Parameter: Timepoint (hr) Value: 6
  misc_feature: MA Experiment 20000111 PARAMETER Experiment Name: At_42deg_Heat_cDNA_P Parameter: Tissue Value: Aerial
  misc_feature: MA Experiment ID: 20000113 Result: Down-regulated in Transcription
  misc_feature: MA Experiment 20000113 PARAMETER Experiment Name: At_42deg_Heat_cDNA_P Parameter: Temperature (deg C) Value: 42 vs. 22
  misc_feature: MA Experiment 20000113 PARAMETER Experiment Name: At_42deg_Heat_cDNA_P Parameter: Timepoint (hr) Value: 8
  misc_feature: MA Experiment 20000113 PARAMETER Experiment Name: At_42deg_Heat_cDNA_P Parameter: Tissue Value: Aerial
  misc_feature: MA Experiment ID: 20000179 Result: Up-regulated in Transcription
  misc_feature: MA Experiment 20000179 PARAMETER Experiment Name: At_Germinating_Seeds_P Parameter: Age (hr) Value: 6 vs. 0
  misc_feature: MA Experiment 20000179 PARAMETER Experiment Name: At_Germinating_Seeds_P Parameter: Tissue Value: Germinating Seeds
  misc_feature: MA Experiment ID: 20000180 Result: Up-regulated in Transcription
  misc_feature: MA Experiment 20000180 PARAMETER Experiment Name: At_Germinating_Seeds_P Parameter: Age (hr) Value: 24 vs. 0
  misc_feature: MA Experiment 20000180 PARAMETER Experiment Name: At_Germinating_Seeds_P Parameter: Tissue Value: Germinating Seeds
  misc_feature: MA Experiment ID: 20001911 Result: Down-regulated in Transcription
  misc_feature: MA Experiment 20001911 PARAMETER Experiment Name: At_Drought_Reproduction_P Parameter: Age (day) Value: 40
  misc_feature: MA Experiment 20001911 PARAMETER Experiment Name: At_Drought_Reproduction_P Parameter: Organism Value: A. thaliana
  misc_feature: MA Experiment 20001911 PARAMETER Experiment Name: At_Drought_Reproduction_P Parameter: Plant Line Value: WS
  misc_feature: MA Experiment 20001911 PARAMETER Experiment Name: At_Drought_Reproduction_P Parameter: Timepoint (day) Value: 10
  misc_feature: MA Experiment 20001911 PARAMETER Experiment Name: At_Drought_Reproduction_P Parameter: Tissue Value: Flowers
  misc_feature: MA Experiment 20001911 PARAMETER Experiment Name: At_Drought_Reproduction_P Parameter: Treatment Value: Drought vs. No Drought
gatagaaccaaaaaaaaaacacctccgatctcggcgagagaaagagaaacgatctgtgagagagaatggatcagatcttgaacaaggtaggctcgtactggttaggtaagaaggcgaacaagcagctcgattccgtcggtgacgatatcaactctctgtcttcgagcatcgaaggaggaacaaaatggttggtgaacaaaatcaaaggaaaaatgcagaagccattgcccgagttattaaaggagtttggtttgcctgtggggatctttccacgtgatgcaaccaactacgagttcaatgaacagacgaggaagttaactgtctttattccatcaatctgcgaagttggttacaaagatacatcagtcttgagattcaccactacagttaccggatttctcgagaagggaaagctagctgatgttgaagggatgaagacaaaagtaatgatatgggttaaagtcacaagtatttctgcagattcttcaaaggtacatttcacagcagggatgaagaaaagcagaagccgagatgcttatgaggttttaagagatggcgttgagattgataaattctagctctgttttgctggtaattctcaattcttttatcatctttctccaatctctatctttaaagtttcaagtttcttaaaaaaatggtttttgtatatgctgattttcaattatgttgaagttcatgaatttgataaactgaagaatatggttactcagtacaccaaacaatgttcttatgtcttttggtattacttactgagtcactgtttaagcatatgaccg

SEQ ID NO: 31063 - protein, 170 aa, Arabidopsis thaliana
  peptide (1)..(170): Ceres Seq. ID no. 12321378
  misc_feature (32)..(170): Pfam Name: Protein of unknown function, DUF538 Pfam Description: Protein of unknown function, DUF538
  misc_feature (56)..(167): Homolog of NCBI NO: 18397959 NR Description: expressed protein
  misc_feature (56)..(167): Homolog of NCBI NO: 6041854 NR Description: unknown protein [Arabidopsis thaliana]
  misc_feature (7)..(167): Homolog of NCBI NO: 21553803 NR Description: unknown [Arabidopsis thaliana]
  misc_feature (7)..(167): Homolog of NCBI NO: 18395537 NR Description: expressed protein
  misc_feature (1)..(170): Homolog of NCBI NO: 34914210 NR Description: OSJNBb0049O23.18 [Oryza sativa (japonica
  misc_feature (1)..(170): Homolog of NCBI NO: 40642817 NR Description: cp protein [Celosia cristata]
  misc_feature (1)..(170): Homolog of NCBI NO: 28466909 NR Description: At5g01610 [Arabidopsis thaliana]
  misc_feature (1)..(170): Homolog of NCBI NO: 15241019 NR Description: putative protein
  misc_feature (1)..(170): Homolog of NCBI NO: 15240103 NR Description: putative protein; protein id: At5g37070.1
  misc_feature (1)..(170): Homolog of NCBI NO: 18398279 NR Description: expressed protein
MDQILNKVGSYWLGKKANKQLDSVGDDINSLSSSIEGGTKWLVNKIKGKMQKPLPELLKEFGLPVGIFPRDATNYEFNEQTRKLTVFIPSICEVGYKDTSVLRFTTTVTGFLEKGKLADVEGMKTKVMIWVKVTSISADSSKVHFTAGMKKSRSRDAYEVLRDGVEIDKF

SEQ ID NO: 31064 - protein, 121 aa, Arabidopsis thaliana
  peptide (1)..(121): Ceres Seq. ID no. 12321379
  misc_feature (1)..(121): Pfam Name: Protein of unknown function, DUF538 Pfam Description: Protein of unknown function, DUF538
  misc_feature (7)..(118): Homolog of NCBI NO: 18397959 NR Description: expressed protein
  misc_feature (7)..(118): Homolog of NCBI NO: 6041854 NR Description: unknown protein [Arabidopsis thaliana]
  misc_feature (1)..(118): Homolog of NCBI NO: 21553803 NR Description: unknown [Arabidopsis thaliana]
  misc_feature (1)..(118): Homolog of NCBI NO: 18395537 NR Description: expressed protein
  misc_feature (1)..(121): Homolog of NCBI NO: 34914210 NR Description: OSJNBb0049O23.18 [Oryza sativa (japonica
  misc_feature (1)..(121): Homolog of NCBI NO: 40642817 NR Description: cp protein [Celosia cristata]
  misc_feature (1)..(121): Homolog of NCBI NO: 28466909 NR Description: At5g01610 [Arabidopsis thaliana]
  misc_feature (1)..(121): Homolog of NCBI NO: 15241019 NR Description: putative protein
  misc_feature (1)..(121): Homolog of NCBI NO: 15240103 NR Description: putative protein; protein id: At5g37070.1
  misc_feature (1)..(121): Homolog of NCBI NO: 18398279 NR Description: expressed protein
MQKPLPELLKEFGLPVGIFPRDATNYEFNEQTRKLTVFIPSICEVGYKDTSVLRFTTTVTGFLEKGKLADVEGMKTKVMIWVKVTSISADSSKVHFTAGMKKSRSRDAYEVLRDGVEIDKF

SEQ ID NO: 31065 - DNA, 999 bp, Arabidopsis thaliana
  misc_feature (1)..(999): Ceres Seq. ID no. 12321788
  misc_feature: MA Experiment ID: 108434 Result: Up-regulated in Transcription
  misc_feature: MA Experiment 108434 PARAMETER Experiment Name: At_Root_Tips_cDNA_P Parameter: Tissue Value: Root Tips
  misc_feature: MA Experiment ID: 108461 Result: Down-regulated in Transcription
  misc_feature: MA Experiment 108461 PARAMETER Experiment Name: At_Germinating_Seeds_cDNA_P Parameter: Age (day) Value: 1 vs. 0
  misc_feature: MA Experiment 108461 PARAMETER Experiment Name: At_Germinating_Seeds_cDNA_P Parameter: Tissue Value: Germinating Seeds
  misc_feature: MA Experiment ID: 108462 Result: Down-regulated in Transcription
  misc_feature: MA Experiment 108462 PARAMETER Experiment Name: At_Germinating_Seeds_cDNA_P Parameter: Age (day) Value: 2 vs. 0
  misc_feature: MA Experiment 108462 PARAMETER Experiment Name: At_Germinating_Seeds_cDNA_P Parameter: Tissue Value: Germinating Seeds
  misc_feature: MA Experiment ID: 108464 Result: Down-regulated in Transcription
  misc_feature: MA Experiment 108464 PARAMETER Experiment Name: At_Germinating_Seeds_cDNA_P Parameter: Age (day) Value: 4 vs. 0
  misc_feature: MA Experiment 108464 PARAMETER Experiment Name: At_Germinating_Seeds_cDNA_P Parameter: Tissue Value: Germinating Seeds
  misc_feature: MA Experiment ID: 20000227 Result: Up-regulated in Transcription
  misc_feature: MA Experiment 20000227 PARAMETER Experiment Name: At_Root-Tips-vs-Tops_P Parameter: Tissue Value: Root Tips vs. Root Tops
  misc_feature: MA Experiment ID: 20000264 Result: Up-regulated in Transcription
  misc_feature: MA Experiment 20000264 PARAMETER Experiment Name: At_Open_Flower_P Parameter: Age (day) Value: 21
  misc_feature: MA Experiment 20000264 PARAMETER Experiment Name: At_Open_Flower_P Parameter: Plant Line Value: WS
  misc_feature: MA Experiment 20000264 PARAMETER Experiment Name: At_Open_Flower_P Parameter: Tissue Value: Open Flower vs. Whole Plant
gaagtctttctctctcgatcaagccaagtaaaaaaaaaatcctaatctttgcgtcaccgttcgtgtttcctcttctctctagggttctccttcaacagttttccagtaaacatgagtcgtcatcctgaagtgaagtgggctgagactaccgagaagattttcctcactgtagtattagctgatactaaggataccaaggttaacctagacccagaaggagtctttgatttctctgcgaaagttggtccagaaaaccacgtttatgagctcaaactggaacttgccgataaagtcaatgttgaggaaagcaaaatcaacattggagagagaagcatattctgcataattgagaaagcagagccggaaaggtggaataagctactccgtgtgaagaagcccccacactatgtcaaggttgattgggacaagtgggttgatgaggacgatgaaggcagtgctggtgccgcagatatggatatggcaggaatggaaggaatgggaggaatgggaggcatgggccggcatgggaggaatgggtggaatgggtggaatgggtggaatgggaggaatggaaggaatggatttctcgaaattaatgggtggaatgggtggaatgggcggactcgaagggctcggtggaatgggaggcatgggtggaatgggaggcatgggtggaatgggagacatgggtggtatgggaggcatggaagagtttgaagacagtgatgatgaacaagagacagcaaaatcaggagacaagaaggatgatgccgttaaggaggaaggtcttgcgacagagaaggcaccagcggcagaagaaacaacatctgttaaggaagacaagtgaagactctgttctagagatgatgaaaaaccatatggtattattagcttttcaggtttatgaaaccctctgaattacttcctcttttatatgaatgttgttggtactctgttttctttctatggatttgatcttggtttaagtttcttctaccc

SEQ ID NO: 31066 - protein, 201 aa, Arabidopsis thaliana
  peptide (1)..(201): Ceres Seq. ID no. 12321789
  misc_feature (136)..(193): Pfam Name: Collagen triple helix repeat (20 copies) Pfam Description: Collagen triple helix repeat (20 copies)
  misc_feature (5)..(162): Homolog of NCBI NO: 23482571 NR Description: 34 kDa phosphoprotein [Plasmodium yoelii yoelii]
  misc_feature (5)..(136): Homolog of NCBI NO: 32398747 NR Description: p23 co-chaperone, probable [Cryptosporidium
  misc_feature (1)..(124): Homolog of NCBI NO: 22330824 NR Description: similar to p23 {Brassica napus}; protein id:
  misc_feature (1)..(127): Homolog of NCBI NO: 12231292 NR Description: ripening regulated protein DDTFR8 [Lycopersicon
  misc_feature (1)..(133): Homolog of NCBI NO: 11934654 NR Description: p23 [Brassica napus]
  misc_feature (1)..(131): Homolog of NCBI NO: 40882701 NR Description: putative ripening regulated protein
  misc_feature (1)..(169): Homolog of NCBI NO: 38637531 NR Description: putative p23 co-chaperone
  misc_feature (1)..(190): Homolog of NCBI NO: 11229591 NR Description: p23 co-chaperone [Arabidopsis thaliana]
  misc_feature (1)..(193): Homolog of NCBI NO: 30679149 NR Description: glycine-rich protein [Arabidopsis thaliana]
  misc_feature (3)..(157): Homolog of NCBI NO: 7487014 NR Description: hypothetical protein T14P8.5 - Arabidopsis
MSRHPEVKWAETTEKIFLTVVLADTKDTKVNLDPEGVFDFSAKVGPENHVYELKLELADKVNVEESKINIGERSIFCIIEKAEPERWNKLLRVKKPPHYVKVDWDKWVDEDDEGSAGAADMDMAGMEGMGGMGGMGRHGRNGWNGWNGWNGRNGRNGFLEINGWNGWNGRTRRARWNGRHGWNGRHGWNGRHGWYGRHGRV

SEQ ID NO: 31067 - protein, 146 aa, Arabidopsis thaliana
  peptide (1)..(146): Ceres Seq. ID no. 12321790
  misc_feature (42)..(99): Pfam Name: Keratin Pfam Description: Keratin
  misc_feature (25)..(101): Homolog of NCBI NO: 11229591 NR Description: p23 co-chaperone [Arabidopsis thaliana]
  misc_feature (36)..(146): Homolog of NCBI NO: 14495563 NR Description: 34 kDa phosphoprotein [Plasmodium berghei]
  misc_feature (23)..(101): Homolog of NCBI NO: 23482571 NR Description: 34 kDa phosphoprotein [Plasmodium yoelii yoelii]
  misc_feature (36)..(146): Homolog of NCBI NO: 23482571 NR Description: 34 kDa phosphoprotein [Plasmodium yoelii yoelii]
  misc_feature (25)..(137): Homolog of NCBI NO: 38637531 NR Description: putative p23 co-chaperone
  misc_feature (20)..(144): Homolog of NCBI NO: 30679149 NR Description: glycine-rich protein [Arabidopsis thaliana]
  misc_feature (87)..(133): Homolog of NCBI NO: 40882701 NR Description: putative ripening regulated protein
  misc_feature (39)..(146): Homolog of NCBI NO: 11229591 NR Description: p23 co-chaperone [Arabidopsis thaliana]
  misc_feature (39)..(146): Homolog of NCBI NO: 30679149 NR Description: glycine-rich protein [Arabidopsis thaliana]
  misc_feature (39)..(146): Homolog of NCBI NO: 7487014 NR Description: hypothetical protein T14P8.5 - Arabidopsis
MSRLIGTSGLMRTMKAVLVPQIWIWQEWKEWEEWEAWAGMGGMGGMGGMGGMGGMEGMDFSKLMGGMGGMGGLEGLGGMGGMGGMGGMGGMGDMGGMGGMEEFEDSDDEQETAKSGDKKDDAVKEEGLATEKAPAAEETTSVKEDK

SEQ ID NO: 31068 - protein, 136 aa, Arabidopsis thaliana
  peptide (1)..(136): Ceres Seq. ID no. 12321791
  misc_feature (32)..(89): Pfam Name: Keratin Pfam Description: Keratin
  misc_feature (15)..(91): Homolog of NCBI NO: 11229591 NR Description: p23 co-chaperone [Arabidopsis thaliana]
  misc_feature (26)..(136): Homolog of NCBI NO: 14495563 NR Description: 34 kDa phosphoprotein [Plasmodium berghei]
  misc_feature (13)..(91): Homolog of NCBI NO: 23482571 NR Description: 34 kDa phosphoprotein [Plasmodium yoelii yoelii]
  misc_feature (26)..(136): Homolog of NCBI NO: 23482571 NR Description: 34 kDa phosphoprotein [Plasmodium yoelii yoelii]
  misc_feature (15)..(127): Homolog of NCBI NO: 38637531 NR Description: putative p23 co-chaperone
  misc_feature (10)..(134): Homolog of NCBI NO: 30679149 NR Description: glycine-rich protein [Arabidopsis thaliana]
  misc_feature (77)..(123): Homolog of NCBI NO: 40882701 NR Description: putative ripening regulated protein
  misc_feature (29)..(136): Homolog of NCBI NO: 11229591 NR Description: p23 co-chaperone [Arabidopsis thaliana]
  misc_feature (29)..(136): Homolog of NCBI NO: 30679149 NR Description: glycine-rich protein [Arabidopsis thaliana]
  misc_feature (29)..(136): Homolog of NCBI NO: 7487014 NR Description: hypothetical protein T14P8.5 - Arabidopsis
MRTMKAVLVPQIWIWQEWKEWEEWEAWAGMGGMGGMGGMGGMGGMEGMDFSKLMGGMGGMGGLEGLGGMGGMGGMGGMGGMGDMGGMGGMEEFEDSDDEQETAKSGDKKDDAVKEEGLATEKAPAAEETTSVKEDK

SEQ ID NO: 31069 - DNA, 736 bp, Arabidopsis thaliana
  misc_feature (1)..(736): Ceres Seq. ID no. 13650656
  misc_feature: MA Experiment ID: 108434 Result: Down-regulated in Transcription
  misc_feature: MA Experiment 108434 PARAMETER Experiment Name: At_Root_Tips_cDNA_P Parameter: Tissue Value: Root Tips
  misc_feature: MA Experiment ID: 108461 Result: Up-regulated in Transcription
  misc_feature: MA Experiment 108461 PARAMETER Experiment Name: At_Germinating_Seeds_cDNA_P Parameter: Age (day) Value: 1 vs. 0
  misc_feature: MA Experiment 108461 PARAMETER Experiment Name: At_Germinating_Seeds_cDNA_P Parameter: Tissue Value: Germinating Seeds
  misc_feature: MA Experiment ID: 108462 Result: Up-regulated in Transcription
  misc_feature: MA Experiment 108462 PARAMETER Experiment Name: At_Germinating_Seeds_cDNA_P Parameter: Age (day) Value: 2 vs. 0
  misc_feature: MA Experiment 108462 PARAMETER Experiment Name: At_Germinating_Seeds_cDNA_P Parameter: Tissue Value: Germinating Seeds
  misc_feature: MA Experiment ID: 108463 Result: Up-regulated in Transcription
  misc_feature: MA Experiment 108463 PARAMETER Experiment Name: At_Germinating_Seeds_cDNA_P Parameter: Age (day) Value: 3 vs. 0
  misc_feature: MA Experiment 108463 PARAMETER Experiment Name: At_Germinating_Seeds_cDNA_P Parameter: Tissue Value: Germinating Seeds
  misc_feature: MA Experiment ID: 108595 Result: Up-regulated in Transcription
  misc_feature: MA Experiment 108595 PARAMETER Experiment Name: At_Ler-pi_Ovule_cDNA_P Parameter: Plant Line Value: null
  misc_feature: MA Experiment ID: 20000069 Result: Up-regulated in Transcription
  misc_feature: MA Experiment 20000069 PARAMETER Experiment Name: At_100uM_ABA_Mutants_cDNA_P Parameter: Plant Line Value: CS23
  misc_feature: MA Experiment 20000069 PARAMETER Experiment Name: At_100uM_ABA_Mutants_cDNA_P Parameter: Timepoint (hr) Value: 6
  misc_feature: MA Experiment 20000069 PARAMETER Experiment Name: At_100uM_ABA_Mutants_cDNA_P Parameter: Tissue Value: Aerial
  misc_feature: MA Experiment 20000069 PARAMETER Experiment Name: At_100uM_ABA_Mutants_cDNA_P Parameter: Treatment Value: 100uM ABA vs. No Treatment
  misc_feature: MA Experiment ID: 20000089 Result: Up-regulated in Transcription
  misc_feature: MA Experiment ID: 20000090 Result: Up-regulated in Transcription
  misc_feature: MA Experiment ID: 20000111 Result: Down-regulated in Transcription
  misc_feature: MA Experiment 20000111 PARAMETER Experiment Name: At_42deg_Heat_cDNA_P Parameter: Temperature (deg C) Value: 42 vs. 22
  misc_feature: MA Experiment 20000111 PARAMETER Experiment Name: At_42deg_Heat_cDNA_P Parameter: Timepoint (hr) Value: 6
  misc_feature: MA Experiment 20000111 PARAMETER Experiment Name: At_42deg_Heat_cDNA_P Parameter: Tissue Value: Aerial
  misc_feature: MA Experiment ID: 20000113 Result: Down-regulated in Transcription
  misc_feature: MA Experiment 20000113 PARAMETER Experiment Name: At_42deg_Heat_cDNA_P Parameter: Temperature (deg C) Value: 42 vs. 22
  misc_feature: MA Experiment 20000113 PARAMETER Experiment Name: At_42deg_Heat_cDNA_P Parameter: Timepoint (hr) Value: 8
  misc_feature: MA Experiment 20000113 PARAMETER Experiment Name: At_42deg_Heat_cDNA_P Parameter: Tissue Value: Aerial
  misc_feature: MA Experiment ID: 20000307 Result: Up-regulated in Transcription
  misc_feature: MA Experiment 20000307 PARAMETER Experiment Name: At_Germinating_Seeds_Sub_P Parameter: Age (hr) Value: 24 vs. 0
  misc_feature: MA Experiment 20000307 PARAMETER Experiment Name: At_Germinating_Seeds_Sub_P Parameter: Organism Value: A. thaliana
  misc_feature: MA Experiment 20000307 PARAMETER Experiment Name: At_Germinating_Seeds_Sub_P Parameter: Plant Line Value: WS
  misc_feature: MA Experiment 20000307 PARAMETER Experiment Name: At_Germinating_Seeds_Sub_P Parameter: Tissue Value: Germinating Seeds
  misc_feature: MA Experiment ID: 20000315 Result: Down-regulated in Transcription
  misc_feature: MA Experiment 20000315 PARAMETER Experiment Name: At_14day_Shoots-Roots_Sub_P Parameter: Age (day) Value: 14
  misc_feature: MA Experiment 20000315 PARAMETER Experiment Name: At_14day_Shoots-Roots_Sub_P Parameter: Organism Value: A. thaliana
  misc_feature: MA Experiment 20000315 PARAMETER Experiment Name: At_14day_Shoots-Roots_Sub_P Parameter: Plant Line Value: WS
  misc_feature: MA Experiment 20000315 PARAMETER Experiment Name: At_14day_Shoots-Roots_Sub_P Parameter: Tissue Value: Shoots vs. Whole Plant
  misc_feature: MA Experiment ID: 20000328 Result: Down-regulated in Transcription
  misc_feature: MA Experiment 20000328 PARAMETER Experiment Name: At_42deg_Heat_Sub_P Parameter: Age (day) Value: 14
  misc_feature: MA Experiment 20000328 PARAMETER Experiment Name: At_42deg_Heat_Sub_P Parameter: Organism Value: A. thaliana
  misc_feature: MA Experiment 20000328 PARAMETER Experiment Name: At_42deg_Heat_Sub_P Parameter: Plant Line Value: WS
  misc_feature: MA Experiment 20000328 PARAMETER Experiment Name: At_42deg_Heat_Sub_P Parameter: Temperature (deg C) Value: 42 vs. 22
  misc_feature: MA Experiment 20000328 PARAMETER Experiment Name: At_42deg_Heat_Sub_P Parameter: Timepoint (hr) Value: 6
  misc_feature: MA Experiment 20000328 PARAMETER Experiment Name: At_42deg_Heat_Sub_P Parameter: Tissue Value: Aerial
  misc_feature: MA Experiment ID: 20000347 Result: Up-regulated in Transcription
  misc_feature: MA Experiment 20000347 PARAMETER Experiment Name: At_2mM_SA_Sub_P Parameter: Age (day) Value: 14
  misc_feature: MA Experiment 20000347 PARAMETER Experiment Name: At_2mM_SA_Sub_P Parameter: Organism Value: A. thaliana
  misc_feature: MA Experiment 20000347 PARAMETER Experiment Name: At_2mM_SA_Sub_P Parameter: Plant Line Value: WS
  misc_feature: MA Experiment 20000347 PARAMETER Experiment Name: At_2mM_SA_Sub_P Parameter: Timepoint (hr) Value: 6
  misc_feature: MA Experiment 20000347 PARAMETER Experiment Name: At_2mM_SA_Sub_P Parameter: Tissue Value: Aerial
  misc_feature: MA Experiment 20000347 PARAMETER Experiment Name: At_2mM_SA_Sub_P Parameter: Treatment Value: 2mM SA vs. No Treatment
aaattacctagaacatcctaatcgaaaaaagtgttagcttttgatctttcttatattcttctctgaaatagtaacacactgtgaagagtttttcctacatctgaattttgtctgatccagctgagaacaggaaaaagaagaaaatggcgtttgtgacaactgcggaagtttgtgacgcgaatcaagagctgattcggagtggtcagctacgagctttgcaacccattttccagatttatggccgtcgacaaatattctcaggaccagttgtcactgtcaaagtttttgaagacaatggcttaatccgtcaattcatcgaggagaaaggaaacggtagagttcttgtggtggatggtggagggagtcaacgatgtgcaatactcggaggtaaccccgttgttcaagctcagaacaacggatgggcaggaatcgttgtgaacggatgcatcagagacgtcgatgagatcaacggttgtgatatcggagtgagagctttggcctctcatccgataaaagcgagtaagaaaggacttggagaacaacgagttccggtaaatatcgcagggactcggatttgtgatggtgaatggctttatgcagatactgatgggattcttgtctcccaaattgagttatccgtttaataaaaaaggctttgatcagttaccaaaaaaaaaaacagaacgtggtttgtgttcatcttcttgttacttaagagattgttgaattataatgc

SEQ ID NO: 31070 - protein, 166 aa, Arabidopsis thaliana; identical to SEQ ID NO: 29350
  peptide (1)..(166): Ceres Seq. ID no. 13650657
  misc_feature (2)..(159): Pfam Name: Demethylmenaquinone methyltransferase Pfam Description: Demethylmenaquinone methyltransferase
  misc_feature (6)..(166): Homolog of NCBI NO: 23468849 NR Description: hypothetical protein [Pseudomonas syringae pv.
  misc_feature (1)..(160): Homolog of NCBI NO: 34497095 NR Description: S-adenosylmethionine:2-demethylmenaquinone
  misc_feature (4)..(164): Homolog of NCBI NO: 17546073 NR Description: PROBABLE
  misc_feature (1)..(164): Homolog of NCBI NO: 22978085 NR Description: hypothetical protein [Ralstonia metallidurans]
  misc_feature (1)..(164): Homolog of NCBI NO: 22982141 NR Description: hypothetical protein [Burkholderia fungorum]
  misc_feature (1)..(166): Homolog of NCBI NO: 15241161 NR Description: dimethylmenaquinone methyltransferase family
  misc_feature (4)..(166): Homolog of NCBI NO: 34910724 NR Description: S-adenosylmethionine:2-demethylmenaquinone
  misc_feature (1)..(166): Homolog of NCBI NO: 15232963 NR Description: dimethylmenaquinone methyltransferase family
  misc_feature (1)..(166): Homolog of NCBI NO: 21537415 NR Description: S-adenosylmethionine:2-demethylmenaquinone
  misc_feature (1)..(166): Homolog of NCBI NO: 15237348 NR Description: dimethylmenaquinone methyltransferase family

SEQ ID NO: 31071 - DNA, 750 bp, Arabidopsis thaliana
  misc_feature (1)..(750): Ceres Seq. ID no. 13500273
  misc_feature: MA Experiment ID: 108434 Result: Up-regulated in Transcription
  misc_feature: MA Experiment 108434 PARAMETER Experiment Name: At_Root_Tips_cDNA_P Parameter: Tissue Value: Root Tips
  misc_feature: MA Experiment ID: 108462 Result: Down-regulated in Transcription
  misc_feature: MA Experiment 108462 PARAMETER Experiment Name: At_Germinating_Seeds_cDNA_P Parameter: Age (day) Value: 2 vs. 0
  misc_feature: MA Experiment 108462 PARAMETER Experiment Name: At_Germinating_Seeds_cDNA_P Parameter: Tissue Value: Germinating Seeds
  misc_feature: MA Experiment ID: 108463 Result: Down-regulated in Transcription
  misc_feature: MA Experiment 108463 PARAMETER Experiment Name: At_Germinating_Seeds_cDNA_P Parameter: Age (day) Value: 3 vs. 0
  misc_feature: MA Experiment 108463 PARAMETER Experiment Name: At_Germinating_Seeds_cDNA_P Parameter: Tissue Value: Germinating Seeds
  misc_feature: MA Experiment ID: 108577 Result: Down-regulated in Transcription
  misc_feature: MA Experiment 108577 PARAMETER Experiment Name: At_42deg_Heat_cDNA_P Parameter: Temperature (deg C) Value: 42 vs. 22
  misc_feature: MA Experiment 108577 PARAMETER Experiment Name: At_42deg_Heat_cDNA_P Parameter: Timepoint (hr) Value: 6
  misc_feature: MA Experiment 108577 PARAMETER Experiment Name: At_42deg_Heat_cDNA_P Parameter: Tissue Value: Aerial
  misc_feature: MA Experiment ID: 20000112 Result: Down-regulated in Transcription
  misc_feature: MA Experiment 20000112 PARAMETER Experiment Name: At_42deg_Heat_cDNA_P Parameter: Temperature (deg C) Value: 42 vs. 22
  misc_feature: MA Experiment 20000112 PARAMETER Experiment Name: At_42deg_Heat_cDNA_P Parameter: Timepoint (hr) Value: 2
  misc_feature: MA Experiment 20000112 PARAMETER Experiment Name: At_42deg_Heat_cDNA_P Parameter: Tissue Value: Aerial
accctaacaccctactaacacctccctctttcaatctccgatcaaatacaaacgcatacttccaatttcgccggcgaagatgcagcagaggaagccgacggcgggtagacccagtggtaccgatggatccgatttctcataccgcatggtcgttgactctcgttacacgaaggtcactaaagaaaaagctcgtctccgtcctttgatctttgttcaggctgcgatttatgtaatcggattatcgtgtgcgtttctaacaacaactaaaaaggatgagaagaacacccttgctattgcagctgctgttgctggcttagtgtgttcattgataggagaattaggttgcagacgtagcagagtaaaccttttgaggctctacacggctgcatcaaccattgttatggttctttctgtgttttgtgctgttaggagcagattaaccatggaggaacgcaatagctctggaacaaccgcgaagcttgagctcgcaggtttcatttgtgctcaattaggagcggtggtgcagatattagcgatcatcgttacagggtcccttgtcaataatatgtctccacctacgaaagcagcatagaggaacataaaatttgggcactgtcgtgtgtgcttctcttaaatgaagaacttaggaatttgtaatttttgaaccatttttgttctctccaccaagtgattagtgttatacaacgttgtttacttcagctttttaatcagtcattcaaacacattaag

SEQ ID NO: 31072 - protein, 170 aa, Arabidopsis thaliana
  peptide (1)..(170): Ceres Seq. ID no. 13500274
  misc_feature (1)..(170): Homolog of NCBI NO: 37535924 NR Description: unknown protein [Oryza sativa (japonica
  misc_feature (1)..(170): Homolog of NCBI NO: 18423288 NR Description: expressed protein [Arabidopsis thaliana]
MQQRKPTAGRPSGTDGSDFSYRMVVDSRYTKVTKEKARLRPLIFVQAAIYVIGLSCAFLTTTKKDEKNTLAIAAAVAGLVCSLIGELGCRRSRVNLLRLYTAASTIVMVLSVFCAVRSRLTMEERNSSGTTAKLELAGFICAQLGAVVQILAIIVTGSLVNNMSPPTKAA

SEQ ID NO: 31073 - protein, 148 aa, Arabidopsis thaliana
  peptide (1)..(148): Ceres Seq. ID no. 13500275
  misc_feature (1)..(148): Homolog of NCBI NO: 37535924 NR Description: unknown protein [Oryza sativa (japonica
  misc_feature (1)..(148): Homolog of NCBI NO: 18423288 NR Description: expressed protein [Arabidopsis thaliana]
MVVDSRYTKVTKEKARLRPLIFVQAAIYVIGLSCAFLTTTKKDEKNTLAIAAAVAGLVCSLIGELGCRRSRVNLLRLYTAASTIVMVLSVFCAVRSRLTMEERNSSGTTAKLELAGFICAQLGAVVQILAIIVTGSLVNNMSPPTKAA

SEQ ID NO: 31074 - DNA, 1112 bp, Arabidopsis thaliana
  misc_feature (1)..(1112): Ceres Seq. ID no. 12396985
  misc_feature: MA Experiment ID: 108434 Result: Down-regulated in Transcription
  misc_feature: MA Experiment 108434 PARAMETER Experiment Name: At_Root_Tips_cDNA_P Parameter: Tissue Value: Root Tips
  misc_feature: MA Experiment ID: 108435 Result: Down-regulated in Transcription
  misc_feature: MA Experiment 108435 PARAMETER Experiment Name: At_stm_Mutants_cDNA_P Parameter: Plant Line Value: wt Landsburg vs stm
  misc_feature: MA Experiment 108435 PARAMETER Experiment Name: At_stm_Mutants_cDNA_P Parameter: Tissue Value: Shoot Apical Meristem Region
  misc_feature: MA Experiment ID: 108461 Result: Up-regulated in Transcription
  misc_feature: MA Experiment 108461 PARAMETER Experiment Name: At_Germinating_Seeds_cDNA_P Parameter: Age (day) Value: 1 vs. 0
  misc_feature: MA Experiment 108461 PARAMETER Experiment Name: At_Germinating_Seeds_cDNA_P Parameter: Tissue Value: Germinating Seeds
  misc_feature: MA Experiment ID: 108462 Result: Up-regulated in Transcription
  misc_feature: MA Experiment 108462 PARAMETER Experiment Name: At_Germinating_Seeds_cDNA_P Parameter: Age (day) Value: 2 vs. 0
  misc_feature: MA Experiment 108462 PARAMETER Experiment Name: At_Germinating_Seeds_cDNA_P Parameter: Tissue Value: Germinating Seeds
  misc_feature: MA Experiment ID: 108463 Result: Up-regulated in Transcription
  misc_feature: MA Experiment 108463 PARAMETER Experiment Name: At_Germinating_Seeds_cDNA_P Parameter: Age (day) Value: 3 vs. 0
  misc_feature: MA Experiment 108463 PARAMETER Experiment Name: At_Germinating_Seeds_cDNA_P Parameter: Tissue Value: Germinating Seeds
  misc_feature: MA Experiment ID: 108464 Result: Up-regulated in Transcription
  misc_feature: MA Experiment 108464 PARAMETER Experiment Name: At_Germinating_Seeds_cDNA_P Parameter: Age (day) Value: 4 vs. 0
  misc_feature: MA Experiment 108464 PARAMETER Experiment Name: At_Germinating_Seeds_cDNA_P Parameter: Tissue Value: Germinating Seeds
  misc_feature: MA Experiment ID: 108576 Result: Up-regulated in Transcription
  misc_feature: MA Experiment 108576 PARAMETER Experiment Name: At_42deg_Heat_cDNA_P Parameter: Temperature (deg C) Value: 42 vs. 22
  misc_feature: MA Experiment 108576 PARAMETER Experiment Name: At_42deg_Heat_cDNA_P Parameter: Timepoint (hr) Value: 1
  misc_feature: MA Experiment 108576 PARAMETER Experiment Name: At_42deg_Heat_cDNA_P Parameter: Tissue Value: Aerial
  misc_feature: MA Experiment ID: 108577 Result: Up-regulated in Transcription
  misc_feature: MA Experiment 108577 PARAMETER Experiment Name: At_42deg_Heat_cDNA_P Parameter: Temperature (deg C) Value: 42 vs. 22
  misc_feature: MA Experiment 108577 PARAMETER Experiment Name: At_42deg_Heat_cDNA_P Parameter: Timepoint (hr) Value: 6
  misc_feature: MA Experiment 108577 PARAMETER Experiment Name: At_42deg_Heat_cDNA_P Parameter: Tissue Value: Aerial
  misc_feature: MA Experiment ID: 108579 Result: Up-regulated in Transcription
  misc_feature: MA Experiment 108579 PARAMETER Experiment Name: At_4deg_Cold_cDNA_P Parameter: Temperature (deg C) Value: 4 vs. 22
  misc_feature: MA Experiment 108579 PARAMETER Experiment Name: At_4deg_Cold_cDNA_P Parameter: Timepoint (hr) Value: 6
  misc_feature: MA Experiment 108579 PARAMETER Experiment Name: At_4deg_Cold_cDNA_P Parameter: Tissue Value: Aerial
  misc_feature: MA Experiment ID: 108595 Result: Down-regulated in Transcription
  misc_feature: MA Experiment 108595 PARAMETER Experiment Name: At_Ler-pi_Ovule_cDNA_P Parameter: Plant Line Value: null
  misc_feature: MA Experiment ID: 20000093 Result: Up-regulated in Transcription
  misc_feature: MA Experiment 20000093 PARAMETER Experiment Name: At_42deg_Heat_cDNA_P Parameter: Temperature (deg C) Value: 42 vs. 22
  misc_feature: MA Experiment 20000093 PARAMETER Experiment Name: At_42deg_Heat_cDNA_P Parameter: Timepoint (hr) Value: 0.5
  misc_feature: MA Experiment 20000093 PARAMETER Experiment Name: At_42deg_Heat_cDNA_P Parameter: Tissue Value: Aerial
  misc_feature: MA Experiment ID: 20000111 Result: Up-regulated in Transcription
  misc_feature: MA Experiment 20000111 PARAMETER Experiment Name: At_42deg_Heat_cDNA_P Parameter: Temperature (deg C) Value: 42 vs. 22
  misc_feature: MA Experiment 20000111 PARAMETER Experiment Name: At_42deg_Heat_cDNA_P Parameter: Timepoint (hr) Value: 6
  misc_feature: MA Experiment 20000111 PARAMETER Experiment Name: At_42deg_Heat_cDNA_P Parameter: Tissue Value: Aerial
  misc_feature: MA Experiment ID: 20000112 Result: Up-regulated in Transcription
  misc_feature: MA Experiment 20000112 PARAMETER Experiment Name: At_42deg_Heat_cDNA_P Parameter: Temperature (deg C) Value: 42 vs. 22
  misc_feature: MA Experiment 20000112 PARAMETER Experiment Name: At_42deg_Heat_cDNA_P Parameter: Timepoint (hr) Value: 2
  misc_feature: MA Experiment 20000112 PARAMETER Experiment Name: At_42deg_Heat_cDNA_P Parameter: Tissue Value: Aerial
  misc_feature: MA Experiment ID: 20000113 Result: Up-regulated in Transcription
  misc_feature: MA Experiment 20000113 PARAMETER Experiment Name: At_42deg_Heat_cDNA_P Parameter: Temperature (deg C) Value: 42 vs. 22
  misc_feature: MA Experiment 20000113 PARAMETER Experiment Name: At_42deg_Heat_cDNA_P Parameter: Timepoint (hr) Value: 8
  misc_feature: MA Experiment 20000113 PARAMETER Experiment Name: At_42deg_Heat_cDNA_P Parameter: Tissue Value: Aerial
  misc_feature: MA Experiment ID: 20000173 Result: Up-regulated in Transcription
  misc_feature: MA Experiment 20000173 PARAMETER Experiment Name: At_42deg_Heat_P Parameter: Age (day) Value: 14
  misc_feature: MA Experiment 20000173 PARAMETER Experiment Name: At_42deg_Heat_P Parameter: Organism Value: A. thaliana
  misc_feature: MA Experiment 20000173 PARAMETER Experiment Name: At_42deg_Heat_P Parameter: Plant Line Value: WS
  misc_feature: MA Experiment 20000173 PARAMETER Experiment Name: At_42deg_Heat_P Parameter: Temperature (deg C) Value: 42 vs. 22
  misc_feature: MA Experiment 20000173 PARAMETER Experiment Name: At_42deg_Heat_P Parameter: Timepoint (hr) Value: 6
  misc_feature: MA Experiment 20000173 PARAMETER Experiment Name: At_42deg_Heat_P Parameter: Tissue Value: Aerial
  misc_feature: MA Experiment ID: 20000179 Result: Up-regulated in Transcription
  misc_feature: MA Experiment 20000179 PARAMETER Experiment Name: At_Germinating_Seeds_P Parameter: Age (hr) Value: 6 vs. 0
  misc_feature: MA Experiment 20000179 PARAMETER Experiment Name: At_Germinating_Seeds_P Parameter: Tissue Value: Germinating Seeds
  misc_feature: MA Experiment ID: 20000180 Result: Up-regulated in Transcription
  misc_feature: MA Experiment 20000180 PARAMETER Experiment Name: At_Germinating_Seeds_P Parameter: Age (hr) Value: 24 vs. 0
  misc_feature: MA Experiment 20000180 PARAMETER Experiment Name: At_Germinating_Seeds_P Parameter: Tissue Value: Germinating Seeds
  misc_feature: MA Experiment ID: 20000184 Result: Up-regulated in Transcription
  misc_feature: MA Experiment 20000184 PARAMETER Experiment Name: At_Shoots__P Parameter: Age (day) Value: 7
  misc_feature: MA Experiment 20000184 PARAMETER Experiment Name: At_Shoots__P Parameter: Tissue Value: Shoots vs. Whole Plant
  misc_feature: MA Experiment ID: 20000185 Result: Down-regulated in Transcription
  misc_feature: MA Experiment 20000185 PARAMETER Experiment Name: At_Roots__P Parameter: Age (day) Value: 7 vs. 21
  misc_feature: MA Experiment 20000185 PARAMETER Experiment Name: At_Roots__P Parameter: Organism Value: A. thaliana
  misc_feature: MA Experiment 20000185 PARAMETER Experiment Name: At_Roots__P Parameter: Tissue Value: Roots vs. Whole Plant
  misc_feature: MA Experiment ID: 20000224 Result: Up-regulated in Transcription
  misc_feature: MA Experiment ID: 20000235 Result: Up-regulated in Transcription
  misc_feature: MA Experiment 20000235 PARAMETER Experiment Name: At_Siliques_P Parameter: Age (day) Value: 21
  misc_feature: MA Experiment 20000235 PARAMETER Experiment Name: At_Siliques_P Parameter: Organism Value: A. thaliana
  misc_feature: MA Experiment 20000235 PARAMETER Experiment Name: At_Siliques_P Parameter: Plant Line Value: WS
  misc_feature: MA Experiment 20000235 PARAMETER Experiment Name: At_Siliques_P Parameter: Tissue Value: 5-10mm Siliques vs. Whole Plant
  misc_feature: MA Experiment ID: 20000437 Result: Down-regulated in Transcription
  misc_feature: MA Experiment 20000437 PARAMETER Experiment Name: At_Drought_P Parameter: Age (day) Value: 8
  misc_feature: MA Experiment 20000437 PARAMETER Experiment Name: At_Drought_P Parameter: Organism Value: A. thaliana
  misc_feature: MA Experiment 20000437 PARAMETER Experiment Name: At_Drought_P Parameter: Plant Line Value: WS
  misc_feature: MA Experiment 20000437 PARAMETER Experiment Name: At_Drought_P Parameter: Timepoint (hr) Value: 24
  misc_feature: MA Experiment 20000437 PARAMETER Experiment Name: At_Drought_P Parameter: Tissue Value: Whole Plant
  misc_feature: MA Experiment 20000437 PARAMETER Experiment Name: At_Drought_P Parameter: Treatment Value: Drought vs. No Drought
  misc_feature: MA Experiment ID: 20000438 Result: Up-regulated in Transcription
  misc_feature: MA Experiment 20000438 PARAMETER Experiment Name: At_Shoots__P Parameter: Age (day) Value: 14
  misc_feature: MA Experiment 20000438 PARAMETER Experiment Name: At_Shoots__P Parameter: Tissue Value: Shoots vs. Whole Plant
  misc_feature: MA Experiment ID: 20000439 Result: Down-regulated in Transcription
  misc_feature: MA Experiment 20000439 PARAMETER Experiment Name: At_Roots__P Parameter: Age (day) Value: 14 vs. 21
  misc_feature: MA Experiment 20000439 PARAMETER Experiment Name: At_Roots__P Parameter: Organism Value: A. thaliana
  misc_feature: MA Experiment 20000439 PARAMETER Experiment Name: At_Roots__P Parameter: Tissue Value: Roots vs. Whole Plant
  misc_feature: MA Experiment ID: 20000441 Result: Up-regulated in Transcription
  misc_feature: MA Experiment 20000441 PARAMETER Experiment Name: At_1uM_BR-BRZ__P Parameter: Tissue Value: Shoot Apices
  misc_feature: MA Experiment 20000441 PARAMETER Experiment Name: At_1uM_BR-BRZ__P Parameter: Treatment Value: 1uM BR vs. No Treatment
  misc_feature: MA Experiment ID: 20000443 Result: Up-regulated in Transcription
  misc_feature: MA Experiment 20000443 PARAMETER Experiment Name: At_1uM_BR-BRZ__P Parameter: Tissue Value: Shoot Apices
  misc_feature: MA Experiment 20000443 PARAMETER Experiment Name: At_1uM_BR-BRZ__P Parameter: Treatment Value: 1uM BRZ vs. No Treatment
  misc_feature: MA Experiment ID: 20001248 Result: Down-regulated in Transcription
  misc_feature: MA Experiment 20001248 PARAMETER Experiment Name: At_Far-red-induction_P Parameter: Age (day) Value: 7
  misc_feature: MA Experiment 20001248 PARAMETER Experiment Name: At_Far-red-induction_P Parameter: Light Value: Far-red vs. White
  misc_feature: MA Experiment 20001248 PARAMETER Experiment Name: At_Far-red-induction_P Parameter: Organism Value: A. thaliana
  misc_feature: MA Experiment 20001248 PARAMETER Experiment Name: At_Far-red-induction_P Parameter: Plant Line Value: Columbia
  misc_feature: MA Experiment 20001248 PARAMETER Experiment Name: At_Far-red-induction_P Parameter: Timepoint (hr) Value: 4
  misc_feature: MA Experiment 20001248 PARAMETER Experiment Name: At_Far-red-induction_P Parameter: Tissue Value: Whole Plant
  misc_feature: MA Experiment ID: 20001450 Result: Down-regulated in Transcription
  misc_feature: MA Experiment 20001450 PARAMETER Experiment Name: At_Far-red-induction_P Parameter: Age (day) Value: 7
  misc_feature: MA Experiment 20001450 PARAMETER Experiment Name: At_Far-red-induction_P Parameter: Light Value: Far-red vs. White
  misc_feature: MA Experiment 20001450 PARAMETER Experiment Name: At_Far-red-induction_P Parameter: Organism Value: A. thaliana
  misc_feature: MA Experiment 20001450 PARAMETER Experiment Name: At_Far-red-induction_P Parameter: Plant Line Value: Columbia
  misc_feature: MA Experiment 20001450 PARAMETER Experiment Name: At_Far-red-induction_P Parameter: Timepoint (hr) Value: 8
  misc_feature: MA Experiment 20001450 PARAMETER Experiment Name: At_Far-red-induction_P Parameter: Tissue Value: Whole Plant
  misc_feature: MA Experiment ID: 20001906 Result: Down-regulated in Transcription
  misc_feature: MA Experiment 20001906 PARAMETER Experiment Name: At_Drought_Reproduction_P Parameter: Age (day) Value: 35
  misc_feature: MA Experiment 20001906 PARAMETER Experiment Name: At_Drought_Reproduction_P Parameter: Organism Value: A. thaliana
  misc_feature: MA Experiment 20001906 PARAMETER Experiment Name: At_Drought_Reproduction_P Parameter: Plant Line Value: WS
  misc_feature: MA Experiment 20001906 PARAMETER Experiment Name: At_Drought_Reproduction_P Parameter: Timepoint (day) Value: 5
  misc_feature: MA Experiment 20001906 PARAMETER Experiment Name: At_Drought_Reproduction_P Parameter: Tissue Value: Siliques
  misc_feature: MA Experiment 20001906 PARAMETER Experiment Name: At_Drought_Reproduction_P Parameter: Treatment Value: Drought vs. No Drought
  misc_feature: MA Experiment ID: 20001908 Result: Down-regulated in Transcription
  misc_feature: MA Experiment 20001908 PARAMETER Experiment Name: At_Drought_Reproduction_P Parameter: Age (day) Value: 40
  misc_feature: MA Experiment 20001908 PARAMETER Experiment Name: At_Drought_Reproduction_P Parameter: Organism Value: A. thaliana
  misc_feature: MA Experiment 20001908 PARAMETER Experiment Name: At_Drought_Reproduction_P Parameter: Plant Line Value: WS
  misc_feature: MA Experiment 20001908 PARAMETER Experiment Name: At_Drought_Reproduction_P Parameter: Timepoint (day) Value: 10
  misc_feature: MA Experiment 20001908 PARAMETER Experiment Name: At_Drought_Reproduction_P Parameter: Tissue Value: Siliques
  misc_feature: MA Experiment 20001908 PARAMETER Experiment Name: At_Drought_Reproduction_P Parameter: Treatment Value: Drought vs. No Drought
  misc_feature: MA Experiment ID: 20001911 Result: Down-regulated in Transcription
  misc_feature: MA Experiment 20001911 PARAMETER Experiment Name: At_Drought_Reproduction_P Parameter: Age (day) Value: 40
  misc_feature: MA Experiment 20001911 PARAMETER Experiment Name: At_Drought_Reproduction_P Parameter: Organism Value: A. thaliana
  misc_feature: MA Experiment 20001911 PARAMETER Experiment Name: At_Drought_Reproduction_P Parameter: Plant Line Value: WS
  misc_feature: MA Experiment 20001911 PARAMETER Experiment Name: At_Drought_Reproduction_P Parameter: Timepoint (day) Value: 10
  misc_feature: MA Experiment 20001911 PARAMETER Experiment Name: At_Drought_Reproduction_P Parameter: Tissue Value: Flowers
  misc_feature: MA Experiment 20001911 PARAMETER Experiment Name: At_Drought_Reproduction_P Parameter: Treatment Value: Drought vs. No Drought
attttaaaacatctatccacattaaatcattcactgatctctaaccaatcccacacacactaccacaaacaatggccaccgtcgctaacttcttagccaaaccaatctccaccgtagtcccacggccatcctccgccgttgcttcgacctcctccttcgtattctttaaccataaaactaatcctctgttccggaggaaaaacctcccgaaaagattattctccgccgtgaaaataaaggctggagcggcgtctccgggaaaggtgggtacaccaccggcgaatgacgagaaggtacaaaagattcacagcggagaggaattcgacgaggcgttgaaaaatgcgaagagcagacttgtggttgcagagtttgctacgagtaagagtgatcagagtaataagatatatccgtttatggtggaactgagcaggacctgtaacgacgtcgttttcttgctcgtcatgggtgatgaatctgacaagaccagagaactctgtcggagagagaagattgagaaagttcctcactttagcttttataagagcatggagaaaatacacgaggaagaaggtattgaaccggaccagttaatgggagacgttctatactacggagacaaccactctacggtggtgcagctgcacggccgacctgacgtggaaaagctgatcgacgagaatcgcactggaggcaagctgatcgtgcttgacgttggtctaaaacattgtggtccttgcgttaaagtgtatccgaccgtgctgaaactgtcccggtcaatgtccgagacagtcgtattcgctagaatgaacggtgacgagaacgatagttgtatggagtttctcaaggacatgaatgttatcgaagttccaactttcttgttcattagagacggcgagattcgtggccgttatgttggttccggtaaaggagaactcattggagagattcttcggtactcaggcgttcgtgtcacttattaatttgtatcaaaactttaattttattacatctcacttcaaaaaagaatgagtttttggtctttgtctgtaccatccgaaaccggttgatatgaaagaaaaaaaactcaaaatagtgtgattcttgattatttg

SEQ ID NO: 31075 - protein, 302 aa, Arabidopsis thaliana
  peptide (1)..(302): Ceres Seq. ID no. 12396986
  misc_feature (186)..(292): Homolog of NCBI NO: 12082335 NR Description: thioredoxin h [Oryza sativa (japonica
  misc_feature (182)..(302): Homolog of NCBI NO: 9294492 NR Description: thioredoxin-like protein [Arabidopsis thaliana]
  misc_feature (189)..(301): Homolog of NCBI NO: 40287476 NR Description: thioredoxin [Capsicum annuum]
  misc_feature (200)..(298): Homolog of NCBI NO: 15223645 NR Description: thioredoxin; protein id: At1g19730.1, supported
  misc_feature (200)..(298): Homolog of NCBI NO: 2117426 NR Description: thioredoxin (clone GREN) - Arabidopsis thaliana
  misc_feature (187)..(298): Homolog of NCBI NO: 21617968 NR Description: thioredoxin [Arabidopsis thaliana]
  misc_feature (1)..(301): Homolog of NCBI NO: 34901636 NR Description: putative plastid thioredoxin
  misc_feature (1)..(302): Homolog of NCBI NO: 7489278 NR Description: thioredoxin-like protein CDSP32, chloroplast -
  misc_feature (1)..(302): Homolog of NCBI NO: 15222954 NR Description: chloroplast drought-induced stress protein,
  misc_feature (1)..(302): Homolog of NCBI NO: 21554102 NR Description: chloroplast drought-induced stress protein,
MATVANFLAKPISTVVPRPSSAVASTSSFVFFNHKTNPLFRRKNLPKRLFSAVKIKAGAASPGKVGTPPANDEKVQKIHSGEEFDEALKNAKSRLVVAEFATSKSDQSNKIYPFMVELSRTCNDVVFLLVMGDESDKTRELCRREKIEKVPHFSFYKSMEKIHEEEGIEPDQLMGDVLYYGDNHSTVVQLHGRPDVEKLIDENRTGGKLIVLDVGLKHCGPCVKVYPTVLKLSRSMSETVVFARMNGDENDSCMEFLKDMNVIEVPTFLFIRDGEIRGRYVGSGKGELIGEILRYSGVRVTY

SEQ ID NO: 31076 - protein, 188 aa, Arabidopsis thaliana
  peptide (1)..(188): Ceres Seq. ID no. 12396987
  misc_feature (72)..(178): Homolog of NCBI NO: 12082335 NR Description: thioredoxin h [Oryza sativa (japonica
  misc_feature (68)..(188): Homolog of NCBI NO: 9294492 NR Description: thioredoxin-like protein [Arabidopsis thaliana]
  misc_feature (75)..(187): Homolog of NCBI NO: 40287476 NR Description: thioredoxin [Capsicum annuum]
  misc_feature (86)..(184): Homolog of NCBI NO: 15223645 NR Description: thioredoxin; protein id: At1g19730.1, supported
  misc_feature (86)..(184): Homolog of NCBI NO: 2117426 NR Description: thioredoxin (clone GREN) - Arabidopsis thaliana
  misc_feature (73)..(184): Homolog of NCBI NO: 21617968 NR Description: thioredoxin [Arabidopsis thaliana]
  misc_feature (1)..(187): Homolog of NCBI NO: 34901636 NR Description: putative plastid thioredoxin
  misc_feature (1)..(188): Homolog of NCBI NO: 7489278 NR Description: thioredoxin-like protein CDSP32, chloroplast -
  misc_feature (1)..(188): Homolog of NCBI NO: 15222954 NR Description: chloroplast drought-induced stress protein,
  misc_feature (1)..(188): Homolog of NCBI NO: 21554102 NR Description: chloroplast drought-induced stress protein,
MVELSRTCNDVVFLLVMGDESDKTRELCRREKIEKVPHFSFYKSMEKIHEEEGIEPDQLMGDVLYYGDNHSTVVQLHGRPDVEKLIDENRTGGKLIVLDVGLKHCGPCVKVYPTVLKLSRSMSETVVFARMNGDENDSCMEFLKDMNVIEVPTFLFIRDGEIRGRYVGSGKGELIGEILRYSGVRVTY

SEQ ID NO: 31077 - protein, 172 aa, Arabidopsis thaliana
  peptide (1)..(172): Ceres Seq. ID no. 12396988
  misc_feature (56)..(162): Homolog of NCBI NO: 12082335 NR Description: thioredoxin h [Oryza sativa (japonica
  misc_feature (52)..(172): Homolog of NCBI NO: 9294492 NR Description: thioredoxin-like protein [Arabidopsis thaliana]
  misc_feature (59)..(171): Homolog of NCBI NO: 40287476 NR Description: thioredoxin [Capsicum annuum]
  misc_feature (70)..(168): Homolog of NCBI NO: 15223645 NR Description: thioredoxin; protein id: At1g19730.1, supported
  misc_feature (70)..(168): Homolog of NCBI NO: 2117426 NR Description: thioredoxin (clone GREN) - Arabidopsis thaliana
  misc_feature (57)..(168): Homolog of NCBI NO: 21617968 NR Description: thioredoxin [Arabidopsis thaliana]
  misc_feature (1)..(171): Homolog of NCBI NO: 34901636 NR Description: putative plastid thioredoxin
  misc_feature (1)..(172): Homolog of NCBI NO: 7489278 NR Description: thioredoxin-like protein CDSP32, chloroplast -
  misc_feature (1)..(172): Homolog of NCBI NO: 15222954 NR Description: chloroplast drought-induced stress protein,
  misc_feature (1)..(172): Homolog of NCBI NO: 21554102 NR Description: chloroplast drought-induced stress protein,
MGDESDKTRELCRREKIEKVPHFSFYKSMEKIHEEEGIEPDQLMGDVLYYGDNHSTVVQLHGRPDVEKLIDENRTGGKLIVLDVGLKHCGPCVKVYPTVLKLSRSMSETVVFARMNGDENDSCMEFLKDMNVIEVPTFLFIRDGEIRGRYVGSGKGELIGEILRYSGVRVTY

SEQ ID NO: 31078 - DNA, 1838 bp, Arabidopsis thaliana
  misc_feature (1)..(1838): Ceres Seq. ID no. 12322952
  misc_feature: MA Experiment ID: 108576 Result: Up-regulated in Transcription
  misc_feature: MA Experiment 108576 PARAMETER Experiment Name: At_42deg_Heat_cDNA_P Parameter: Temperature (deg C) Value: 42 vs. 22
  misc_feature: MA Experiment 108576 PARAMETER Experiment Name: At_42deg_Heat_cDNA_P Parameter: Timepoint (hr) Value: 1
  misc_feature: MA Experiment 108576 PARAMETER Experiment Name: At_42deg_Heat_cDNA_P Parameter: Tissue Value: Aerial
  misc_feature: MA Experiment ID: 108577 Result: Up-regulated in Transcription
  misc_feature: MA Experiment 108577 PARAMETER Experiment Name: At_42deg_Heat_cDNA_P Parameter: Temperature (deg C) Value: 42 vs. 22
  misc_feature: MA Experiment 108577 PARAMETER Experiment Name: At_42deg_Heat_cDNA_P Parameter: Timepoint (hr) Value: 6
  misc_feature: MA Experiment 108577 PARAMETER Experiment Name: At_42deg_Heat_cDNA_P Parameter: Tissue Value: Aerial
  misc_feature: MA Experiment ID: 20000072 Result: Down-regulated in Transcription
  misc_feature: MA Experiment 20000072 PARAMETER Experiment Name: At_100uM_ABA_Mutants_cDNA_P Parameter: Plant Line Value: CS8105
  misc_feature: MA Experiment 20000072 PARAMETER Experiment Name: At_100uM_ABA_Mutants_cDNA_P Parameter: Timepoint (hr) Value: 6
  misc_feature: MA Experiment 20000072 PARAMETER Experiment Name: At_100uM_ABA_Mutants_cDNA_P Parameter: Tissue Value: Aerial
  misc_feature: MA Experiment 20000072 PARAMETER Experiment Name: At_100uM_ABA_Mutants_cDNA_P Parameter: Treatment Value: 100uM ABA vs. No Treatment
  misc_feature: MA Experiment ID: 20000090 Result: Down-regulated in Transcription
  misc_feature: MA Experiment ID: 20000093 Result: Up-regulated in Transcription
  misc_feature: MA Experiment 20000093 PARAMETER Experiment Name: At_42deg_Heat_cDNA_P Parameter: Temperature (deg C) Value: 42 vs. 22
  misc_feature: MA Experiment 20000093 PARAMETER Experiment Name: At_42deg_Heat_cDNA_P Parameter: Timepoint (hr) Value: 0.5
  misc_feature: MA Experiment 20000093 PARAMETER Experiment Name: At_42deg_Heat_cDNA_P Parameter: Tissue Value: Aerial
  misc_feature: MA Experiment ID: 20000111 Result: Up-regulated in Transcription
  misc_feature: MA Experiment 20000111 PARAMETER Experiment Name: At_42deg_Heat_cDNA_P Parameter: Temperature (deg C) Value: 42 vs. 22
  misc_feature: MA Experiment 20000111 PARAMETER Experiment Name: At_42deg_Heat_cDNA_P Parameter: Timepoint (hr) Value: 6
  misc_feature: MA Experiment 20000111 PARAMETER Experiment Name: At_42deg_Heat_cDNA_P Parameter: Tissue Value: Aerial
  misc_feature: MA Experiment ID: 20000112 Result: Up-regulated in Transcription
  misc_feature: MA Experiment 20000112 PARAMETER Experiment Name: At_42deg_Heat_cDNA_P Parameter: Temperature (deg C) Value: 42 vs. 22
  misc_feature: MA Experiment 20000112 PARAMETER Experiment Name: At_42deg_Heat_cDNA_P Parameter: Timepoint (hr) Value: 2
  misc_feature: MA Experiment 20000112 PARAMETER Experiment Name: At_42deg_Heat_cDNA_P Parameter: Tissue Value: Aerial
  misc_feature: MA Experiment ID: 20000171 Result: Up-regulated in Transcription
  misc_feature: MA Experiment 20000171 PARAMETER Experiment Name: At_42deg_Heat_P Parameter: Age (day) Value: 14
  misc_feature: MA Experiment 20000171 PARAMETER Experiment Name: At_42deg_Heat_P Parameter: Organism Value: A. thaliana
  misc_feature: MA Experiment 20000171 PARAMETER Experiment Name: At_42deg_Heat_P Parameter: Plant Line Value: WS
  misc_feature: MA Experiment 20000171 PARAMETER Experiment Name: At_42deg_Heat_P Parameter: Temperature (deg C) Value: 42 vs. 22
  misc_feature: MA Experiment 20000171 PARAMETER Experiment Name: At_42deg_Heat_P Parameter: Timepoint (hr) Value: 1
  misc_feature: MA Experiment 20000171 PARAMETER Experiment Name: At_42deg_Heat_P Parameter: Tissue Value: Aerial
  misc_feature: MA Experiment ID: 20000438 Result: Down-regulated in Transcription
  misc_feature: MA Experiment 20000438 PARAMETER Experiment Name: At_Shoots__P Parameter: Age (day) Value: 14
  misc_feature: MA Experiment 20000438 PARAMETER Experiment Name: At_Shoots__P Parameter: Tissue Value: Shoots vs. Whole Plant
  misc_feature: MA Experiment ID: 20001248 Result: Up-regulated in Transcription
  misc_feature: MA Experiment 20001248 PARAMETER Experiment Name: At_Far-red-induction_P Parameter: Age (day) Value: 7
  misc_feature: MA Experiment 20001248 PARAMETER Experiment Name: At_Far-red-induction_P Parameter: Light Value: Far-red vs. White
  misc_feature: MA Experiment 20001248 PARAMETER Experiment Name: At_Far-red-induction_P Parameter: Organism Value: A. thaliana
  misc_feature: MA Experiment 20001248 PARAMETER Experiment Name: At_Far-red-induction_P Parameter: Plant Line Value: Columbia
  misc_feature: MA Experiment 20001248 PARAMETER Experiment Name: At_Far-red-induction_P Parameter: Timepoint (hr) Value: 4
  misc_feature: MA Experiment 20001248 PARAMETER Experiment Name: At_Far-red-induction_P Parameter: Tissue Value: Whole Plant
accagctctactcattgattttacacactcaccagcacctctatttctttctcactctccaagtctcctctgtgaaagctgaaagctcatcttcttccacgtgatttgtcttcccgatcaccaaacctttccggtaattactctcccttgcgttcgacgccatcttccttggagttctcttcaatcaaccggtaaatcttccactgattttgaagaagattcttccatgttcgatctggttcgtctccagagatcgagagttgaattgcctcgaaacagctctagtttcaccagagacgcgcgaacgatagaaataaagagactcgaagctgcgtgtaccggagacgaatggcgggaaaattgacttgagcgcgattttctgtgtggatccaaaatgaagaagaaggtgtctcagcagaagttactgtacagatggaagaggaaggtatacgccacgttgatgttcgctttctgctttgggactttcgtatttatacaagctcgtttcgcatctatacaagctcgtttcaatcgaatctctgcgtctctcgattcgcttaaaaagcctcgtctagatcagagaccacagattgccttcctcttcattgcccggaatcgactccctctcgagtttgtctgggatgctttctttaagggtgaggatggaaagttctcaatatatgttcattctagacctggatttgttctcaacgaggctacaacgcgatccaagtactttttggatcggcgacttaatgacagtatacaggtagattggggtgaatcaaccatgattgaagcagaacgtgtattgcttagacatgcacttagagattcatttaatcaccgctttgtttttctttctgatagctgcatacctctgtacagtttcagctacacgtataactacatcatgtcaacaccaactagtttcgttgatagctttgcagatacaaaagatagccgttataatcctagaatgaatcccattattcctgttcgtaactggagaaaaggatcacagtgggtcgttctgaatagaaaacacgcagaaattgtggtgaatgatacctctgtctttcctatgtttcagcagcattgcaggagaaaatcacttccagagttttggcgagatcgtcctgtaccagctgaaggttggaaggaacacaactgtatacctgatgagcactatgttcagacattgctatctcaaaagggtgtagatagcgaactcacacgaagatcactgacacactcagcttgggacctttcatcctcgaaaagtaatgaacgtcgtggatggcatcctatgacttacaagttttctgatgctactcctgatcttatacagtccattaagggaatcgacaatatcaactacgagactgaataccggcgagaatggtgtagcagtaaagggaaaccatcaccgtgcttcctcttcgccaggaagttcactcgtcccgccgctctccgcctactccgtgaaactatcttgttagagggcaaagagcatgacaataagtagatccttcaccatttaaagcatatattacacataggtacgtaagataaccaagagttactatgtttgtacaattgtactactgtgatttcatctgtaatacttacgatgacgaatttacatagaaacttacaccatttggtaaatgagtaaaagccagccttgataaaagatggacggtagagaaagagctcagcaggggtgacctgagaacacatgaaaacgagagctgtaacaatgacgtagcgtcattacagccgttgattactcgtgtgttctcatatcaaccctgtcgagatccactaccttcatg

SEQ ID NO: 31079 - protein, 377 aa, Arabidopsis thaliana
  peptide (1)..(377): Ceres Seq. ID no. 12322953
  misc_feature (103)..(212): Pfam Name: Arabidopsis protein of unknown function, DUF266 Pfam Description: Arabidopsis protein of unknown function, DUF266
  misc_feature (31)..(363): Homolog of NCBI NO: 26452247 NR Description: unknown protein [Arabidopsis thaliana]
  misc_feature (58)..(363): Homolog of NCBI NO: 38346557 NR Description: OSJNBa0035M09.18 [Oryza sativa (japonica
  misc_feature (58)..(364): Homolog of NCBI NO: 22327910 NR Description: putative protein
  misc_feature (58)..(364): Homolog of NCBI NO: 17065016 NR Description: Unknown protein [Arabidopsis thaliana]
  misc_feature (65)..(322): Homolog of NCBI NO: 34911442 NR Description: P0431H09.21 [Oryza sativa (japonica
  misc_feature (270)..(368): Homolog of NCBI NO: 25402693 NR Description: hypothetical protein [imported] - Arabidopsis
  misc_feature (17)..(238): Homolog of NCBI NO: 25402693 NR Description: hypothetical protein [imported] - Arabidopsis
  misc_feature (17)..(368): Homolog of NCBI NO: 30682534 NR Description: expressed protein [Arabidopsis thaliana]
  misc_feature (1)..(322): Homolog of NCBI NO: 30684956 NR Description: expressed protein [Arabidopsis thaliana]
  misc_feature (1)..(377): Homolog of NCBI NO: 15241437 NR Description: putative protein; protein id: At5g14550.1
MKKKVSQQKLLYRWKRKVYATLMFAFCFGTFVFIQARFASIQARFNRISASLDSLKKPRLDQRPQIAFLFIARNRLPLEFVWDAFFKGEDGKFSIYVHSRPGFVLNEATTRSKYFLDRRLNDSIQVDWGESTMIEAERVLLRHALRDSFNHRFVFLSDSCIPLYSFSYTYNYIMSTPTSFVDSFADTKDSRYNPRMNPIIPVRNWRKGSQWVVLNRKHAEIVVNDTSVFPMFQQHCRRKSLPEFWRDRPVPAEGWKEHNCIPDEHYVQTLLSQKGVDSELTRRSLTHSAWDLSSSKSNERRGWHPMTYKFSDATPDLIQSIKGIDNINYETEYRREWCSSKGKPSPCFLFARKFTRPAALRLLRETILLEGKEHDNK

SEQ ID NO: 31080 - protein, 355 aa, Arabidopsis thaliana
  peptide (1)..(355): Ceres Seq. ID no. 12322954
  misc_feature (81)..(190): Pfam Name: Arabidopsis protein of unknown function, DUF266 Pfam Description: Arabidopsis protein of unknown function, DUF266
  misc_feature (9)..(341): Homolog of NCBI NO: 26452247 NR Description: unknown protein [Arabidopsis thaliana]
  misc_feature (36)..(341): Homolog of NCBI NO: 38346557 NR Description: OSJNBa0035M09.18 [Oryza sativa (japonica
  misc_feature (36)..(342): Homolog of NCBI NO: 22327910 NR Description: putative protein
  misc_feature (36)..(342): Homolog of NCBI NO: 17065016 NR Description: Unknown protein [Arabidopsis thaliana]
  misc_feature (43)..(300): Homolog of NCBI NO: 34911442 NR Description: P0431H09.21 [Oryza sativa (japonica
  misc_feature (248)..(346): Homolog of NCBI NO: 25402693 NR Description: hypothetical protein [imported] - Arabidopsis
  misc_feature (1)..(216): Homolog of NCBI NO: 25402693 NR Description: hypothetical protein [imported] - Arabidopsis
  misc_feature (1)..(346): Homolog of NCBI NO: 30682534 NR Description: expressed protein [Arabidopsis thaliana]
  misc_feature (1)..(300): Homolog of NCBI NO: 30684956 NR Description: expressed protein [Arabidopsis thaliana]
  misc_feature (1)..(355): Homolog of NCBI NO: 15241437 NR Description: putative protein; protein id: At5g14550.1
MFAFCFGTFVFIQARFASIQARFNRISASLDSLKKPRLDQRPQIAFLFIARNRLPLEFVWDAFFKGEDGKFSIYVHSRPGFVLNEATTRSKYFLDRRLNDSIQVDWGESTMIEAERVLLRHALRDSFNHRFVFLSDSCIPLYSFSYTYNYIMSTPTSFVDSFADTKDSRYNPRMNPIIPVRNWRKGSQWVVLNRKHAEIVVNDTSVFPMFQQHCRRKSLPEFWRDRPVPAEGWKEHNCIPDEHYVQTLLSQKGVDSELTRRSLTHSAWDLSSSKSNERRGWHPMTYKFSDATPDLIQSIKGIDNINYETEYRREWCSSKGKPSPCFLFARKFTRPAALRLLRETILLEGKEHDNK

SEQ ID NO: 31081 - protein, 245 aa, Arabidopsis thaliana
  peptide (1)..(245): Ceres Seq. ID no. 12322955
  misc_feature (1)..(80): Pfam Name: Arabidopsis protein of unknown function, DUF266 Pfam Description: Arabidopsis protein of unknown function, DUF266
  misc_feature (1)..(231): Homolog of NCBI NO: 26452247 NR Description: unknown protein [Arabidopsis thaliana]
  misc_feature (1)..(231): Homolog of NCBI NO: 38346557 NR Description: OSJNBa0035M09.18 [Oryza sativa (japonica
  misc_feature (1)..(232): Homolog of NCBI NO: 22327910 NR Description: putative protein
  misc_feature (1)..(232): Homolog of NCBI NO: 17065016 NR Description: Unknown protein [Arabidopsis thaliana]
  misc_feature (1)..(190): Homolog of NCBI NO: 34911442 NR Description: P0431H09.21 [Oryza sativa (japonica
  misc_feature (138)..(236): Homolog of NCBI NO: 25402693 NR Description: hypothetical protein [imported] - Arabidopsis
  misc_feature (1)..(106): Homolog of NCBI NO: 25402693 NR Description: hypothetical protein [imported] - Arabidopsis
  misc_feature (1)..(236): Homolog of NCBI NO: 30682534 NR Description: expressed protein [Arabidopsis thaliana]
  misc_feature (1)..(190): Homolog of NCBI NO: 30684956 NR Description: expressed protein [Arabidopsis thaliana]
  misc_feature (1)..(245): Homolog of NCBI NO: 15241437 NR Description: putative protein; protein id: At5g14550.1
MIEAERVLLRHALRDSFNHRFVFLSDSCIPLYSFSYTYNYIMSTPTSFVDSFADTKDSRYNPRMNPIIPVRNWRKGSQWVVLNRKHAEIVVNDTSVFPMFQQHCRRKSLPEFWRDRPVPAEGWKEHNCIPDEHYVQTLLSQKGVDSELTRRSLTHSAWDLSSSKSNERRGWHPMTYKFSDATPDLIQSIKGIDNINYETEYRREWCSSKGKPSPCFLFARKFTRPAALRLLRETILLEGKEHDNK

SEQ ID NO: 31082 - DNA, 699 bp, Arabidopsis thaliana
  misc_feature (1)..(699): Ceres Seq. ID no. 12322132
  misc_feature: MA Experiment ID: 108434 Result: Down-regulated in Transcription
  misc_feature: MA Experiment 108434 PARAMETER Experiment Name: At_Root_Tips_cDNA_P Parameter: Tissue Value: Root Tips
  misc_feature: MA Experiment ID: 108573 Result: Up-regulated in Transcription
  misc_feature: MA Experiment 108573 PARAMETER Experiment Name: At_Drought_cDNA_P Parameter: Timepoint (hr) Value: 6
  misc_feature: MA Experiment 108573 PARAMETER Experiment Name: At_Drought_cDNA_P Parameter: Tissue Value: Aerial
  misc_feature: MA Experiment 108573 PARAMETER Experiment Name: At_Drought_cDNA_P Parameter: Treatment Value: Drought vs. No Drought
  misc_feature: MA Experiment ID: 108585 Result: Up-regulated in Transcription
  misc_feature: MA Experiment 108585 PARAMETER Experiment Name: At_5mM_NaNP_cDNA_P Parameter: Timepoint (hr) Value: 6
  misc_feature: MA Experiment 108585 PARAMETER Experiment Name: At_5mM_NaNP_cDNA_P Parameter: Tissue Value: Aerial
  misc_feature: MA Experiment 108585 PARAMETER Experiment Name: At_5mM_NaNP_cDNA_P Parameter: Treatment Value: null
  misc_feature: MA Experiment ID: 108595 Result: Up-regulated in Transcription
  misc_feature: MA Experiment 108595 PARAMETER Experiment Name: At_Ler-pi_Ovule_cDNA_P Parameter: Plant Line Value: null
  misc_feature: MA Experiment ID: 20000224 Result: Down-regulated in Transcription
  misc_feature: MA Experiment ID: 20000227 Result: Down-regulated in Transcription
  misc_feature: MA Experiment 20000227 PARAMETER Experiment Name: At_Root-Tips-vs-Tops_P Parameter: Tissue Value: Root Tips vs. Root Tops
  misc_feature: MA Experiment ID: 20000286 Result: Down-regulated in Transcription
  misc_feature: MA Experiment 20000286 PARAMETER Experiment Name: At_Open_Flower_P Parameter: Age (day) Value: 21
  misc_feature: MA Experiment 20000286 PARAMETER Experiment Name: At_Open_Flower_P Parameter: Plant Line Value: WS
  misc_feature: MA Experiment 20000286 PARAMETER Experiment Name: At_Open_Flower_P Parameter: Tissue Value: Half Open vs. Whole Plant
  misc_feature: MA Experiment ID: 20001905 Result: Up-regulated in Transcription
  misc_feature: MA Experiment 20001905 PARAMETER Experiment Name: At_Drought_Reproduction_P Parameter: Age (day) Value: 40
  misc_feature: MA Experiment 20001905 PARAMETER Experiment Name: At_Drought_Reproduction_P Parameter: Organism Value: A. thaliana
  misc_feature: MA Experiment 20001905 PARAMETER Experiment Name: At_Drought_Reproduction_P Parameter: Plant Line Value: WS
  misc_feature: MA Experiment 20001905 PARAMETER Experiment Name: At_Drought_Reproduction_P Parameter: Timepoint (day) Value: 10
  misc_feature: MA Experiment 20001905 PARAMETER Experiment Name: At_Drought_Reproduction_P Parameter: Tissue Value: Rosettes
  misc_feature: MA Experiment 20001905 PARAMETER Experiment Name: At_Drought_Reproduction_P Parameter: Treatment Value: Drought vs. No Drought
aaaacaacacggttacgcaaactctctctgagaaaatccccaaatctcatgaaattagggtttcaatcattctttgaacgcaaaattagaaacctcctctccatccgccacgaatctctagggttcttctgaaggattagatttctgggttttagaaatctgtctctcgtcatcaacaattcacgtgatgccgtcgttaacactgagcattcgtttccttttcttagttctctgcttgatcggtttacaagctgcggatgatttcccagataaatcccgcggtgacgtatgccctcgggttaaggatcggggtggatgcacaatcaactgtttccgggcggatccggtttgtggaaccgatggagtcacgtactggtgcggttgtcccgacgcagcttgccatggcgctcgcgtagtcaaaaaaggagcttgtgacacaggtaatgcaggaagtgcttctgttcctggacaagctttgttattgattcatattgtttggctcttcttgctcggactctctcttctcgttggtggtttctgatctctagagagttagtggtggaattagacaaggaattagatagatcacacgtcctgagtttgttgtatgtgtatagttgagtattgttttgctttgtgtgctatatatatgtaatagattctgttgcagttcattctaataatgaagatttgatcggg

SEQ ID NO: 31083 - protein, 117 aa, Arabidopsis thaliana
  peptide (1)..(117): Ceres Seq. ID no. 12322133
  misc_feature (35)..(82): Pfam Name: Kazal-type serine protease inhibitor domain Pfam Description: Kazal-type serine protease inhibitor domain
  misc_feature (2)..(115): Homolog of NCBI NO: 34909170 NR Description: P0468B07.28 [Oryza sativa (japonica
  misc_feature (1)..(117): Homolog of NCBI NO: 21555759 NR Description: unknown [Arabidopsis thaliana]
  misc_feature (1)..(117): Homolog of NCBI NO: 18411677 NR Description: Expressed protein
  misc_feature (1)..(117): Homolog of NCBI NO: 21554106 NR Description: unknown [Arabidopsis thaliana]
  misc_feature (1)..(117): Homolog of NCBI NO: 18412211 NR Description: expressed protein
MPSLTLSIRFLFLVLCLIGLQAADDFPDKSRGDVCPRVKDRGGCTINCFRADPVCGTDGVTYWCGCPDAACHGARVVKKGACDTGNAGSASVPGQALLLIHIVWLFLLGLSLLVGGF

SEQ ID NO: 31084 - DNA, 687 bp, Arabidopsis thaliana
  misc_feature (1)..(687): Ceres Seq. ID no. 13499600
  misc_feature: MA Experiment ID: 108433 Result: Up-regulated in Transcription
  misc_feature: MA Experiment 108433 PARAMETER Experiment Name: At_rhl_Mutant2_cDNA_P Parameter: Age (day) Value: 7
  misc_feature: MA Experiment 108433 PARAMETER Experiment Name: At_rhl_Mutant2_cDNA_P Parameter: Organism Value: A. thaliana
  misc_feature: MA Experiment 108433 PARAMETER Experiment Name: At_rhl_Mutant2_cDNA_P Parameter: Plant Line Value: rhl Mutant vs. wt landsburg
  misc_feature: MA Experiment 108433 PARAMETER Experiment Name: At_rhl_Mutant2_cDNA_P Parameter: Tissue Value: Roots
  misc_feature: MA Experiment ID: 108434 Result: Down-regulated in Transcription
  misc_feature: MA Experiment 108434 PARAMETER Experiment Name: At_Root_Tips_cDNA_P Parameter: Tissue Value: Root Tips
  misc_feature: MA Experiment ID: 108464 Result: Up-regulated in Transcription
  misc_feature: MA Experiment 108464 PARAMETER Experiment Name: At_Germinating_Seeds_cDNA_P Parameter: Age (day) Value: 4 vs. 0
  misc_feature: MA Experiment 108464 PARAMETER Experiment Name: At_Germinating_Seeds_cDNA_P Parameter: Tissue Value: Germinating Seeds
  misc_feature: MA Experiment ID: 108561 Result: Down-regulated in Transcription
  misc_feature: MA Experiment 108561 PARAMETER Experiment Name: At_100uM_ABA_cDNA_P Parameter: Timepoint (hr) Value: 6
  misc_feature: MA Experiment 108561 PARAMETER Experiment Name: At_100uM_ABA_cDNA_P Parameter: Tissue Value: Aerial
  misc_feature: MA Experiment 108561 PARAMETER Experiment Name: At_100uM_ABA_cDNA_P Parameter: Treatment Value: 100uM ABA vs. No Treatment
  misc_feature: MA Experiment ID: 108577 Result: Up-regulated in Transcription
  misc_feature: MA Experiment 108577 PARAMETER Experiment Name: At_42deg_Heat_cDNA_P Parameter: Temperature (deg C) Value: 42 vs. 22
  misc_feature: MA Experiment 108577 PARAMETER Experiment Name: At_42deg_Heat_cDNA_P Parameter: Timepoint (hr) Value: 6
  misc_feature: MA Experiment 108577 PARAMETER Experiment Name: At_42deg_Heat_cDNA_P Parameter: Tissue Value: Aerial
  misc_feature: MA Experiment ID: 108594 Result: Down-regulated in Transcription
  misc_feature: MA Experiment 108594 PARAMETER Experiment Name: At_Ler-rhl_Root_cDNA_P Parameter: Plant Line Value: null
  misc_feature: MA Experiment ID: 20000113 Result: Up-regulated in Transcription
  misc_feature: MA Experiment 20000113 PARAMETER Experiment Name: At_42deg_Heat_cDNA_P Parameter: Temperature (deg C) Value: 42 vs. 22
  misc_feature: MA Experiment 20000113 PARAMETER Experiment Name: At_42deg_Heat_cDNA_P Parameter: Timepoint (hr) Value: 8
  misc_feature: MA Experiment 20000113 PARAMETER Experiment Name: At_42deg_Heat_cDNA_P Parameter: Tissue Value: Aerial
  misc_feature: MA Experiment ID: 20000184 Result: Up-regulated in Transcription
  misc_feature: MA Experiment 20000184 PARAMETER Experiment Name: At_Shoots__P Parameter: Age (day) Value: 7
  misc_feature: MA Experiment 20000184 PARAMETER Experiment Name: At_Shoots__P Parameter: Tissue Value: Shoots vs. Whole Plant
  misc_feature: MA Experiment ID: 20000185 Result: Up-regulated in Transcription
  misc_feature: MA Experiment 20000185 PARAMETER Experiment Name: At_Roots__P Parameter: Age (day) Value: 7 vs. 21
  misc_feature: MA Experiment 20000185 PARAMETER Experiment Name: At_Roots__P Parameter: Organism Value: A. thaliana
  misc_feature: MA Experiment 20000185 PARAMETER Experiment Name: At_Roots__P Parameter: Tissue Value: Roots vs. Whole Plant
  misc_feature: MA Experiment ID: 20000227 Result: Down-regulated in Transcription
  misc_feature: MA Experiment 20000227 PARAMETER Experiment Name: At_Root-Tips-vs-Tops_P Parameter: Tissue Value: Root Tips vs. Root Tops
  misc_feature: MA Experiment ID: 20000437 Result: Down-regulated in Transcription
  misc_feature: MA Experiment 20000437 PARAMETER Experiment Name: At_Drought_P Parameter: Age (day) Value: 8
  misc_feature: MA Experiment 20000437 PARAMETER Experiment Name: At_Drought_P Parameter: Organism Value: A. thaliana
  misc_feature: MA Experiment 20000437 PARAMETER Experiment Name: At_Drought_P Parameter: Plant Line Value: WS
  misc_feature: MA Experiment 20000437 PARAMETER Experiment Name: At_Drought_P Parameter: Timepoint (hr) Value: 24
  misc_feature: MA Experiment 20000437 PARAMETER Experiment Name: At_Drought_P Parameter: Tissue Value: Whole Plant
  misc_feature: MA Experiment 20000437 PARAMETER Experiment Name: At_Drought_P Parameter: Treatment Value: Drought vs. No Drought
  misc_feature: MA Experiment ID: 20000439 Result: Up-regulated in Transcription
  misc_feature: MA Experiment 20000439 PARAMETER Experiment Name: At_Roots__P Parameter: Age (day) Value: 14 vs. 21
  misc_feature: MA Experiment 20000439 PARAMETER Experiment Name: At_Roots__P Parameter: Organism Value: A. thaliana
  misc_feature: MA Experiment 20000439 PARAMETER Experiment Name: At_Roots__P Parameter: Tissue Value: Roots vs. Whole Plant
  misc_feature: MA Experiment ID: 20000460 Result: Down-regulated in Transcription
  misc_feature: MA Experiment 20000460 PARAMETER Experiment Name: At_10percent_PEG_P Parameter: Age (day) Value: 12
  misc_feature: MA Experiment 20000460 PARAMETER Experiment Name: At_10percent_PEG_P Parameter: Organism Value: A. thaliana
  misc_feature: MA Experiment 20000460 PARAMETER Experiment Name: At_10percent_PEG_P Parameter: Plant Line Value: WS
  misc_feature: MA Experiment 20000460 PARAMETER Experiment Name: At_10percent_PEG_P Parameter: Timepoint (day) Value: 12
  misc_feature: MA Experiment 20000460 PARAMETER Experiment Name: At_10percent_PEG_P Parameter: Tissue Value: Whole Plant
  misc_feature: MA Experiment 20000460 PARAMETER Experiment Name: At_10percent_PEG_P Parameter: Treatment Value: 10percent PEG vs. No Treatment
  misc_feature: MA Experiment ID: 20000574 Result: Down-regulated in Transcription
  misc_feature: MA Experiment 20000574 PARAMETER Experiment Name: At_100uM_ABA_Mutants__P Parameter: Organism Value: A. thaliana
  misc_feature: MA Experiment 20000574 PARAMETER Experiment Name: At_100uM_ABA_Mutants__P Parameter: Plant Line Value: CS23 vs. Ler wt
  misc_feature: MA Experiment 20000574 PARAMETER Experiment Name: At_100uM_ABA_Mutants__P Parameter: Timepoint (hr) Value: N/A
  misc_feature: MA Experiment 20000574 PARAMETER Experiment Name: At_100uM_ABA_Mutants__P Parameter: Tissue Value: Whole Plant
  misc_feature: MA Experiment 20000574 PARAMETER Experiment Name: At_100uM_ABA_Mutants__P Parameter: Treatment Value: None
  misc_feature: MA Experiment ID: 20000575 Result: Down-regulated in Transcription
  misc_feature: MA Experiment 20000575 PARAMETER Experiment Name: At_100uM_ABA_Mutants__P Parameter: Organism Value: A. thaliana
  misc_feature: MA Experiment 20000575 PARAMETER Experiment Name: At_100uM_ABA_Mutants__P Parameter: Plant Line Value: CS22
  misc_feature: MA Experiment 20000575 PARAMETER Experiment Name: At_100uM_ABA_Mutants__P Parameter: Timepoint (hr) Value: 6
  misc_feature: MA Experiment 20000575 PARAMETER Experiment Name: At_100uM_ABA_Mutants__P Parameter: Tissue Value: Whole Plant
  misc_feature: MA Experiment 20000575 PARAMETER Experiment Name: At_100uM_ABA_Mutants__P Parameter: Treatment Value: 1uM ABA vs. No Treatment
  misc_feature: MA Experiment ID: 20000576 Result: Down-regulated in Transcription
  misc_feature: MA Experiment 20000576 PARAMETER Experiment Name: At_100uM_ABA_Mutants__P Parameter: Organism Value: A. thaliana
  misc_feature: MA Experiment 20000576 PARAMETER Experiment Name: At_100uM_ABA_Mutants__P Parameter: Plant Line Value: CS23
  misc_feature: MA Experiment 20000576 PARAMETER Experiment Name: At_100uM_ABA_Mutants__P Parameter: Timepoint (hr) Value: 6
  misc_feature: MA Experiment 20000576 PARAMETER Experiment Name: At_100uM_ABA_Mutants__P Parameter: Tissue Value: Whole Plant
  misc_feature: MA Experiment 20000576 PARAMETER Experiment Name: At_100uM_ABA_Mutants__P Parameter: Treatment Value: 1uM ABA vs. No Treatment
  misc_feature: MA Experiment ID: 20001451 Result: Up-regulated in Transcription
  misc_feature: MA Experiment 20001451 PARAMETER Experiment Name: At_Far-red-induction_P Parameter: Age (day) Value: 7
  misc_feature: MA Experiment 20001451 PARAMETER Experiment Name: At_Far-red-induction_P Parameter: Light Value: Far-red vs. White
  misc_feature: MA Experiment 20001451 PARAMETER Experiment Name: At_Far-red-induction_P Parameter: Organism Value: A. thaliana
  misc_feature: MA Experiment 20001451 PARAMETER Experiment Name: At_Far-red-induction_P Parameter: Plant Line Value: Columbia
  misc_feature: MA Experiment 20001451 PARAMETER Experiment Name: At_Far-red-induction_P Parameter: Timepoint (hr) Value: 24
  misc_feature: MA Experiment 20001451 PARAMETER Experiment Name: At_Far-red-induction_P Parameter: Tissue Value: Whole Plant
accaatctcaaagcaaattaaatacactactacttcttgagcttttaaactacacaaacaaatggctccaagaaccccccttgcactcttcgtttctctcaacctcctcttcttcacttacacctctgcaaccacagggacttgtcctaaaaattccatagagatcggtacttgtgtcactgtgctcaatctagtggacctaacattgggaaacccacctgtaaagccatgttgctcgctcatccaaggcttggctgaccttgaggctgcggcctgcctctgcactgcgctcaaagctagcattcttggaattgtcaatattaaccttcctatcaatctcagcgtactcctcaatgtttgtagtaggaatgctccaaagagtttccagtgcgcgtaagttgaatacctatgacatacctatgaaacaaacgaatcataccgatgcttgaacatgttttcttacctacttgttgttgttctaagatgtttgttttttctttctttcttggattgttaataatgaacgtacgacgttctgatgcaaaataatggaaaatggggttgtgtgtacaatcgacaagtttgtatatactcctttactttgttgttcctttgttttgttgttcctcttctttgtaactgtgtatttcaaatttgcttaataaaaatataaattgatgttgtagt

SEQ ID NO: 31085 - protein, 111 aa, Arabidopsis thaliana
  peptide (1)..(111): Ceres Seq. ID no. 13499601
  misc_feature (28)..(110): Pfam Name: Protease inhibitor/seed storage/LTP family Pfam Description: Protease inhibitor/seed storage/LTP family
  misc_feature (22)..(110): Homolog of NCBI NO: 15221201 NR Description: protease inhibitor/seed storage/lipid transfer
  misc_feature (5)..(28): Homolog of NCBI NO: 15235390 NR Description: protease inhibitor/seed storage/lipid transfer
  misc_feature (21)..(111): Homolog of NCBI NO: 15235390 NR Description: protease inhibitor/seed storage/lipid transfer
  misc_feature (1)..(111): Homolog of NCBI NO: 30682157 NR Description: protease inhibitor/seed storage/lipid transfer
  misc_feature (4)..(111): Homolog of NCBI NO: 11357189 NR Description: auxin-induced protein AIR1
  misc_feature (1)..(111): Homolog of NCBI NO: 15235406 NR Description: protease inhibitor/seed storage/lipid transfer
  misc_feature (1)..(111): Homolog of NCBI NO: 21554111 NR Description: putative cell wall-plasma membrane disconnecting
MAPRTPLALFVSLNLLFFTYTSATTGTCPKNSIEIGTCVTVLNLVDLTLGNPPVKPCCSLIQGLADLEAAACLCTALKASILGIVNINLPINLSVLLNVCSRNAPKSFQCA

SEQ ID NO: 31086 - DNA, 1390 bp, Arabidopsis thaliana
  misc_feature (1)..(1390): Ceres Seq. ID no. 12489610
  misc_feature: MA Experiment ID: 20000179 Result: Up-regulated in Transcription
  misc_feature: MA Experiment 20000179 PARAMETER Experiment Name: At_Germinating_Seeds_P Parameter: Age (hr) Value: 6 vs. 0
  misc_feature: MA Experiment 20000179 PARAMETER Experiment Name: At_Germinating_Seeds_P Parameter: Tissue Value: Germinating Seeds
  misc_feature: MA Experiment ID: 20000180 Result: Up-regulated in Transcription
  misc_feature: MA Experiment 20000180 PARAMETER Experiment Name: At_Germinating_Seeds_P Parameter: Age (hr) Value: 24 vs. 0
  misc_feature: MA Experiment 20000180 PARAMETER Experiment Name: At_Germinating_Seeds_P Parameter: Tissue Value: Germinating Seeds
  misc_feature: MA Experiment ID: 20000185 Result: Down-regulated in Transcription
  misc_feature: MA Experiment 20000185 PARAMETER Experiment Name: At_Roots__P Parameter: Age (day) Value: 7 vs. 21
  misc_feature: MA Experiment 20000185 PARAMETER Experiment Name: At_Roots__P Parameter: Organism Value: A. thaliana
  misc_feature: MA Experiment 20000185 PARAMETER Experiment Name: At_Roots__P Parameter: Tissue Value: Roots vs. Whole Plant
  misc_feature: MA Experiment ID: 20000439 Result: Down-regulated in Transcription
  misc_feature: MA Experiment 20000439 PARAMETER Experiment Name: At_Roots__P Parameter: Age (day) Value: 14 vs. 21
  misc_feature: MA Experiment 20000439 PARAMETER Experiment Name: At_Roots__P Parameter: Organism Value: A. thaliana
  misc_feature: MA Experiment 20000439 PARAMETER Experiment Name: At_Roots__P Parameter: Tissue Value: Roots vs. Whole Plant
  misc_feature: MA Experiment ID: 20000794 Result: Down-regulated in Transcription
  misc_feature: MA Experiment 20000794 PARAMETER Experiment Name: At_Petals_P Parameter: Age (day) Value: 23-25 days
  misc_feature: MA Experiment 20000794 PARAMETER Experiment Name: At_Petals_P Parameter: Plant Line Value: WS
  misc_feature: MA Experiment 20000794 PARAMETER Experiment Name: At_Petals_P Parameter: Tissue Value: Petals vs. Whole plant
  misc_feature: MA Experiment ID: 20001247 Result: Down-regulated in Transcription
  misc_feature: MA Experiment 20001247 PARAMETER Experiment Name: At_Far-red-induction_P Parameter: Age (day) Value: 7
  misc_feature: MA Experiment 20001247 PARAMETER Experiment Name: At_Far-red-induction_P Parameter: Light Value: Far-red vs. White
  misc_feature: MA Experiment 20001247 PARAMETER Experiment Name: At_Far-red-induction_P Parameter: Organism Value: A. thaliana
  misc_feature: MA Experiment 20001247 PARAMETER Experiment Name: At_Far-red-induction_P Parameter: Plant Line Value: Columbia
  misc_feature: MA Experiment 20001247 PARAMETER Experiment Name: At_Far-red-induction_P Parameter: Timepoint (hr) Value: 1
  misc_feature: MA Experiment 20001247 PARAMETER Experiment Name: At_Far-red-induction_P Parameter: Tissue Value: Whole Plant
  misc_feature: MA Experiment ID: 20001450 Result: Down-regulated in Transcription
  misc_feature: MA Experiment 20001450 PARAMETER Experiment Name: At_Far-red-induction_P Parameter: Age (day) Value: 7
  misc_feature: MA Experiment 20001450 PARAMETER Experiment Name: At_Far-red-induction_P Parameter: Light Value: Far-red vs. White
  misc_feature: MA Experiment 20001450 PARAMETER Experiment Name: At_Far-red-induction_P Parameter: Organism Value: A. thaliana
  misc_feature: MA Experiment 20001450 PARAMETER Experiment Name: At_Far-red-induction_P Parameter: Plant Line Value: Columbia
  misc_feature: MA Experiment 20001450 PARAMETER Experiment Name: At_Far-red-induction_P Parameter: Timepoint (hr) Value: 8
  misc_feature: MA Experiment 20001450 PARAMETER Experiment Name: At_Far-red-induction_P Parameter: Tissue Value: Whole Plant
  misc_feature: MA Experiment ID: 20001451 Result: Down-regulated in Transcription
  misc_feature: MA Experiment 20001451 PARAMETER Experiment Name: At_Far-red-induction_P Parameter: Age (day) Value: 7
  misc_feature: MA Experiment 20001451 PARAMETER Experiment Name: At_Far-red-induction_P Parameter: Light Value: Far-red vs. White
  misc_feature: MA Experiment 20001451 PARAMETER Experiment Name: At_Far-red-induction_P Parameter: Organism Value: A. thaliana
  misc_feature: MA Experiment 20001451 PARAMETER Experiment Name: At_Far-red-induction_P Parameter: Plant Line Value: Columbia
  misc_feature: MA Experiment 20001451 PARAMETER Experiment Name: At_Far-red-induction_P Parameter: Timepoint (hr) Value: 24
  misc_feature: MA Experiment 20001451 PARAMETER Experiment Name: At_Far-red-induction_P Parameter: Tissue Value: Whole Plant
  misc_feature: MA Experiment ID: 20001557 Result: Down-regulated in Transcription
  misc_feature: MA Experiment 20001557 PARAMETER Experiment Name: At_Drought_Soil_Dry_P Parameter: Age (day) Value: 27
  misc_feature: MA Experiment 20001557 PARAMETER Experiment Name: At_Drought_Soil_Dry_P Parameter: Organism Value: A. thaliana
  misc_feature: MA Experiment 20001557 PARAMETER Experiment Name: At_Drought_Soil_Dry_P Parameter: Plant Line Value: WS
  misc_feature: MA Experiment 20001557 PARAMETER Experiment Name: At_Drought_Soil_Dry_P Parameter: Post Timepoint (hr) Value: 3
  misc_feature: MA Experiment 20001557 PARAMETER Experiment Name: At_Drought_Soil_Dry_P Parameter: Post-Treatment Value: Re-Water vs. No Drought
  misc_feature: MA Experiment 20001557 PARAMETER Experiment Name: At_Drought_Soil_Dry_P Parameter: Timepoint (day) Value: 13
  misc_feature: MA Experiment 20001557 PARAMETER Experiment Name: At_Drought_Soil_Dry_P Parameter: Treatment Value: Drought vs. No Drought
  misc_feature: MA Experiment ID: 20001906 Result: Down-regulated in Transcription
  misc_feature: MA Experiment 20001906 PARAMETER Experiment Name: At_Drought_Reproduction_P Parameter: Age (day) Value: 35
  misc_feature: MA Experiment 20001906 PARAMETER Experiment Name: At_Drought_Reproduction_P Parameter: Organism Value: A. thaliana
  misc_feature: MA Experiment 20001906 PARAMETER Experiment Name: At_Drought_Reproduction_P Parameter: Plant Line Value: WS
  misc_feature: MA Experiment 20001906 PARAMETER Experiment Name: At_Drought_Reproduction_P Parameter: Timepoint (day) Value: 5
  misc_feature: MA Experiment 20001906 PARAMETER Experiment Name: At_Drought_Reproduction_P Parameter: Tissue Value: Siliques
  misc_feature: MA Experiment 20001906 PARAMETER Experiment Name: At_Drought_Reproduction_P Parameter: Treatment Value: Drought vs. No Drought
  misc_feature: MA Experiment ID: 20001908 Result: Down-regulated in Transcription
  misc_feature: MA Experiment 20001908 PARAMETER Experiment Name: At_Drought_Reproduction_P Parameter: Age (day) Value: 40
  misc_feature: MA Experiment 20001908 PARAMETER Experiment Name: At_Drought_Reproduction_P Parameter: Organism Value: A. thaliana
  misc_feature: MA Experiment 20001908 PARAMETER Experiment Name: At_Drought_Reproduction_P Parameter: Plant Line Value: WS
  misc_feature: MA Experiment 20001908 PARAMETER Experiment Name: At_Drought_Reproduction_P Parameter: Timepoint (day) Value: 10
  misc_feature: MA Experiment 20001908 PARAMETER Experiment Name: At_Drought_Reproduction_P Parameter: Tissue Value: Siliques
  misc_feature: MA Experiment 20001908 PARAMETER Experiment Name: At_Drought_Reproduction_P Parameter: Treatment Value: Drought vs. No Drought
acgagatactctcttcttaaaacctcatccacccaaacacaaatgtcttgtaatccttctcttatctttctccttgtgattcctttttatattcctctgatattttctctcagtttgatctcatttgctctgcaatggcgactaccatgaatgctgctgtttctctcacatcttcaaactcttcttcttttcccgctacaagttgtgccattgctcctgaaaggatcaggtttactaagggtgctttttactacaaaagcaacaatgtagtgacaggtaaaagagtgttttccataaaagcacaaatcacaacagaaacagatactcctactcctgcaaagaaagtagagaaagtgtcaaagaagaacgaggaaggtgtgattgttaacaggtacagaccaaaagagccttacactggaaaatgccttctcaacaccaaaatcacagctgatgatgctcctggagagacctggcacatggttttcagccatcaaggagaaatcccgtacagagaaggacaatctgttggtgtgattgcagatggaattgacaagaatggaaagcctcacaaggtcagactttactccattgcaagcagcgctcttggagatctcggcaattctgaaaccgtttctttgtgtgttaaaagacttgtttatactaatgaccaaggagagactgttaaaggagtttgctcaaatttcttgtgtgatttggcacccggaagtgatgttaagctgactggtcctgtaggcaaagaaatgcttatgccaaaggatccaaacgccaccgttattatgcttgccacagggacaggaattgctcctttcaggtctttcttatggaagatgttctttgagaaacatgatgactacaagttcaatggcttagcttggttgttcttgggtgtaccaaccactagctctttgctctaccaagaggagtttgataagatgaaagcaaaggcccccgagaacttcagggtggattacgcgataagcagagaacaagcgaacgataaaggagagaaaatgtatatccagactcggatggcgcaatacgcagctgagttatgggagttgttgaagaaagacaacacttttgtttacatgtgtggactcaagggaatggagaaaggaattgatgacattatggtctcattggctgcaaatgacggtattgactggtttgattacaagaagcagttgaagaaggcagagcaatggaacgttgaagtctactgatcaaaaagcctttgacatttctgtagcaaagtatagctgaacaaaactgtaattttcgcttctgaatttctgtattttgaagataagttttttagatatgttatactaaaaaaagagttctttaatcattatcatttacttcttcc

SEQ ID NO: 31087 - protein, 369 aa, Arabidopsis thaliana
  peptide (1)..(369): Ceres Seq. ID no. 12489611
  misc_feature (217)..(339): Pfam Name: Oxidoreductase NAD-binding domain Pfam Description: Oxidoreductase NAD-binding domain
  misc_feature (1)..(369): Homolog of NCBI NO: 119906 NR Description: Ferredoxin--NADP reductase, chloroplast precursor
  misc_feature (1)..(369): Homolog of NCBI NO: 119905 NR Description: Ferredoxin--NADP reductase, leaf isozyme,
  misc_feature (1)..(369): Homolog of NCBI NO: 170111 NR Description: ferredoxin-NADP oxidoreductase
  misc_feature (1)..(369): Homolog of NCBI NO: 729479 NR Description: Ferredoxin--NADP reductase, chloroplast precursor
  misc_feature (1)..(369): Homolog of NCBI NO: 3913651 NR Description: Ferredoxin--NADP reductase, leaf-type isozyme,
  misc_feature (1)..(369): Homolog of NCBI NO: 729477 NR Description: Ferredoxin--NADP reductase, chloroplast precursor
  misc_feature (1)..(369): Homolog of NCBI NO: 6899972 NR Description: chloroplast ferredoxin-NADP+ oxidoreductase
  misc_feature (269)..(369): Homolog of NCBI NO: 25285862 NR Description: hypothetical protein T20H2.20 - Arabidopsis
  misc_feature (1)..(248): Homolog of NCBI NO: 25285862 NR Description: hypothetical protein T20H2.20 - Arabidopsis
  misc_feature (1)..(369): Homolog of NCBI NO: 15223753 NR Description: ferredoxin--NADP reductase precursor, putative
MATTMNAAVSLTSSNSSSFPATSCAIAPERIRFTKGAFYYKSNNVVTGKRVFSIKAQITTETDTPTPAKKVEKVSKKNEEGVIVNRYRPKEPYTGKCLLNTKITADDAPGETWHMVFSHQGEIPYREGQSVGVIADGIDKNGKPHKVRLYSIASSALGDLGNSETVSLCVKRLVYTNDQGETVKGVCSNFLCDLAPGSDVKLTGPVGKEMLMPKDPNATVIMLATGTGIAPFRSFLWKMFFEKHDDYKFNGLAWLFLGVPTTSSLLYQEEFDKMKAKAPENFRVDYAISREQANDKGEKMYIQTRMAQYAAELWELLKKDNTFVYMCGLKGMEKGIDDIMVSLAANDGIDWFDYKKQLKKAEQWNVEVY

SEQ ID NO: 31088 - protein, 365 aa, Arabidopsis thaliana
  peptide (1)..(365): Ceres Seq. ID no. 12489612
  misc_feature (213)..(335): Pfam Name: Oxidoreductase NAD-binding domain Pfam Description: Oxidoreductase NAD-binding domain
  misc_feature (1)..(365): Homolog of NCBI NO: 119906 NR Description: Ferredoxin--NADP reductase, chloroplast precursor
  misc_feature (1)..(365): Homolog of NCBI NO: 119905 NR Description: Ferredoxin--NADP reductase, leaf isozyme,
  misc_feature (1)..(365): Homolog of NCBI NO: 170111 NR Description: ferredoxin-NADP oxidoreductase
  misc_feature (1)..(365): Homolog of NCBI NO: 729479 NR Description: Ferredoxin--NADP reductase, chloroplast precursor
  misc_feature (1)..(365): Homolog of NCBI NO: 3913651 NR Description: Ferredoxin--NADP reductase, leaf-type isozyme,
  misc_feature (1)..(365): Homolog of NCBI NO: 729477 NR Description: Ferredoxin--NADP reductase, chloroplast precursor
  misc_feature (1)..(365): Homolog of NCBI NO: 6899972 NR Description: chloroplast ferredoxin-NADP+ oxidoreductase
  misc_feature (265)..(365): Homolog of NCBI NO: 25285862 NR Description: hypothetical protein T20H2.20 - Arabidopsis
  misc_feature (1)..(244): Homolog of NCBI NO: 25285862 NR Description: hypothetical protein T20H2.20 - Arabidopsis
  misc_feature (1)..(365): Homolog of NCBI NO: 15223753 NR Description: ferredoxin--NADP reductase precursor, putative
MNAAVSLTSSNSSSFPATSCAIAPERIRFTKGAFYYKSNNVVTGKRVFSIKAQITTETDTPTPAKKVEKVSKKNEEGVIVNRYRPKEPYTGKCLLNTKITADDAPGETWHMVFSHQGEIPYREGQSVGVIADGIDKNGKPHKVRLYSIASSALGDLGNSETVSLCVKRLVYTNDQGETVKGVCSNFLCDLAPGSDVKLTGPVGKEMLMPKDPNATVIMLATGTGIAPFRSFLWKMFFEKHDDYKFNGLAWLFLGVPTTSSLLYQEEFDKMKAKAPENFRVDYAISREQANDKGEKMYIQTRMAQYAAELWELLKKDNTFVYMCGLKGMEKGIDDIMVSLAANDGIDWFDYKKQLKKAEQWNVEVY

SEQ ID NO: 31089 - protein, 255 aa, Arabidopsis thaliana
  peptide (1)..(255): Ceres Seq. ID no. 12489613
  misc_feature (103)..(225): Pfam Name: Oxidoreductase NAD-binding domain Pfam Description: Oxidoreductase NAD-binding domain
  misc_feature (1)..(255): Homolog of NCBI NO: 119906 NR Description: Ferredoxin--NADP reductase, chloroplast precursor
  misc_feature (1)..(255): Homolog of NCBI NO: 119905 NR Description: Ferredoxin--NADP reductase, leaf isozyme,
  misc_feature (1)..(255): Homolog of NCBI NO: 170111 NR Description: ferredoxin-NADP oxidoreductase
  misc_feature (1)..(255): Homolog of NCBI NO: 729479 NR Description: Ferredoxin--NADP reductase, chloroplast precursor
  misc_feature (1)..(255): Homolog of NCBI NO: 3913651 NR Description: Ferredoxin--NADP reductase, leaf-type isozyme,
  misc_feature (1)..(255): Homolog of NCBI NO: 729477 NR Description: Ferredoxin--NADP reductase, chloroplast precursor
  misc_feature (1)..(255): Homolog of NCBI NO: 6899972 NR Description: chloroplast ferredoxin-NADP+ oxidoreductase
  misc_feature (155)..(255): Homolog of NCBI NO: 25285862 NR Description: hypothetical protein T20H2.20 - Arabidopsis
  misc_feature (1)..(134): Homolog of NCBI NO: 25285862 NR Description: hypothetical protein T20H2.20 - Arabidopsis
  misc_feature (1)..(255): Homolog of NCBI NO: 15223753 NR Description: ferredoxin--NADP reductase precursor, putative
MVFSHQGEIPYREGQSVGVIADGIDKNGKPHKVRLYSIASSALGDLGNSETVSLCVKRLVYTNDQGETVKGVCSNFLCDLAPGSDVKLTGPVGKEMLMPKDPNATVIMLATGTGIAPFRSFLWKMFFEKHDDYKFNGLAWLFLGVPTTSSLLYQEEFDKMKAKAPENFRVDYAISREQANDKGEKMYIQTRMAQYAAELWELLKKDNTFVYMCGLKGMEKGIDDIMVSLAANDGIDWFDYKKQLKKAEQWNVEVY

SEQ ID NO: 31090 - DNA, 1195 bp, Arabidopsis thaliana
  misc_feature (1)..(1195): Ceres Seq. ID no. 12333949
  misc_feature: MA Experiment ID: 108463 Result: Up-regulated in Transcription
  misc_feature: MA Experiment 108463 PARAMETER Experiment Name: At_Germinating_Seeds_cDNA_P Parameter: Age (day) Value: 3 vs. 0
  misc_feature: MA Experiment 108463 PARAMETER Experiment Name: At_Germinating_Seeds_cDNA_P Parameter: Tissue Value: Germinating Seeds
  misc_feature: MA Experiment ID: 108573 Result: Up-regulated in Transcription
  misc_feature: MA Experiment 108573 PARAMETER Experiment Name: At_Drought_cDNA_P Parameter: Timepoint (hr) Value: 6
  misc_feature: MA Experiment 108573 PARAMETER Experiment Name: At_Drought_cDNA_P Parameter: Tissue Value: Aerial
  misc_feature: MA Experiment 108573 PARAMETER Experiment Name: At_Drought_cDNA_P Parameter: Treatment Value: Drought vs. No Drought
  misc_feature: MA Experiment ID: 108579 Result: Down-regulated in Transcription
  misc_feature: MA Experiment 108579 PARAMETER Experiment Name: At_4deg_Cold_cDNA_P Parameter: Temperature (deg C) Value: 4 vs. 22
  misc_feature: MA Experiment 108579 PARAMETER Experiment Name: At_4deg_Cold_cDNA_P Parameter: Timepoint (hr) Value: 6
  misc_feature: MA Experiment 108579 PARAMETER Experiment Name: At_4deg_Cold_cDNA_P Parameter: Tissue Value: Aerial
  misc_feature: MA Experiment ID: 20000069 Result: Up-regulated in Transcription
  misc_feature: MA Experiment 20000069 PARAMETER Experiment Name: At_100uM_ABA_Mutants_cDNA_P Parameter: Plant Line Value: CS23
  misc_feature: MA Experiment 20000069 PARAMETER Experiment Name: At_100uM_ABA_Mutants_cDNA_P Parameter: Timepoint (hr) Value: 6
  misc_feature: MA Experiment 20000069 PARAMETER Experiment Name: At_100uM_ABA_Mutants_cDNA_P Parameter: Tissue Value: Aerial
  misc_feature: MA Experiment 20000069 PARAMETER Experiment Name: At_100uM_ABA_Mutants_cDNA_P Parameter: Treatment Value: 100uM ABA vs. No Treatment
  misc_feature: MA Experiment ID: 20000070 Result: Up-regulated in Transcription
  misc_feature: MA Experiment 20000070 PARAMETER Experiment Name: At_100uM_ABA_Mutants_cDNA_P Parameter: Plant Line Value: CS24
  misc_feature: MA Experiment 20000070 PARAMETER Experiment Name: At_100uM_ABA_Mutants_cDNA_P Parameter: Timepoint (hr) Value: 6
  misc_feature: MA Experiment 20000070 PARAMETER Experiment Name: At_100uM_ABA_Mutants_cDNA_P Parameter: Tissue Value: Aerial
  misc_feature: MA Experiment 20000070 PARAMETER Experiment Name: At_100uM_ABA_Mutants_cDNA_P Parameter: Treatment Value: 100uM ABA vs. No Treatment
  misc_feature: MA Experiment ID: 20000184 Result: Down-regulated in Transcription
  misc_feature: MA Experiment 20000184 PARAMETER Experiment Name: At_Shoots__P Parameter: Age (day) Value: 7
  misc_feature: MA Experiment 20000184 PARAMETER Experiment Name: At_Shoots__P Parameter: Tissue Value: Shoots vs. Whole Plant
  misc_feature: MA Experiment ID: 20000227 Result: Down-regulated in Transcription
  misc_feature: MA Experiment 20000227 PARAMETER Experiment Name: At_Root-Tips-vs-Tops_P Parameter: Tissue Value: Root Tips vs. Root Tops
  misc_feature: MA Experiment ID: 20000234 Result: Down-regulated in Transcription
  misc_feature: MA Experiment 20000234 PARAMETER Experiment Name: At_Siliques_P Parameter: Age (day) Value: 21
  misc_feature: MA Experiment 20000234 PARAMETER Experiment Name: At_Siliques_P Parameter: Organism Value: A. thaliana
  misc_feature: MA Experiment 20000234 PARAMETER Experiment Name: At_Siliques_P Parameter: Plant Line Value: WS
  misc_feature: MA Experiment 20000234 PARAMETER Experiment Name: At_Siliques_P Parameter: Tissue Value: Less Than 5mm Siliques vs. Whole Plant
  misc_feature: MA Experiment ID: 20000235 Result: Down-regulated in Transcription
  misc_feature: MA Experiment 20000235 PARAMETER Experiment Name: At_Siliques_P Parameter: Age (day) Value: 21
  misc_feature: MA Experiment 20000235 PARAMETER Experiment Name: At_Siliques_P Parameter: Organism Value: A. thaliana
  misc_feature: MA Experiment 20000235 PARAMETER Experiment Name: At_Siliques_P Parameter: Plant Line Value: WS
  misc_feature: MA Experiment 20000235 PARAMETER Experiment Name: At_Siliques_P Parameter: Tissue Value: 5-10mm Siliques vs. Whole Plant
  misc_feature: MA Experiment ID: 20000265 Result: Down-regulated in Transcription
  misc_feature: MA Experiment 20000265 PARAMETER Experiment Name: At_Open_Flower_P Parameter: Age (day) Value: 21
  misc_feature: MA Experiment 20000265 PARAMETER Experiment Name: At_Open_Flower_P Parameter: Plant Line Value: WS
  misc_feature: MA Experiment 20000265 PARAMETER Experiment Name: At_Open_Flower_P Parameter: Tissue Value: Closed Flower vs. Whole Plant
  misc_feature: MA Experiment ID: 20000436 Result: Up-regulated in Transcription
  misc_feature: MA Experiment 20000436 PARAMETER Experiment Name: At_Drought_P Parameter: Age (day) Value: 7
  misc_feature: MA Experiment 20000436 PARAMETER Experiment Name: At_Drought_P Parameter: Organism Value: A. thaliana
  misc_feature: MA Experiment 20000436 PARAMETER Experiment Name: At_Drought_P Parameter: Plant Line Value: WS
  misc_feature: MA Experiment 20000436 PARAMETER Experiment Name: At_Drought_P Parameter: Timepoint (hr) Value: 12
  misc_feature: MA Experiment 20000436 PARAMETER Experiment Name: At_Drought_P Parameter: Tissue Value: Whole Plant
  misc_feature: MA Experiment 20000436 PARAMETER Experiment Name: At_Drought_P Parameter: Treatment Value: Drought vs. No Drought
  misc_feature: MA Experiment ID: 20000437 Result: Up-regulated in Transcription
  misc_feature: MA Experiment 20000437 PARAMETER Experiment Name: At_Drought_P Parameter: Age (day) Value: 8
  misc_feature: MA Experiment 20000437 PARAMETER Experiment Name: At_Drought_P Parameter: Organism Value: A. thaliana
  misc_feature: MA Experiment 20000437 PARAMETER Experiment Name: At_Drought_P Parameter: Plant Line Value: WS
  misc_feature: MA Experiment 20000437 PARAMETER Experiment Name: At_Drought_P Parameter: Timepoint (hr) Value: 24
  misc_feature: MA Experiment 20000437 PARAMETER Experiment Name: At_Drought_P Parameter: Tissue Value: Whole Plant
  misc_feature: MA Experiment 20000437 PARAMETER Experiment Name: At_Drought_P Parameter: Treatment Value: Drought vs. No Drought
  misc_feature: MA Experiment ID: 20001248 Result: Up-regulated in Transcription
  misc_feature: MA Experiment 20001248 PARAMETER Experiment Name: At_Far-red-induction_P Parameter: Age (day) Value: 7
  misc_feature: MA Experiment 20001248 PARAMETER Experiment Name: At_Far-red-induction_P Parameter: Light Value: Far-red vs. White
  misc_feature: MA Experiment 20001248 PARAMETER Experiment Name: At_Far-red-induction_P Parameter: Organism Value: A. thaliana
  misc_feature: MA Experiment 20001248 PARAMETER Experiment Name: At_Far-red-induction_P Parameter: Plant Line Value: Columbia
  misc_feature: MA Experiment 20001248 PARAMETER Experiment Name: At_Far-red-induction_P Parameter: Timepoint (hr) Value: 4
  misc_feature: MA Experiment 20001248 PARAMETER Experiment Name: At_Far-red-induction_P Parameter: Tissue Value: Whole Plant
  misc_feature: MA Experiment ID: 20001558 Result: Down-regulated in Transcription
  misc_feature: MA Experiment 20001558 PARAMETER Experiment Name: At_Drought_Soil_Dry_P Parameter: Age (day) Value: 27
  misc_feature: MA Experiment 20001558 PARAMETER Experiment Name: At_Drought_Soil_Dry_P Parameter: Organism Value: A. thaliana
  misc_feature: MA Experiment 20001558 PARAMETER Experiment Name: At_Drought_Soil_Dry_P Parameter: Plant Line Value: WS
  misc_feature: MA Experiment 20001558 PARAMETER Experiment Name: At_Drought_Soil_Dry_P Parameter: Post Timepoint (hr) Value: 6
  misc_feature: MA Experiment 20001558 PARAMETER Experiment Name: At_Drought_Soil_Dry_P Parameter: Post-Treatment Value: Re-Water vs. No Drought
  misc_feature: MA Experiment 20001558 PARAMETER Experiment Name: At_Drought_Soil_Dry_P Parameter: Timepoint (day) Value: 13
  misc_feature: MA Experiment 20001558 PARAMETER Experiment Name: At_Drought_Soil_Dry_P Parameter: Treatment Value: Drought vs. No Drought
  misc_feature: MA Experiment ID: 20001560 Result: Down-regulated in Transcription
  misc_feature: MA Experiment 20001560 PARAMETER Experiment Name: At_Drought_Soil_Dry_P Parameter: Age (day) Value: 28
  misc_feature: MA Experiment 20001560 PARAMETER Experiment Name: At_Drought_Soil_Dry_P Parameter: Organism Value: A. thaliana
  misc_feature: MA Experiment 20001560 PARAMETER Experiment Name: At_Drought_Soil_Dry_P Parameter: Plant Line Value: WS
  misc_feature: MA Experiment 20001560 PARAMETER Experiment Name: At_Drought_Soil_Dry_P Parameter: Post Timepoint (hr) Value: None
  misc_feature: MA Experiment 20001560 PARAMETER Experiment Name: At_Drought_Soil_Dry_P Parameter: Post-Treatment Value: None
  misc_feature: MA Experiment 20001560 PARAMETER Experiment Name: At_Drought_Soil_Dry_P Parameter: Timepoint (day) Value: 14
  misc_feature: MA Experiment 20001560 PARAMETER Experiment Name: At_Drought_Soil_Dry_P Parameter: Treatment Value: Drought vs. No Drought
gcggagaagtactctctggagccgccacgtctcagtgatccgactacgacacctttcttcactcttcttcttgcgtcttctctgctctcgtggtctctctgttatttaattttaatcgattgagatcgcttttagctctcgtctttgaattttacgggcagaaaatgggtgaagaagctcgagcgttagatatggaggagatcagtgacaacacgacgagacgaaacgatgtcgttcatgacttgatggttgatttatacccgcttagcagctactacttcggttcaaaagaagctcttcgcgtcaaggacgagattatctctgatcgagtcatcagattgaaatccaattatgctgctcatggattgagaacttgcgttgaagctgttcttctggttgagttgttcaagcatcctcatgttttgcttcttcaatatagaaactccattttcaagcttcctggtggtcgtttgagacctggagaatcagatattgaaggtctaaaacggaaactagcatcaaagctatcggttaacgaaaatgtgggtgtttcgggttatgaggtaggagaatgtattgggatgtggtggagacccaactttgagacattgatgtatcctttcttgccacctaatattaaacacccaaaggaatgcacaaagctttttcttgtgagattaccggtacatcaacagtttgttgtgcctaagaacttcaaactcctcgctgttccattgtgtcaactccatgaaaatgaaaagacttatgggccgatcatgtcgcaaattcctaagcttctttcgaaattctccttcaacatgatggagatatgaacgaacctcatgatcattgcctctagtagctcttgccccccgcaatttgtgataggattatgtttggggaaatcgtttgtggagcctctctgagtctgtgactatataatgtatatagggcttataatatatagacaatgttgaagaatagcatgttcttgttggttatagagactagacatgaagtatactgatagatagattaatcaattcgaaacaatttttctttgtgtgataatttcgatgtgtaattgaatgtatacatgagtaaaacaaatataggggtgtatgcttatttgtatattccttgttgaagaaaaccttgttatcttcaaacatgaaaccgagaaacataagtaaag

SEQ ID NO: 31091 - protein, 222 aa, Arabidopsis thaliana
  peptide (1)..(222): Ceres Seq. ID no. 12333950
  misc_feature (69)..(195): Pfam Name: NUDIX domain Pfam Description: NUDIX domain
  misc_feature (28)..(166): Homolog of NCBI NO: 7486820 NR Description: hypothetical protein M7J2.80 - Arabidopsis
  misc_feature (29)..(217): Homolog of NCBI NO: 17507315 NR Description: Cleavage polyadenylation specific factor 5
  misc_feature (29)..(217): Homolog of NCBI NO: 39595588 NR Description: Hypothetical protein CBG12500 [Caenorhabditis
  misc_feature (16)..(217): Homolog of NCBI NO: 24370468 NR Description: putative pre-mrna cleavage factor [Brugia malayi]
  misc_feature (29)..(217): Homolog of NCBI NO: 13386106 NR Description: cleavage and polyadenylation specific factor 5
  misc_feature (29)..(217): Homolog of NCBI NO: 5901926 NR Description: cleavage and polyadenylation specific factor 5,
  misc_feature (28)..(220): Homolog of NCBI NO: 30686923 NR Description: expressed protein [Arabidopsis thaliana]
  misc_feature (1)..(55): Homolog of NCBI NO: 7486231 NR Description: hypothetical protein F27B13.60 - Arabidopsis
  misc_feature (82)..(222): Homolog of NCBI NO: 7486231 NR Description: hypothetical protein F27B13.60 - Arabidopsis
  misc_feature (1)..(222): Homolog of NCBI NO: 18417474 NR Description: mRNA cleavage factor subunit - like protein
MGEEARALDMEEISDNTTRRNDVVHDLMVDLYPLSSYYFGSKEALRVKDEIISDRVIRLKSNYAAHGLRTCVEAVLLVELFKHPHVLLLQYRNSIFKLPGGRLRPGESDIEGLKRKLASKLSVNENVGVSGYEVGECIGMWWRPNFETLMYPFLPPNIKHPKECTKLFLVRLPVHQQFVVPKNFKLLAVPLCQLHENEKTYGPIMSQIPKLLSKFSFNMMEI

SEQ ID NO: 31092 - protein, 213 aa, Arabidopsis thaliana
  peptide (1)..(213): Ceres Seq. ID no. 12333951
  misc_feature (60)..(186): Pfam Name: NUDIX domain Pfam Description: NUDIX domain
  misc_feature (19)..(157): Homolog of NCBI NO: 7486820 NR Description: hypothetical protein M7J2.80 - Arabidopsis
  misc_feature (20)..(208): Homolog of NCBI NO: 17507315 NR Description: Cleavage polyadenylation specific factor 5
  misc_feature (20)..(208): Homolog of NCBI NO: 39595588 NR Description: Hypothetical protein CBG12500 [Caenorhabditis
  misc_feature (7)..(208): Homolog of NCBI NO: 24370468 NR Description: putative pre-mrna cleavage factor [Brugia malayi]
  misc_feature (20)..(208): Homolog of NCBI NO: 13386106 NR Description: cleavage and polyadenylation specific factor 5
  misc_feature (20)..(208): Homolog of NCBI NO: 5901926 NR Description: cleavage and polyadenylation specific factor 5,
  misc_feature (19)..(211): Homolog of NCBI NO: 30686923 NR Description: expressed protein [Arabidopsis thaliana]
  misc_feature (1)..(46): Homolog of NCBI NO: 7486231 NR Description: hypothetical protein F27B13.60 - Arabidopsis
  misc_feature (73)..(213): Homolog of NCBI NO: 7486231 NR Description: hypothetical protein F27B13.60 - Arabidopsis
  misc_feature (1)..(213): Homolog of NCBI NO: 18417474 NR Description: mRNA cleavage factor subunit - like protein
MEEISDNTTRRNDVVHDLMVDLYPLSSYYFGSKEALRVKDEIISDRVIRLKSNYAAHGLRTCVEAVLLVELFKHPHVLLLQYRNSIFKLPGGRLRPGESDIEGLKRKLASKLSVNENVGVSGYEVGECIGMWWRPNFETLMYPFLPPNIKHPKECTKLFLVRLPVHQQFVVPKNFKLLAVPLCQLHENEKTYGPIMSQIPKLLSKFSFNMMEI

SEQ ID NO: 31093 - protein, 195 aa, Arabidopsis thaliana
  peptide (1)..(195): Ceres Seq. ID no. 12333952
  misc_feature (42)..(168): Pfam Name: NUDIX domain Pfam Description: NUDIX domain
  misc_feature (1)..(139): Homolog of NCBI NO: 7486820 NR Description: hypothetical protein M7J2.80 - Arabidopsis
  misc_feature (2)..(190): Homolog of NCBI NO: 17507315 NR Description: Cleavage polyadenylation specific factor 5
  misc_feature (2)..(190): Homolog of NCBI NO: 39595588 NR Description: Hypothetical protein CBG12500 [Caenorhabditis
  misc_feature (1)..(190): Homolog of NCBI NO: 24370468 NR Description: putative pre-mrna cleavage factor [Brugia malayi]
  misc_feature (2)..(190): Homolog of NCBI NO: 13386106 NR Description: cleavage and polyadenylation specific factor 5
  misc_feature (2)..(190): Homolog of NCBI NO: 5901926 NR Description: cleavage and polyadenylation specific factor 5,
  misc_feature (1)..(193): Homolog of NCBI NO: 30686923 NR Description: expressed protein [Arabidopsis thaliana]
  misc_feature (1)..(28): Homolog of NCBI NO: 7486231 NR Description: hypothetical protein F27B13.60 - Arabidopsis
  misc_feature (55)..(195): Homolog of NCBI NO: 7486231 NR Description: hypothetical protein F27B13.60 - Arabidopsis
  misc_feature (1)..(195): Homolog of NCBI NO: 18417474 NR Description: mRNA cleavage factor subunit - like protein
MVDLYPLSSYYFGSKEALRVKDEIISDRVIRLKSNYAAHGLRTCVEAVLLVELFKHPHVLLLQYRNSIFKLPGGRLRPGESDIEGLKRKLASKLSVNENVGVSGYEVGECIGMWWRPNFETLMYPFLPPNIKHPKECTKLFLVRLPVHQQFVVPKNFKLLAVPLCQLHENEKTYGPIMSQIPKLLSKFSFNMMEI

SEQ ID NO: 31094 - DNA, 761 bp, Arabidopsis thaliana
  misc_feature (1)..(761): Ceres Seq. ID no. 12397086
  misc_feature: MA Experiment ID: 20000227 Result: Up-regulated in Transcription
  misc_feature: MA Experiment 20000227 PARAMETER Experiment Name: At_Root-Tips-vs-Tops_P Parameter: Tissue Value: Root Tips vs. Root Tops
  misc_feature: MA Experiment ID: 20001560 Result: Up-regulated in Transcription
  misc_feature: MA Experiment 20001560 PARAMETER Experiment Name: At_Drought_Soil_Dry_P Parameter: Age (day) Value: 28
  misc_feature: MA Experiment 20001560 PARAMETER Experiment Name: At_Drought_Soil_Dry_P Parameter: Organism Value: A. thaliana
  misc_feature: MA Experiment 20001560 PARAMETER Experiment Name: At_Drought_Soil_Dry_P Parameter: Plant Line Value: WS
  misc_feature: MA Experiment 20001560 PARAMETER Experiment Name: At_Drought_Soil_Dry_P Parameter: Post Timepoint (hr) Value: None
  misc_feature: MA Experiment 20001560 PARAMETER Experiment Name: At_Drought_Soil_Dry_P Parameter: Post-Treatment Value: None
  misc_feature: MA Experiment 20001560 PARAMETER Experiment Name: At_Drought_Soil_Dry_P Parameter: Timepoint (day) Value: 14
  misc_feature: MA Experiment 20001560 PARAMETER Experiment Name: At_Drought_Soil_Dry_P Parameter: Treatment Value: Drought vs. No Drought
aaagaagaaaaacccttgctactgcttttcatttctgacctaaaagctcagctccgatttgaaaatggggagtagattgggaggacgagtggttcatttcgcgaatcttccgattaagcttctgatgcctgcgaagctgaccaacattcacgaattcgcgttgaaaacgattccttccgcgtccaagatcgagatcaagcgagtcctggagtcgctctacggattcgatgtggagaaggtgaatactttaaacatggatgggaagaagaagaagcgtggtggtttgttgatagcgaaagctgattacaagaaggcttacgtcacgctacgtagtccattgtcgatttctagggatttgtttccggtgaagtatatcgaggaagataggaagagtaaagtgaaaggatctagctttgttgaggaagaagatgataagaagagtcattggcttgatcgtaaggagaagagggagattggtggttatggtaaaggtaaaggtcgtcgaggtggtgaaagggctaactctccgacgagaggtggtgctgcggcggcggggacggccaagtttccatggagcaacatgagatttgttggtaagtagggtttatgagcagattatgatctggggtttgtgtttctttagctatcggattattgattttgttgtttctattacttgaggtttgtgtattgagaatctgaatcattgaagctctcagtgtttctgagatttggctaataaatctgaatcaagatgttgc

SEQ ID NO: 31095 - protein, 178 aa, Arabidopsis thaliana
  peptide (1)..(178): Ceres Seq. ID no. 12397087
  misc_feature (7)..(102): Pfam Name: Ribosomal protein L23 Pfam Description: Ribosomal protein L23
  misc_feature (37)..(88): Homolog of NCBI NO: 15896381 NR Description: Ribosomal protein L23 [Clostridium
  misc_feature (23)..(89): Homolog of NCBI NO: 16120549 NR Description: 50S ribosomal protein L23 [Yersinia pestis]
  misc_feature (23)..(89): Homolog of NCBI NO: 730543 NR Description: 50S RIBOSOMAL PROTEIN L23
  misc_feature (30)..(89): Homolog of NCBI NO: 15599457 NR Description: 50S ribosomal protein L23 [Pseudomonas aeruginosa
  misc_feature (1)..(174): Homolog of NCBI NO: 34394046 NR Description: unknown protein [Oryza sativa (japonica
  misc_feature (1)..(178): Homolog of NCBI NO: 21554117 NR Description: unknown [Arabidopsis thaliana]
  misc_feature (1)..(178): Homolog of NCBI NO: 15236061 NR Description: putative protein
MGSRLGGRVVHFANLPIKLLMPAKLTNIHEFALKTIPSASKIEIKRVLESLYGFDVEKVNTLNMDGKKKKRGGLLIAKADYKKAYVTLRSPLSISRDLFPVKYIEEDRKSKVKGSSFVEEEDDKKSHWLDRKEKREIGGYGKGKGRRGGERANSPTRGGAAAAGTAKFPWSNMRFVGK

SEQ ID NO: 31096 - protein, 158 aa, Arabidopsis thaliana
  peptide (1)..(158): Ceres Seq. ID no. 12397088
  misc_feature (1)..(82): Pfam Name: Ribosomal protein L23 Pfam Description: Ribosomal protein L23
  misc_feature (17)..(68): Homolog of NCBI NO: 15896381 NR Description: Ribosomal protein L23 [Clostridium
  misc_feature (3)..(69): Homolog of NCBI NO: 16120549 NR Description: 50S ribosomal protein L23 [Yersinia pestis]
  misc_feature (3)..(69): Homolog of NCBI NO: 730543 NR Description: 50S RIBOSOMAL PROTEIN L23
  misc_feature (10)..(69): Homolog of NCBI NO: 15599457 NR Description: 50S ribosomal protein L23 [Pseudomonas aeruginosa
  misc_feature (1)..(154): Homolog of NCBI NO: 34394046 NR Description: unknown protein [Oryza sativa (japonica
  misc_feature (1)..(158): Homolog of NCBI NO: 21554117 NR Description: unknown [Arabidopsis thaliana]
  misc_feature (1)..(158): Homolog of NCBI NO: 15236061 NR Description: putative protein
MPAKLTNIHEFALKTIPSASKIEIKRVLESLYGFDVEKVNTLNMDGKKKKRGGLLIAKADYKKAYVTLRSPLSISRDLFPVKYIEEDRKSKVKGSSFVEEEDDKKSHWLDRKEKREIGGYGKGKGRRGGERANSPTRGGAAAAGTAKFPWSNMRFVGK

SEQ ID NO: 31097 - protein, 115 aa, Arabidopsis thaliana
  peptide (1)..(115): Ceres Seq. ID no. 12397089
  misc_feature (1)..(25): Homolog of NCBI NO: 15896381 NR Description: Ribosomal protein L23 [Clostridium
  misc_feature (1)..(26): Homolog of NCBI NO: 16120549 NR Description: 50S ribosomal protein L23 [Yersinia pestis]
  misc_feature (1)..(26): Homolog of NCBI NO: 730543 NR Description: 50S RIBOSOMAL PROTEIN L23
  misc_feature (1)..(26): Homolog of NCBI NO: 15599457 NR Description: 50S ribosomal protein L23 [Pseudomonas aeruginosa
  misc_feature (1)..(111): Homolog of NCBI NO: 34394046 NR Description: unknown protein [Oryza sativa (japonica
  misc_feature (1)..(115): Homolog of NCBI NO: 21554117 NR Description: unknown [Arabidopsis thaliana]
  misc_feature (1)..(115): Homolog of NCBI NO: 15236061 NR Description: putative protein
MDGKKKKRGGLLIAKADYKKAYVTLRSPLSISRDLFPVKYIEEDRKSKVKGSSFVEEEDDKKSHWLDRKEKREIGGYGKGKGRRGGERANSPTRGGAAAAGTAKFPWSNMRFVGK

SEQ ID NO: 31098 - DNA, 1684 bp, Arabidopsis thaliana
  misc_feature (1)..(1684): Ceres Seq. ID no. 13497681
  misc_feature: MA Experiment ID: 108434 Result: Up-regulated in Transcription
  misc_feature: MA Experiment 108434 PARAMETER Experiment Name: At_Root_Tips_cDNA_P Parameter: Tissue Value: Root Tips
  misc_feature: MA Experiment ID: 108464 Result: Up-regulated in Transcription
  misc_feature: MA Experiment 108464 PARAMETER Experiment Name: At_Germinating_Seeds_cDNA_P Parameter: Age (day) Value: 4 vs. 0
  misc_feature: MA Experiment 108464 PARAMETER Experiment Name: At_Germinating_Seeds_cDNA_P Parameter: Tissue Value: Germinating Seeds
  misc_feature: MA Experiment ID: 108608 Result: Up-regulated in Transcription
  misc_feature: MA Experiment 108608 PARAMETER Experiment Name: At_100uM_ABA_cDNA_P Parameter: Timepoint (hr) Value: 1
  misc_feature: MA Experiment 108608 PARAMETER Experiment Name: At_100uM_ABA_cDNA_P Parameter: Tissue Value: Aerial
  misc_feature: MA Experiment 108608 PARAMETER Experiment Name: At_100uM_ABA_cDNA_P Parameter: Treatment Value: 100uM ABA vs. No Treatment
  misc_feature: MA Experiment ID: 20000180 Result: Up-regulated in Transcription
  misc_feature: MA Experiment 20000180 PARAMETER Experiment Name: At_Germinating_Seeds_P Parameter: Age (hr) Value: 24 vs. 0
  misc_feature: MA Experiment 20000180 PARAMETER Experiment Name: At_Germinating_Seeds_P Parameter: Tissue Value: Germinating Seeds
  misc_feature: MA Experiment ID: 20000495 Result: Up-regulated in Transcription
  misc_feature: MA Experiment 20000495 PARAMETER Experiment Name: At_Guard_Cells_P Parameter: Harvest Date Value: 8/2/2002
  misc_feature: MA Experiment 20000495 PARAMETER Experiment Name: At_Guard_Cells_P Parameter: Organism Value: A. thaliana
  misc_feature: MA Experiment 20000495 PARAMETER Experiment Name: At_Guard_Cells_P Parameter: Tissue Value: Guard Cells vs. Leaves
atttatgaggggtgagttgattcattaattcttggatctttgggtgtctaggtttacttagagaagtgacttgtgtctttaatgggtttgttgaaagatgtgtcagtgacatgaagaagacgaacaacaacaataagcttgcaataaatgttttgccttcatcttcatcacacatcaacaccacacaaaaagtgtttttcatactcttcagaaaagtcaataccgtgaaaaagaggagactcctgactcctcagtcattgcaatgtcttcttcttcttcttgcttgttcttcactttcattctcttactcagtctcttctcctcctatgcttctccatcgaattcgacatccgaaactgtgcctctccggcctcaaagagagattcagaagatgaaactcatcagaaaacaactccaaaagattaataaaccagccatcaagaccattcatagctcagatggagatacgatagattgtgttccatctcatcaccagcctgcttttgatcatcctttgttacagggacaacgaccaatggatccaccggagatgcctatagggtatagccaagaaaatgaatcccacgaaaatttccagctttggagtttatacggtgagtcttgcccggaaggtacgattccgatcagaagaacaacggagcaagacatgttaagagcaaattctgtccgtagatttggtcggaaaatcaggcgcgtgagaagggattcgagcagtaatggccacgagcatgcggttggatacgtatcgggaagtcaatactacggagcaaaagcaagtataaacgtgtggacgccacgtgtcataagccaatacgagtttagtctatctcagatttggatcatcgccggttctttcgccggcgatcttaataccatcgaagctggttggcagattagcccggagctatacggagacactaacccaagattcttcacctattggacgtcggatgcttaccaagcaacaggatgctataacctactatgttctggttttgttcaaacaaacaatcgaatcgcaattggagcggcgatttcgcccgtttcgtcgtataaaggtggacaattcgatataagcttattgatatggaaggacccaaagcatggacattggtggctccaattcgggtcgggtacactagtcggatattggcccgtatctctgttcacacacctgagggagcatggaaacatggtccagtttggtggcgagatcgtgaacacacgacctggtggttcacatacttcgactcaaatgggcagtggccattttgccggtgaaggttttggaaaagcgtcttactttaggaatcttcaaatggtagattgggacaatactcttattccgatatctaatcttaaagttcttgcagatcatcctaattgttatgatataagaggaggggtaaaccgtgtttggggtaactttttttattacggaggaccgggtaaaaactcgaaatgtccatagagaaaaaaaagaagtggatagtgttgttttgagcttaagtaaatgagattttttgggatttagagctcaggacaatgatgaaagatccatagtttttttttttgtttgtaagaaaagaaatgtatcgattgattgatatgttatcaaatgtgtaaatgtagaatatggtgttaagtggaagtaggcgtttat

SEQ ID NO: 31099 - protein, 409 aa, Arabidopsis thaliana
  peptide (1)..(409): Ceres Seq. ID no. 13497682
  misc_feature (173)..(367): Pfam Name: Arabidopsis proteins of unknown function Pfam Description: Arabidopsis proteins of unknown function
  misc_feature (1)..(409): Homolog of NCBI NO: 15240622 NR Description: expressed protein [Arabidopsis thaliana]
  misc_feature (1)..(106): Homolog of NCBI NO: 6573746 NR Description: F20B24.18 [Arabidopsis thaliana]
  misc_feature (118)..(409): Homolog of NCBI NO: 6573746 NR Description: F20B24.18 [Arabidopsis thaliana]
  misc_feature (1)..(409): Homolog of NCBI NO: 15220207 NR Description: expressed protein [Arabidopsis thaliana]
  misc_feature (1)..(409): Homolog of NCBI NO: 21389708 NR Description: putative carboxyl-terminal proteinase [Gossypium
  misc_feature (2)..(409): Homolog of NCBI NO: 28416687 NR Description: At1g70550 [Arabidopsis thaliana]
  misc_feature (2)..(409): Homolog of NCBI NO: 25345697 NR Description: unknown protein F5A18.27 [imported] - Arabidopsis
  misc_feature (1)..(409): Homolog of NCBI NO: 30698726 NR Description: expressed protein [Arabidopsis thaliana]
  misc_feature (1)..(409): Homolog of NCBI NO: 25345695 NR Description: protein F26F24.22 [imported] - Arabidopsis
  misc_feature (1)..(409): Homolog of NCBI NO: 30688348 NR Description: expressed protein [Arabidopsis thaliana]
MSSSSSCLFFTFILLLSLFSSYASPSNSTSETVPLRPQREIQKMKLIRKQLQKINKPAIKTIHSSDGDTIDCVPSHHQPAFDHPLLQGQRPMDPPEMPIGYSQENESHENFQLWSLYGESCPEGTIPIRRTTEQDMLRANSVRRFGRKIRRVRRDSSSNGHEHAVGYVSGSQYYGAKASINVWTPRVISQYEFSLSQIWIIAGSFAGDLNTIEAGWQISPELYGDTNPRFFTYWTSDAYQATGCYNLLCSGFVQTNNRIAIGAAISPVSSYKGGQFDISLLIWKDPKHGHWWLQFGSGTLVGYWPVSLFTHLREHGNMVQFGGEIVNTRPGGSHTSTQMGSGHFAGEGFGKASYFRNLQMVDWDNTLIPISNLKVLADHPNCYDIRGGVNRVWGNFFYYGGPGKNSKCP

SEQ ID NO: 31100 - protein, 366 aa, Arabidopsis thaliana
  peptide (1)..(366): Ceres Seq. ID no. 13497683
  misc_feature (130)..(324): Pfam Name: Arabidopsis proteins of unknown function Pfam Description: Arabidopsis proteins of unknown function
  misc_feature (1)..(366): Homolog of NCBI NO: 15240622 NR Description: expressed protein [Arabidopsis thaliana]
  misc_feature (1)..(63): Homolog of NCBI NO: 6573746 NR Description: F20B24.18 [Arabidopsis thaliana]
  misc_feature (75)..(366): Homolog of NCBI NO: 6573746 NR Description: F20B24.18 [Arabidopsis thaliana]
  misc_feature (1)..(366): Homolog of NCBI NO: 15220207 NR Description: expressed protein [Arabidopsis thaliana]
  misc_feature (1)..(366): Homolog of NCBI NO: 21389708 NR Description: putative carboxyl-terminal proteinase [Gossypium
  misc_feature (1)..(366): Homolog of NCBI NO: 28416687 NR Description: At1g70550 [Arabidopsis thaliana]
  misc_feature (1)..(366): Homolog of NCBI NO: 25345697 NR Description: unknown protein F5A18.27 [imported] - Arabidopsis
  misc_feature (1)..(366): Homolog of NCBI NO: 30698726 NR Description: expressed protein [Arabidopsis thaliana]
  misc_feature (1)..(366): Homolog of NCBI NO: 25345695 NR Description: protein F26F24.22 [imported] - Arabidopsis
  misc_feature (1)..(366): Homolog of NCBI NO: 30688348 NR Description: expressed protein [Arabidopsis thaliana]
MKLIRKQLQKINKPAIKTIHSSDGDTIDCVPSHHQPAFDHPLLQGQRPMDPPEMPIGYSQENESHENFQLWSLYGESCPEGTIPIRRTTEQDMLRANSVRRFGRKIRRVRRDSSSNGHEHAVGYVSGSQYYGAKASINVWTPRVISQYEFSLSQIWIIAGSFAGDLNTIEAGWQISPELYGDTNPRFFTYWTSDAYQATGCYNLLCSGFVQTNNRIAIGAAISPVSSYKGGQFDISLLIWKDPKHGHWWLQFGSGTLVGYWPVSLFTHLREHGNMVQFGGEIVNTRPGGSHTSTQMGSGHFAGEGFGKASYFRNLQMVDWDNTLIPISNLKVLADHPNCYDIRGGVNRVWGNFFYYGGPGKNSKCP

SEQ ID NO: 31101 - protein, 318 aa, Arabidopsis thaliana
  peptide (1)..(318): Ceres Seq. ID no. 13497684
  misc_feature (82)..(276): Pfam Name: Arabidopsis proteins of unknown function Pfam Description: Arabidopsis proteins of unknown function
  misc_feature (1)..(318): Homolog of NCBI NO: 15240622 NR Description: expressed protein [Arabidopsis thaliana]
  misc_feature (1)..(15): Homolog of NCBI NO: 6573746 NR Description: F20B24.18 [Arabidopsis thaliana]
  misc_feature (27)..(318): Homolog of NCBI NO: 6573746 NR Description: F20B24.18 [Arabidopsis thaliana]
  misc_feature (1)..(318): Homolog of NCBI NO: 15220207 NR Description: expressed protein [Arabidopsis thaliana]
  misc_feature (1)..(318): Homolog of NCBI NO: 21389708 NR Description: putative carboxyl-terminal proteinase [Gossypium
  misc_feature (1)..(318): Homolog of NCBI NO: 28416687 NR Description: At1g70550 [Arabidopsis thaliana]
  misc_feature (1)..(318): Homolog of NCBI NO: 25345697 NR Description: unknown protein F5A18.27 [imported] - Arabidopsis
  misc_feature (1)..(318): Homolog of NCBI NO: 30698726 NR Description: expressed protein [Arabidopsis thaliana]
  misc_feature (1)..(318): Homolog of NCBI NO: 25345695 NR Description: protein F26F24.22 [imported] - Arabidopsis
  misc_feature (1)..(318): Homolog of NCBI NO: 30688348 NR Description: expressed protein [Arabidopsis thaliana]
MDPPEMPIGYSQENESHENFQLWSLYGESCPEGTIPIRRTTEQDMLRANSVRRFGRKIRRVRRDSSSNGHEHAVGYVSGSQYYGAKASINVWTPRVISQYEFSLSQIWIIAGSFAGDLNTIEAGWQISPELYGDTNPRFFTYWTSDAYQATGCYNLLCSGFVQTNNRIAIGAAISPVSSYKGGQFDISLLIWKDPKHGHWWLQFGSGTLVGYWPVSLFTHLREHGNMVQFGGEIVNTRPGGSHTSTQMGSGHFAGEGFGKASYFRNLQMVDWDNTLIPISNLKVLADHPNCYDIRGGVNRVWGNFFYYGGPGKNSKCP

SEQ ID NO: 31102 - DNA, 1241 bp, Arabidopsis thaliana
  misc_feature (1)..(1241): Ceres Seq. ID no. 12321288
  misc_feature: MA Experiment ID: 108434 Result: Up-regulated in Transcription
  misc_feature: MA Experiment 108434 PARAMETER Experiment Name: At_Root_Tips_cDNA_P Parameter: Tissue Value: Root Tips
  misc_feature: MA Experiment ID: 108462 Result: Down-regulated in Transcription
  misc_feature: MA Experiment 108462 PARAMETER Experiment Name: At_Germinating_Seeds_cDNA_P Parameter: Age (day) Value: 2 vs. 0
  misc_feature: MA Experiment 108462 PARAMETER Experiment Name: At_Germinating_Seeds_cDNA_P Parameter: Tissue Value: Germinating Seeds
  misc_feature: MA Experiment ID: 108463 Result: Down-regulated in Transcription
  misc_feature: MA Experiment 108463 PARAMETER Experiment Name: At_Germinating_Seeds_cDNA_P Parameter: Age (day) Value: 3 vs. 0
  misc_feature: MA Experiment 108463 PARAMETER Experiment Name: At_Germinating_Seeds_cDNA_P Parameter: Tissue Value: Germinating Seeds
  misc_feature: MA Experiment ID: 108464 Result: Down-regulated in Transcription
  misc_feature: MA Experiment 108464 PARAMETER Experiment Name: At_Germinating_Seeds_cDNA_P Parameter: Age (day) Value: 4 vs. 0
  misc_feature: MA Experiment 108464 PARAMETER Experiment Name: At_Germinating_Seeds_cDNA_P Parameter: Tissue Value: Germinating Seeds
  misc_feature: MA Experiment ID: 20000224 Result: Down-regulated in Transcription
  misc_feature: MA Experiment ID: 20001557 Result: Up-regulated in Transcription
  misc_feature: MA Experiment 20001557 PARAMETER Experiment Name: At_Drought_Soil_Dry_P Parameter: Age (day) Value: 27
  misc_feature: MA Experiment 20001557 PARAMETER Experiment Name: At_Drought_Soil_Dry_P Parameter: Organism Value: A. thaliana
  misc_feature: MA Experiment 20001557 PARAMETER Experiment Name: At_Drought_Soil_Dry_P Parameter: Plant Line Value: WS
  misc_feature: MA Experiment 20001557 PARAMETER Experiment Name: At_Drought_Soil_Dry_P Parameter: Post Timepoint (hr) Value: 3
  misc_feature: MA Experiment 20001557 PARAMETER Experiment Name: At_Drought_Soil_Dry_P Parameter: Post-Treatment Value: Re-Water vs. No Drought
  misc_feature: MA Experiment 20001557 PARAMETER Experiment Name: At_Drought_Soil_Dry_P Parameter: Timepoint (day) Value: 13
  misc_feature: MA Experiment 20001557 PARAMETER Experiment Name: At_Drought_Soil_Dry_P Parameter: Treatment Value: Drought vs. No Drought
  misc_feature: MA Experiment ID: 20001757 Result: Up-regulated in Transcription
  misc_feature: MA Experiment 20001757 PARAMETER Experiment Name: At_50mM_NH4NO3_L-to-H_P Parameter: Timepoint (hr) Value: 6
  misc_feature: MA Experiment 20001757 PARAMETER Experiment Name: At_50mM_NH4NO3_L-to-H_P Parameter: Tissue Value: Leaf
  misc_feature: MA Experiment 20001757 PARAMETER Experiment Name: At_50mM_NH4NO3_L-to-H_P Parameter: Treatment Value: 50mM NH4NO3 vs 100mM Mannitol
agaaaccctagtttgaattttcacggccgacctctctctctcatctactaagctctcctccgagtattgttggcttcagaccaaatcttctccggcgctgtagcgtttcccccgtttcccctttttaacctttgcaaacaatgagtgggcgattttctcggtcaatctatgttggtaacttgcccggtgacattagggaacatgagattgaagatatcttttacaagtatggccgcattgtcgatattgaattgaaggttccacctcggcctccatgttattgctttgttgagtttgagcattctcgggatgctgaagatgccatcaagggccgtgatggctataatttggatggctgtcgcttgagggttgagcttgcacatggtggtcgaggacagtcttcaagtgatcgtcgtggtggctacggtggtggtggcagcggctatggtggtggaggtggtggtggtggatcagctcggtttggcgtctcacgacactctgaattccgagttattgtacgtgggctcccatcatctgcttcatggcaagatttgaaggatcatatgcggaaagctggtgatgtgtgctttgctgaggtgactcgagacagtgatggaacttatggtgttgtcgactacaccaattatgatgacatgaagtatgcaataaggaaacttgatgacacagagttcagaaacccctgggctagaggttttatccgggttaagaaatatgaaagctcccgatcaagaagcagaagcccaagcagaagcagaagtcgaagtcgtagccgaggccgtggtcgcagccatagccgcagtcgcagccttagcaggagcaagagcccaaggaaggatctgagtaaatcaccaaggcgatccctttccagatcgatttcaaaatctagatcgccatcgcccgacaagaagaagagtccccccagggcaatgtcgagatcaaagtccaggtccaggtccagatcgaggtctccgtccaaatctcctcccaaggttcgcgaaggcagtgtgtgattttgttaggcggtgaaaatggccaaaagaaagagtgcgaaaattctcaagtcaagatccactctctgtgtgtgtttttttgctgttttcggataattgacattttctgctgttctctgcttctttactcacaaatgatcatctttatactattatgacctgttatgttatggatgtttccgtgaccatcacaatacctctgagttttgc

SEQ ID NO: 31103 - protein, 296 aa, Arabidopsis thaliana
  peptide (1)..(296): Ceres Seq. ID no. 12321289
  misc_feature (9)..(77): Pfam Name: RNA recognition motif. (a.k.a. RRM, RBD, or RNP domain) Pfam Description: RNA recognition motif. (a.k.a. RRM, RBD, or RNP
  misc_feature (1)..(260): Homolog of NCBI NO: 5815236 NR Description: splicing factor SR1B [Arabidopsis thaliana]
  misc_feature (1)..(260): Homolog of NCBI NO: 30678395 NR Description: pre-mRNA splicing factor SF2 (SR1 protein)
  misc_feature (1)..(260): Homolog of NCBI NO: 2443473 NR Description: ASF/SF2 homolog [Arabidopsis thaliana]
  misc_feature (1)..(295): Homolog of NCBI NO: 33146854 NR Description: putative pre-mRNA splicing factor SF2
  misc_feature (1)..(295): Homolog of NCBI NO: 2129717 NR Description: splicing factor SF-2 homolog - Arabidopsis
  misc_feature (1)..(295): Homolog of NCBI NO: 5815235 NR Description: splicing factor SR1 [Arabidopsis thaliana]
  misc_feature (1)..(295): Homolog of NCBI NO: 30678391 NR Description: pre-mRNA splicing factor SF2 (SR1 protein)
  misc_feature (1)..(179): Homolog of NCBI NO: 11346384 NR Description: PRE-MRNA SPLICING FACTOR SF2-like protein -
  misc_feature (1)..(291): Homolog of NCBI NO: 12324445 NR Description: putative splicing factor; 53460-55514
  misc_feature (1)..(268): Homolog of NCBI NO: 22331714 NR Description: arginine/serine-rich splicing factor (atSRp34),
MSGRFSRSIYVGNLPGDIREHEIEDIFYKYGRIVDIELKVPPRPPCYCFVEFEHSRDAEDAIKGRDGYNLDGCRLRVELAHGGRGQSSSDRRGGYGGGGSGYGGGGGGGGSARFGVSRHSEFRVIVRGLPSSASWQDLKDHMRKAGDVCFAEVTRDSDGTYGVVDYTNYDDMKYAIRKLDDTEFRNPWARGFIRVKKYESSRSRSRSPSRSRSRSRSRGRGRSHSRSRSLSRSKSPRKDLSKSPRRSLSRSISKSRSPSPDKKKSPPRAMSRSKSRSRSRSRSPSKSPPKVREGSV

SEQ ID NO: 31104 - protein, 155 aa, Arabidopsis thaliana
  peptide (1)..(155): Ceres Seq. ID no. 12321290
  misc_feature (1)..(119): Homolog of NCBI NO: 5815236 NR Description: splicing factor SR1B [Arabidopsis thaliana]
  misc_feature (1)..(119): Homolog of NCBI NO: 30678395 NR Description: pre-mRNA splicing factor SF2 (SR1 protein)
  misc_feature (1)..(119): Homolog of NCBI NO: 2443473 NR Description: ASF/SF2 homolog [Arabidopsis thaliana]
  misc_feature (1)..(154): Homolog of NCBI NO: 33146854 NR Description: putative pre-mRNA splicing factor SF2
  misc_feature (1)..(154): Homolog of NCBI NO: 2129717 NR Description: splicing factor SF-2 homolog - Arabidopsis
  misc_feature (1)..(154): Homolog of NCBI NO: 5815235 NR Description: splicing factor SR1 [Arabidopsis thaliana]
  misc_feature (1)..(154): Homolog of NCBI NO: 30678391 NR Description: pre-mRNA splicing factor SF2 (SR1 protein)
  misc_feature (1)..(38): Homolog of NCBI NO: 11346384 NR Description: PRE-MRNA SPLICING FACTOR SF2-like protein -
  misc_feature (1)..(150): Homolog of NCBI NO: 12324445 NR Description: putative splicing factor; 53460-55514
  misc_feature (1)..(127): Homolog of NCBI NO: 22331714 NR Description: arginine/serine-rich splicing factor (atSRp34),
MRKAGDVCFAEVTRDSDGTYGVVDYTNYDDMKYAIRKLDDTEFRNPWARGFIRVKKYESSRSRSRSPSRSRSRSRSRGRGRSHSRSRSLSRSKSPRKDLSKSPRRSLSRSISKSRSPSPDKKKSPPRAMSRSKSRSRSRSRSPSKSPPKVREGSV

SEQ ID NO: 31105 - DNA, 2221 bp, Arabidopsis thaliana
  misc_feature (1)..(2221): Ceres Seq. ID no. 13645720
  misc_feature: MA Experiment ID: 20000328 Result: Down-regulated in Transcription
  misc_feature: MA Experiment 20000328 PARAMETER Experiment Name: At_42deg_Heat_Sub_P Parameter: Age (day) Value: 14
  misc_feature: MA Experiment 20000328 PARAMETER Experiment Name: At_42deg_Heat_Sub_P Parameter: Organism Value: A. thaliana
  misc_feature: MA Experiment 20000328 PARAMETER Experiment Name: At_42deg_Heat_Sub_P Parameter: Plant Line Value: WS
  misc_feature: MA Experiment 20000328 PARAMETER Experiment Name: At_42deg_Heat_Sub_P Parameter: Temperature (deg C) Value: 42 vs. 22
  misc_feature: MA Experiment 20000328 PARAMETER Experiment Name: At_42deg_Heat_Sub_P Parameter: Timepoint (hr) Value: 6
  misc_feature: MA Experiment 20000328 PARAMETER Experiment Name: At_42deg_Heat_Sub_P Parameter: Tissue Value: Aerial
  misc_feature: MA Experiment ID: 20000355 Result: Down-regulated in Transcription
  misc_feature: MA Experiment 20000355 PARAMETER Experiment Name: At_Siliques_Sub_P Parameter: Age (day) Value: 21
  misc_feature: MA Experiment 20000355 PARAMETER Experiment Name: At_Siliques_Sub_P Parameter: Organism Value: A. thaliana
  misc_feature: MA Experiment 20000355 PARAMETER Experiment Name: At_Siliques_Sub_P Parameter: Plant Line Value: WS
  misc_feature: MA Experiment 20000355 PARAMETER Experiment Name: At_Siliques_Sub_P Parameter: Tissue Value: Less Than 5mm Siliques vs. Whole Plant
gtttagggtttggttgaattttacagagcttccggatcagagagcttgagaagaaatcaaatcgagaaaatgaggatatcgtttgcgattgcatcaactgcgaagagatttgttcatcggagtcttgtggtgagaggtaatgctgcaactgtttctccctctttttcctttttctggagacgagctttctctggtaagactagttatgattacagagagaaactgagtagaaatgggctgagtgaattaaagttagatgacgctgttgctctgttcggtgaaatggtcaagtctcgtcccttcccttccatcattgagttcagcaaactgttgagtgcaattgctaagatgaacaagttcgatgttgtcatctctctcggcgagcagatgcaaaacttgggaattcctcataatcactatacttacagtattttgattaactgtttttgtcgacgctctcaactccctcttgctttagctgttcttggcaagatgatgaaacttggctatgagcccaatattgtcacgctttcttcgctgctcaatgggtattgccacagtaagaggatatccgaggctgtagctttggttgatcagatgttcgtaacggggtatcaacccaataccgtcacatttaacactctaatccatggactttttcttcacaacaaagcttcagaagcaatggctttaattgatcgaatggttgcaaaaggttgtcaaccagatctggttacttatggagtggtagtaaatggattatgtaagagaggtgatactgatttggcttttaatctgctcaacaagatggaacaagggaaattagaacctggtgttttgatctacaacacaatcattgatggtctttgcaaatacaaacatatggatgatgcgctcaacctatttaaagaaatggaaacaaaaggcattagaccaaatgttgttacctacagctccctcataagttgcctttgtaattacggaagatggagtgatgcctctcgcctccttagtgatatgattgagaggaaaatcaaccctgatgtattcactttcagcgcattgatcgatgcgtttgtgaaggagggcaagcttgtagaggctgagaaattgtacgacgagatggtcaaaaggtccatagatcctagtattgtcacatacagttcattgatcaacgggttttgtatgcacgatcgtctagacgaggccaagcagatgtttgagttcatggttagcaagcattgttttccagatgtagtgacttataatacgcttataaagggattttgcaagtataaaagggtagaagagggtatggaagtcttccgtgagatgtctcaaagaggattggttggcaacactgtcacttacaacattcttatccaagggttatttcaagctggagattgtgatatggctcaagaaatattcaaagagatggtatctgatggcgtgcctcccaatattatgacatacaacactttgttagatggactttgtaaaaatgggaagctagagaaagcaatggttgtattcgagtatctgcaaaggagtaaaatggaacctactatttacacatataatattatgattgaagggatgtgcaaggcagggaaggtggaagatgggtgggatctattttgtaatctcagccttaaaggagtgaagccggatgttgtagcgtacaatacaatgatatcaggattttgtaggaaaggttcaaaggaggaagcagatgccttatttaaagaaatgaaagaagatgggactcttccaaacagcggttgctataatacgctgattagggcacgccttagagatggtgacagagaagcatcagctgaactcatcaaagaaatgaggagttgcgggtttgctggagatgcttcaaccattggcttggtcactaatatgttacatgatgggagattggacaaaagcttcctcgatatgctttcttaaaacagtttcatcatccttgagtcgagagaatagtcgagcaaaccatatccccttgaaagcagcatctgcgaggctgcaaacaagggttgataaggagcactcttcaagcagatttcagatttcgacttgagatttttcgggctcgagggtgactttgcttttgtttctccccttccttctttttcacaaagctcaatgatttttttttggtgattgtcttgtgaactgctaagctttttaactcatattgagtcatggc

SEQ ID NO: 31106 - protein, 630 aa, Arabidopsis thaliana
  peptide (1)..(630): Ceres Seq. ID no. 13645721
  misc_feature (502)..(536): Pfam Name: PPR repeat Pfam Description: PPR repeat
  misc_feature (35)..(620): Homolog of NCBI NO: 25402719 NR Description: protein F5O11.4 [imported] - Arabidopsis thaliana
  misc_feature (45)..(530): Homolog of NCBI NO: 15221621 NR Description: pentatricopeptide (PPR) repeat-containing protein
  misc_feature (35)..(630): Homolog of NCBI NO: 22531122 NR Description: putative membrane-associated salt-inducible
  misc_feature (9)..(630): Homolog of NCBI NO: 15221674 NR Description: pentatricopeptide (PPR) repeat-containing protein
  misc_feature (1)..(630): Homolog of NCBI NO: 15221515 NR Description: pentatricopeptide (PPR) repeat-containing protein
  misc_feature (6)..(611): Homolog of NCBI NO: 15221621 NR Description: pentatricopeptide (PPR) repeat-containing protein
  misc_feature (7)..(623): Homolog of NCBI NO: 15221635 NR Description: pentatricopeptide (PPR) repeat-containing protein
  misc_feature (6)..(630): Homolog of NCBI NO: 25404377 NR Description: hypothetical protein F16P17.5 [imported] -
  misc_feature (29)..(630): Homolog of NCBI NO: 25404380 NR Description: hypothetical protein F16P17.7 [imported] -
  misc_feature (1)..(630): Homolog of NCBI NO: 15221691 NR Description: pentatricopeptide (PPR) repeat-containing protein
MRISFAIASTAKRFVHRSLVVRGNAATVSPSFSFFWRRAFSGKTSYDYREKLSRNGLSELKLDDAVALFGEMVKSRPFPSIIEFSKLLSAIAKMNKFDVVISLGEQMQNLGIPHNHYTYSILINCFCRRSQLPLALAVLGKMMKLGYEPNIVTLSSLLNGYCHSKRISEAVALVDQMFVTGYQPNTVTFNTLIHGLFLHNKASEAMALIDRMVAKGCQPDLVTYGVVVNGLCKRGDTDLAFNLLNKMEQGKLEPGVLIYNTIIDGLCKYKHMDDALNLFKEMETKGIRPNVVTYSSLISCLCNYGRWSDASRLLSDMIERKINPDVFTFSALIDAFVKEGKLVEAEKLYDEMVKRSIDPSIVTYSSLINGFCMHDRLDEAKQMFEFMVSKHCFPDVVTYNTLIKGFCKYKRVEEGMEVFREMSQRGLVGNTVTYNILIQGLFQAGDCDMAQEIFKEMVSDGVPPNIMTYNTLLDGLCKNGKLEKAMVVFEYLQRSKMEPTIYTYNIMIEGMCKAGKVEDGWDLFCNLSLKGVKPDVVAYNTMISGFCRKGSKEEADALFKEMKEDGTLPNSGCYNTLIRARLRDGDREASAELIKEMRSCGFAGDASTIGLVTNMLHDGRLDKSFLDMLS

SEQ ID NO: 31107 - protein, 559 aa, Arabidopsis thaliana
  peptide (1)..(559): Ceres Seq. ID no. 13645722
  misc_feature (431)..(465): Pfam Name: PPR repeat Pfam Description: PPR repeat
  misc_feature (1)..(549): Homolog of NCBI NO: 25402719 NR Description: protein F5O11.4 [imported] - Arabidopsis thaliana
  misc_feature (1)..(459): Homolog of NCBI NO: 15221621 NR Description: pentatricopeptide (PPR) repeat-containing protein
  misc_feature (1)..(559): Homolog of NCBI NO: 22531122 NR Description: putative membrane-associated salt-inducible
  misc_feature (1)..(559): Homolog of NCBI NO: 15221674 NR Description: pentatricopeptide (PPR) repeat-containing protein
  misc_feature (1)..(559): Homolog of NCBI NO: 15221515 NR Description: pentatricopeptide (PPR) repeat-containing protein
  misc_feature (1)..(540): Homolog of NCBI NO: 15221621 NR Description: pentatricopeptide (PPR) repeat-containing protein
  misc_feature (1)..(552): Homolog of NCBI NO: 15221635 NR Description: pentatricopeptide (PPR) repeat-containing protein
  misc_feature (1)..(559): Homolog of NCBI NO: 25404377 NR Description: hypothetical protein F16P17.5 [imported] -
  misc_feature (1)..(559): Homolog of NCBI NO: 25404380 NR Description: hypothetical protein F16P17.7 [imported] -
  misc_feature (1)..(559): Homolog of NCBI NO: 15221691 NR Description: pentatricopeptide (PPR) repeat-containing protein
MVKSRPFPSIIEFSKLLSAIAKMNKFDVVISLGEQMQNLGIPHNHYTYSILINCFCRRSQLPLALAVLGKMMKLGYEPNIVTLSSLLNGYCHSKRISEAVALVDQMFVTGYQPNTVTFNTLIHGLFLHNKASEAMALIDRMVAKGCQPDLVTYGVVVNGLCKRGDTDLAFNLLNKMEQGKLEPGVLIYNTIIDGLCKYKHMDDALNLFKEMETKGIRPNVVTYSSLISCLCNYGRWSDASRLLSDMIERKINPDVFTFSALIDAFVKEGKLVEAEKLYDEMVKRSIDPSIVTYSSLINGFCMHDRLDEAKQMFEFMVSKHCFPDVVTYNTLIKGFCKYKRVEEGMEVFREMSQRGLVGNTVTYNILIQGLFQAGDCDMAQEIFKEMVSDGVPPNIMTYNTLLDGLCKNGKLEKAMVVFEYLQRSKMEPTIYTYNIMIEGMCKAGKVEDGWDLFCNLSLKGVKPDVVAYNTMISGFCRKGSKEEADALFKEMKEDGTLPNSGCYNTLIRARLRDGDREASAELIKEMRSCGFAGDASTIGLVTNMLHDGRLDKSFLDMLS

SEQ ID NO: 31108 - protein, 537 aa, Arabidopsis thaliana
  peptide (1)..(537): Ceres Seq. ID no. 13645723
  misc_feature (409)..(443): Pfam Name: PPR repeat Pfam Description: PPR repeat
  misc_feature (1)..(527): Homolog of NCBI NO: 25402719 NR Description: protein F5O11.4 [imported] - Arabidopsis thaliana
  misc_feature (1)..(437): Homolog of NCBI NO: 15221621 NR Description: pentatricopeptide (PPR) repeat-containing protein
  misc_feature (1)..(537): Homolog of NCBI NO: 22531122 NR Description: putative membrane-associated salt-inducible
  misc_feature (1)..(537): Homolog of NCBI NO: 15221674 NR Description: pentatricopeptide (PPR) repeat-containing protein
  misc_feature (1)..(537): Homolog of NCBI NO: 15221515 NR Description: pentatricopeptide (PPR) repeat-containing protein
  misc_feature (1)..(518): Homolog of NCBI NO: 15221621 NR Description: pentatricopeptide (PPR) repeat-containing protein
  misc_feature (1)..(530): Homolog of NCBI NO: 15221635 NR Description: pentatricopeptide (PPR) repeat-containing protein
  misc_feature (1)..(537): Homolog of NCBI NO: 25404377 NR Description: hypothetical protein F16P17.5 [imported] -
  misc_feature (1)..(537): Homolog of NCBI NO: 25404380 NR Description: hypothetical protein F16P17.7 [imported] -
  misc_feature (1)..(537): Homolog of NCBI NO: 15221691 NR Description: pentatricopeptide (PPR) repeat-containing protein
MNKFDVVISLGEQMQNLGIPHNHYTYSILINCFCRRSQLPLALAVLGKMMKLGYEPNIVTLSSLLNGYCHSKRISEAVALVDQMFVTGYQPNTVTFNTLIHGLFLHNKASEAMALIDRMVAKGCQPDLVTYGVVVNGLCKRGDTDLAFNLLNKMEQGKLEPGVLIYNTIIDGLCKYKHMDDALNLFKEMETKGIRPNVVTYSSLISCLCNYGRWSDASRLLSDMIERKINPDVFTFSALIDAFVKEGKLVEAEKLYDEMVKRSIDPSIVTYSSLINGFCMHDRLDEAKQMFEFMVSKHCFPDVVTYNTLIKGFCKYKRVEEGMEVFREMSQRGLVGNTVTYNILIQGLFQAGDCDMAQEIFKEMVSDGVPPNIMTYNTLLDGLCKNGKLEKAMVVFEYLQRSKMEPTIYTYNIMIEGMCKAGKVEDGWDLFCNLSLKGVKPDVVAYNTMISGFCRKGSKEEADALFKEMKEDGTLPNSGCYNTLIRARLRDGDREASAELIKEMRSCGFAGDASTIGLVTNMLHDGRLDKSFLDMLS

SEQ ID NO: 31109 - DNA, 1043 bp, Arabidopsis thaliana
  misc_feature (1)..(1043): Ceres Seq. ID no. 12327203
  misc_feature: MA Experiment ID: 108435 Result: Down-regulated in Transcription
  misc_feature: MA Experiment 108435 PARAMETER Experiment Name: At_stm_Mutants_cDNA_P Parameter: Plant Line Value: wt Landsburg vs stm
  misc_feature: MA Experiment 108435 PARAMETER Experiment Name: At_stm_Mutants_cDNA_P Parameter: Tissue Value: Shoot Apical Meristem Region
  misc_feature: MA Experiment ID: 108462 Result: Up-regulated in Transcription
  misc_feature: MA Experiment 108462 PARAMETER Experiment Name: At_Germinating_Seeds_cDNA_P Parameter: Age (day) Value: 2 vs. 0
  misc_feature: MA Experiment 108462 PARAMETER Experiment Name: At_Germinating_Seeds_cDNA_P Parameter: Tissue Value: Germinating Seeds
  misc_feature: MA Experiment ID: 108488 Result: Down-regulated in Transcription
  misc_feature: MA Experiment ID: 108489 Result: Up-regulated in Transcription
  misc_feature: MA Experiment ID: 108595 Result: Down-regulated in Transcription
  misc_feature: MA Experiment 108595 PARAMETER Experiment Name: At_Ler-pi_Ovule_cDNA_P Parameter: Plant Line Value: null
  misc_feature: MA Experiment ID: 20000071 Result: Up-regulated in Transcription
  misc_feature: MA Experiment 20000071 PARAMETER Experiment Name: At_100uM_ABA_Mutants_cDNA_P Parameter: Plant Line Value: CS8104
  misc_feature: MA Experiment 20000071 PARAMETER Experiment Name: At_100uM_ABA_Mutants_cDNA_P Parameter: Timepoint (hr) Value: 6
  misc_feature: MA Experiment 20000071 PARAMETER Experiment Name: At_100uM_ABA_Mutants_cDNA_P Parameter: Tissue Value: Aerial
  misc_feature: MA Experiment 20000071 PARAMETER Experiment Name: At_100uM_ABA_Mutants_cDNA_P Parameter: Treatment Value: 100uM ABA vs. No Treatment
  misc_feature: MA Experiment ID: 20000117 Result: Up-regulated in Transcription
  misc_feature: MA Experiment 20000117 PARAMETER Experiment Name: At_100uM_ABA_Mutants_cDNA_P Parameter: Plant Line Value: Columbia
  misc_feature: MA Experiment 20000117 PARAMETER Experiment Name: At_100uM_ABA_Mutants_cDNA_P Parameter: Timepoint (hr) Value: 6
  misc_feature: MA Experiment 20000117 PARAMETER Experiment Name: At_100uM_ABA_Mutants_cDNA_P Parameter: Tissue Value: Aerial
  misc_feature: MA Experiment 20000117 PARAMETER Experiment Name: At_100uM_ABA_Mutants_cDNA_P Parameter: Treatment Value: 100uM ABA vs. No Treatment
  misc_feature: MA Experiment ID: 20000185 Result: Down-regulated in Transcription
  misc_feature: MA Experiment 20000185 PARAMETER Experiment Name: At_Roots__P Parameter: Age (day) Value: 7 vs. 21
  misc_feature: MA Experiment 20000185 PARAMETER Experiment Name: At_Roots__P Parameter: Organism Value: A. thaliana
  misc_feature: MA Experiment 20000185 PARAMETER Experiment Name: At_Roots__P Parameter: Tissue Value: Roots vs. Whole Plant
  misc_feature: MA Experiment ID: 20000794 Result: Up-regulated in Transcription
  misc_feature: MA Experiment 20000794 PARAMETER Experiment Name: At_Petals_P Parameter: Age (day) Value: 23-25 days
  misc_feature: MA Experiment 20000794 PARAMETER Experiment Name: At_Petals_P Parameter: Plant Line Value: WS
  misc_feature: MA Experiment 20000794 PARAMETER Experiment Name: At_Petals_P Parameter: Tissue Value: Petals vs. Whole plant
  misc_feature: MA Experiment ID: 20001905 Result: Up-regulated in Transcription
  misc_feature: MA Experiment 20001905 PARAMETER Experiment Name: At_Drought_Reproduction_P Parameter: Age (day) Value: 40
  misc_feature: MA Experiment 20001905 PARAMETER Experiment Name: At_Drought_Reproduction_P Parameter: Organism Value: A. thaliana
  misc_feature: MA Experiment 20001905 PARAMETER Experiment Name: At_Drought_Reproduction_P Parameter: Plant Line Value: WS
  misc_feature: MA Experiment 20001905 PARAMETER Experiment Name: At_Drought_Reproduction_P Parameter: Timepoint (day) Value: 10
  misc_feature: MA Experiment 20001905 PARAMETER Experiment Name: At_Drought_Reproduction_P Parameter: Tissue Value: Rosettes
  misc_feature: MA Experiment 20001905 PARAMETER Experiment Name: At_Drought_Reproduction_P Parameter: Treatment Value: Drought vs. No Drought
cactgatatctgtgatatctctttgtcccccatctattaatctcctcctccgcatcgccgccgtgcacttccccacctcttccggcggatatgatgagcattgtatcaagtcatcatcactgtcaacaatctgttatacacgaacgtagcggtataggaacaatatctaaggtttcttgttcgagatattgcggtccgtgtttctctggacgactggctttctctcatagcctctgcttgaagactacttatgggaaaactgataggagaaagttttcaagaatttgcagtattgtggatgatgaggggaatctagataattcggatgacgaggaaaaggaatcactcgatgataaaactaaaaggcaagcgaatgatatgaatcgggctaatcttgaaagaatggttgggtcagatgattctgcatttaacggcttagatcttgcaaccctcatcagacagaagtatggaaaatcttatgatgttcaactcatcaagaaggagttcatggggaagaatcttcttgcaatgaatgtcatgtggaagtacagagaacagaggtcttttcctctaaccgaagaagaatatatacttagacttgacgatgtagccaacatgttgaaatgctggggagcagtctcacatatccgtagcagcctagcaaagtcgaaggagcgacctcggatagggaaggctgtcagcattttcatagacatggattcgacagggggaagagcaaatgaatggatttacaagtaaaaatcgaccggtttgcagctgctaaaccaagaaatcaaaaggttttgtctctacgtttatcgtcatcaattcattttgaaggctcttcagtgatggttgcctgcagaaaccgaggtttttgctatatttgatgtccaaatcaggtagtatatatgtacatgtgtgtattaagtagacacaaatctttacttgaactctctgtgtaaaatatctccatgtgttgaaattcaatcatctttgtgaatcttcctctctttgtgatctgtaaaagtattagttttggc

SEQ ID NO: 31110 - protein, 222 aa, Arabidopsis thaliana
  peptide (1)..(222): Ceres Seq. ID no. 12327204
  misc_feature (117)..(205): Homolog of NCBI NO: 33866372 NR Description: conserved hypothetical protein [Synechococcus sp.
  misc_feature (115)..(205): Homolog of NCBI NO: 37521175 NR Description: hypothetical protein gsr1606 [Gloeobacter
  misc_feature (115)..(220): Homolog of NCBI NO: 22298501 NR Description: ORF_ID:tll0958~hypothetical protein
  misc_feature (115)..(219): Homolog of NCBI NO: 16332324 NR Description: unknown protein [Synechocystis sp. PCC 6803]
  misc_feature (115)..(220): Homolog of NCBI NO: 23130142 NR Description: hypothetical protein [Nostoc punctiforme]
  misc_feature (115)..(220): Homolog of NCBI NO: 17229946 NR Description: hypothetical protein [Nostoc sp. PCC 7120]
  misc_feature (115)..(220): Homolog of NCBI NO: 23041855 NR Description: hypothetical protein [Trichodesmium erythraeum
  misc_feature (1)..(222): Homolog of NCBI NO: 18402409 NR Description: expressed protein
  misc_feature (1)..(222): Homolog of NCBI NO: 11994202 NR Description: dbj|BAA18864.1~gene_id:MPN9.15~similar to unknown
MMSIVSSHHHCQQSVIHERSGIGTISKVSCSRYCGPCFSGRLAFSHSLCLKTTYGKTDRRKFSRICSIVDDEGNLDNSDDEEKESLDDKTKRQANDMNRANLERMVGSDDSAFNGLDLATLIRQKYGKSYDVQLIKKEFMGKNLLAMNVMWKYREQRSFPLTEEEYILRLDDVANMLKCWGAVSHIRSSLAKSKERPRIGKAVSIFIDMDSTGGRANEWIYK

SEQ ID NO: 31111 - protein, 221 aa, Arabidopsis thaliana
  peptide (1)..(221): Ceres Seq. ID no. 12327205
  misc_feature (116)..(204): Homolog of NCBI NO: 33866372 NR Description: conserved hypothetical protein [Synechococcus sp.
  misc_feature (114)..(204): Homolog of NCBI NO: 37521175 NR Description: hypothetical protein gsr1606 [Gloeobacter
  misc_feature (114)..(219): Homolog of NCBI NO: 22298501 NR Description: ORF_ID:tll0958~hypothetical protein
  misc_feature (114)..(218): Homolog of NCBI NO: 16332324 NR Description: unknown protein [Synechocystis sp. PCC 6803]
  misc_feature (114)..(219): Homolog of NCBI NO: 23130142 NR Description: hypothetical protein [Nostoc punctiforme]
  misc_feature (114)..(219): Homolog of NCBI NO: 17229946 NR Description: hypothetical protein [Nostoc sp. PCC 7120]
  misc_feature (114)..(219): Homolog of NCBI NO: 23041855 NR Description: hypothetical protein [Trichodesmium erythraeum
  misc_feature (1)..(221): Homolog of NCBI NO: 18402409 NR Description: expressed protein
  misc_feature (1)..(221): Homolog of NCBI NO: 11994202 NR Description: dbj|BAA18864.1~gene_id:MPN9.15~similar to unknown
MSIVSSHHHCQQSVIHERSGIGTISKVSCSRYCGPCFSGRLAFSHSLCLKTTYGKTDRRKFSRICSIVDDEGNLDNSDDEEKESLDDKTKRQANDMNRANLERMVGSDDSAFNGLDLATLIRQKYGKSYDVQLIKKEFMGKNLLAMNVMWKYREQRSFPLTEEEYILRLDDVANMLKCWGAVSHIRSSLAKSKERPRIGKAVSIFIDMDSTGGRANEWIYK

SEQ ID NO: 31112 - protein, 126 aa, Arabidopsis thaliana
  peptide (1)..(126): Ceres Seq. ID no. 12327206
  misc_feature (21)..(109): Homolog of NCBI NO: 33866372 NR Description: conserved hypothetical protein [Synechococcus sp.
  misc_feature (19)..(109): Homolog of NCBI NO: 37521175 NR Description: hypothetical protein gsr1606 [Gloeobacter
  misc_feature (19)..(124): Homolog of NCBI NO: 22298501 NR Description: ORF_ID:tll0958~hypothetical protein
  misc_feature (19)..(123): Homolog of NCBI NO: 16332324 NR Description: unknown protein [Synechocystis sp. PCC 6803]
  misc_feature (19)..(124): Homolog of NCBI NO: 23130142 NR Description: hypothetical protein [Nostoc punctiforme]
  misc_feature (19)..(124): Homolog of NCBI NO: 17229946 NR Description: hypothetical protein [Nostoc sp. PCC 7120]
  misc_feature (19)..(124): Homolog of NCBI NO: 23041855 NR Description: hypothetical protein [Trichodesmium erythraeum
  misc_feature (1)..(126): Homolog of NCBI NO: 18402409 NR Description: expressed protein
  misc_feature (1)..(126): Homolog of NCBI NO: 11994202 NR Description: dbj|BAA18864.1~gene_id:MPN9.15~similar to unknown
MNRANLERMVGSDDSAFNGLDLATLIRQKYGKSYDVQLIKKEFMGKNLLAMNVMWKYREQRSFPLTEEEYILRLDDVANMLKCWGAVSHIRSSLAKSKERPRIGKAVSIFIDMDSTGGRANEWIYK
